United States Patent Application Publication US 2004/0034888 A1 - sequence listing, part 11

SEQ ID NO: 25144 - DNA, 1516 bp, Zea mays
  Clone ID: LIB3689-259-H4_FLI
gctttcgtgccttcagcccttcagtcttcaccagtcgcgcgccgccatgtcggagaccgaatcggcggcagcggcgccggtggctgcggctgaatcgaagcctcggcgactgcgggggcacaagaagggcgccgtcacctgctgcgtcgcctcctccgcccgccccggcgtcgtcgcgtcctccggcgaggatggatgtctttgctggtttgatctgcgcaccaaagatgtacttttgaccatggaggcagcaaataaaccaatttcttcaatttgctttaaaccaggaaatgaagattttgtgtatatctctgctggaaatgaaatattgtcctttgatgttcgtatgggaactcaaacaaagccattagagacatataactacaatagagatgaaatcaatcagattgctgtcagctctaaaggttttctcgctgctgcagatgatagtggggatgttaagattgtcaataccattcagaaatgcctgtataaaagattaagggaagcccacacaagtatttgcagcagcgtgcaattcattccttggagaccttggacagcaattactgggggccttgactcaaagctggctgcatgggatttctccaaaggacgaacactgttttctattgattatggatcacctgaattgcaaaacggcagttcttccggtagtgcagggcaatgtttcaaccctgcttttgttcattccgtagcagtttctgaagagggtattttgggagggctctacaaggtttgtgctgttgcaaggggggatggtgctgttgatgtggttgatcttgagtatgaactggcccctgcgaaatcgaagggacctcctcgggcagctattttgacaacgagatcaaaaggcgctgaacttggagatgggagctgcaatcaaagtcgagcgaaaagaatccatcttgactacaccatgggcggccatactgcagctgtatcttgtgtagcattttcagcatttggtgagaaggggaagttcctcatttcaggtggcaatgatgcatcagtgaagctgtgggattggtcgaaaggattttactctgaaacaaacagcaaagttgatttggttttggatattgatgtaaagaaaaaggtaaattggctttgtactgctccaactgattcagataacttgattgtgtgtgacacatccaaggtggtcaaagtatatagtttccggtagatggatcaaggtgtagcctcagtttgtcaggcagttatctgagggagtgaagcttgtctgaccgttggaaccaatctggtcctgactctggtatccagatattacaagcctgccgcagacagttcctgagttgtgaggtcattggttagcaatttgcaatgtcagttgtggcgcagaacagatctgataaagtatatattattttgttactgtcagaactttttgtacaacttccagtctgctagcttagctggacttggcatgtatatctctgttgtacggtgaaatgaatttacgtgtttggag

SEQ ID NO: 25145 - DNA, 1868 bp, Zea mays
  Clone ID: LIB3689-260-A8_FLI
ctccttttgctcggaacgcacacacagcccggtccccgatctccgatcccctcgtcgatccaagatgcagatcttcgtcaagaccctcactggaaagactatcaccctcgaggtggagtcttctgacaccattgacaacgtcaaggccaagatccaggacaaggagggcattcccccggaccagcagcggctcatcttcgctggcaagcagctcgaggacgggcgcacacttgccgactacaacatccagaaggagagcaccctccaccttgttctccgcctcaggggaggcatgcagatcttcgtcaagaccctcactggaaagactatcaccctcgaggtggagtcttctgacaccatcgacaacgtcaaggccaagatccaggacaaggagggcatccctccggaccagcagcggctcatttttgctggcaagcagctcgaggacgggcgcacgctggccgactacaacattcagaaggagagcaccctccacttggtgttgcgtctcaggggcggcatgcagatatttgtgaagactctgactggcaagactatcacccttgaggtcgagtcttctgataccatcgacaatgtcaaggccaagatccaggacaaggagggcatccctccggaccagcagcggctcatttttgccggcaagcagctcgaggacgggcgcacgctggccgactacaacattcagaaggagagcaccctccacttggtgctgcgtctcaggggtggcatgcagatcttcgtgaagacacttactggcaagacgatcacccttgaggtggagtcctcggacaccatcgacaatgtcaaggctaagatccaggacaaggaaggcattccaccagaccagcagcggctcatctttgctggcaagcagctggaggatggccgtacccttgcggattacaacatccagaaggagagcaccctccacttggtgctgcgtctcaggggcggcatgcagatcttcgtgaagacacttactggcaagacaatcacccttgaggtggagtcctcggacaccattgacaacgtcaaggccaagatccaggacaaggagggcatcccaccggaccaacagcgcctgatcttcgccggcaagcagctggaggatggtcgcactcttgcggattacaacatccagaaggagagcaccctccacctggtgctccgcctcaggggtggcatgcagatctttgtgaagacattgactggcaagaccatcaccttggaggtggagtcgtctgacacaatcgataatgtcaaagccaagatccaggacaaggagggcattccaccggaccagcagcgcctgatctttgctggcaagcagctggaggatggccgtaccctcgccgactacaacatccagaaggagagcaccctccacctggtgctccgcttgcgaggtggtatgcagatctttgtgaagaccttgactggcaagaccataaccctggaggttgagagctccgacaccatcgacaacgtgaaggcgaagatccaggacaaagagggcatccccccagaccagcagcgtctgatcttcgctggcaagcagctggaggatggccgcaccctagcagactacaacatccagaaggagagcactctccacctggtgctccgcctccgcggtggtcagtaagccatgggtcatttaagctgctgctgtacctgggtatctgcgtcgtctggtgccctctggtgtacctctatatggatgtcgtcgtctaataaacatctgtggtttgtgtgtcatgaatcgtggttgtggcttcgttggtttaatggacctgttgtgtcctctgtgtgttgtacccaaaactcttctgcagcagtatggctcg

SEQ ID NO: 25146 - DNA, 905 bp, Zea mays; identical to SEQ ID NO: 20284
  Clone ID: LIB3689-260-B2_FLI

SEQ ID NO: 25147 - DNA, 2347 bp, Zea mays
  Clone ID: LIB3689-260-B5_FLI
ggctcccttcttcgctctccatgagctgaccaaggctgggcagcaacacggcctcttccctggctcagagattccccccacaagaccacggcatttccccttgctactgagcaaacatcgcagccttttctttttgcgatttttcttcacatttttgtagacaccaacacccatcccttcagtgttctgaatataaatacagtagattcatccaacagaaaacacaaaactctcgatttgttctgatcactcggttccatctcccaaagcgaccccgccgccagtagattcatccggcggcggcaagaacttggttctgctccttccttctgccgtgcagaaacgatcccgccgccttcagtagcggtagaagaagccctatcaagcgagtgaagattcagcagcaggcgaagaggtcgagtctccagcgatggcggcggcgctggagtgctggtcggggcggccgagcaccgacgaggagatggtggagcaggtcctcatgaagccccacggccgttcagacgactccctcccgacctgcgctgactctgcctccgccggcgagccgacgtcggcgcccgcgccgcccaaccccaagaagtggcagcggctgggccgcaactttgccggcgccatcgccgcgttcaagaacacgctgagcctggatggcggcggcctcccccgcgacccctcgcctcgggccgagaagccgccgccgctcctcctccgtggcctcgcgcagctctactcccgcggcgccgccgccaatcagcagctgccggagaagctcgtagctgacctccgccgccacttcgatgctctccccaacagctacgcacaggcaggatttgacatgaaagatgtcctcttgcatgcccgccttgtagagcaggcgaccggcgaggatcagcctgcggtgaacattgaggaagtccatggcagaggagctggtgatgaaggcactgttttccagctaacatttgcttgcactgccccgctctcgtggcagtcaatgtcaggatcactagacagcccttcgttctgctgcaagaagatccagatctttgagaagagaggtctgacacttggtgtcgtcatgatacttgtgcagactgggaacgagacgctcttcaagaaccgggttgagtctgcgctgaaatcggtagcaaagaagcaaaggaagaacagtggtggtggtgtgaagctgccattcgggctctgcggttgccaggaagaaggatcgagaaacttcgatgaggagtcgatgtttgatccggacgatggccaggtactcgacaatgagcctgcgcgcaggccacagctccccactcgcctaccgcagtcatcagtcttcgtctcagtagatgaatggcagaccatccgctctggtggcgaggagctcggtcgctggatgctgcgttccgaggagatcgagttcatcgattgggttggtgcgaattcgttcaggggtgtctatagaggaaagaaggtttgggtcaacaaattgaggggctgtgacatgggaagtgcttacgaagttgagattcgtcaggacttgctgcagttgatgagctgtggccagaggaacatcctgcaattccatggcatctgtttcaatggaaaccatgggctctgcatagtaaccaggatgatggaagggggatcagttcatgatattcttacgcagagaaacaagaggctgtccctccgggacacggtcaggatcgctcttgatgtcgccgacgctctggctttcatgaacagctacggcattgcgtaccgtgatctcaatgctcggaagatcctgctggataggcaagggaatgcttgcctcggggatatgggcattgttaccccttgtagtaatgttggtgaggtcactgagtatgagacgtctgggtaccgatggctggctccagagatcatcgctggagatcctgaaaccgtctccgagacctggatgagcaacgtctacagctacggaatggtgctctgggagatgatcaccggagaggaggcctactccgcctactctccggtgcaagcggccgtcggaatcgcagcctgcgggctgaggccggagatccccagagagtgtcctccttttctgaggtcactgatgaacaggtgctgggacaattcccctctgaagcgccctcagttctctgagatcatatccatcctacaaaggcagcagaacgttagatagtgttcttttcttttctttttttctcttccccccttccttctatattattatatatgctatatatcagtttggcttggctgtttgcatgcctaatcatgcaggaaactgcatctgagaaaaaatataatataattatat

SEQ ID NO: 25148 - DNA, 1760 bp, Zea mays
  Clone ID: LIB3689-260-C9_FLI
ggcggcagaggctgagccggggaggcgcctccctctcccctccctcgcctcctactctcctgtctttctccaatggcggcgattaccgcgccgccggcccctcatccggcctccacctcatgccgccgccgcgcgccactcatccgcttcgccgcctcctcgtccccgtcctcccgcttccgcccatcctcctcctcctccttcccgggcgcagccggcagcagcagcggcggcgggggcgagatcctccacgtctcgccgcttcccccgcccgccgcgcccccgggggcccccgtctacgtcacgctcccagccgacgtcgtcggcccggggggccgcgtcgcgcgccgccgagccatgggggcctcgctcgccgcccttgccgccgccggcgtcgcgggcatcgccgtcgagctctggtggggcgtcatcgagcgccaccgccccggggagtacgactgggccggctacctcgagctcgccgccatggcccgacgccacggcctccgcgtgcgcgccatcctcgccttccaccagtgcggcgccggaccacatgacccgccctggattcctttgccacaatgggttcttgaggagatggataaggttccggacctgtcatataccaatagataccagaagagaaacagagaatacatatcactgggatgtgatattcttcctgttctgaaaggaagatcacctatgcaagcttactccgacttcatgagaagcttccgcaatactttcgaagattaccttggggccatagtaacagaagttcaagttggaatgggcccaggaggtgagcttaggtatccatcatgcccaactgagaagctaaatcagccaggcagttcgtctgaacttggagagtttcaatgttatgataagtttatgcaagcatcattaagtgctcgtgcacaaatttttgggttacaagaatggggtaatgatggttcaactggcacagatggttcgcagaagaaccttgaagaagcaagttttttttaggcttgatggaggatattgggatacaccttatggtcactttttccttgagtggtattcaggaatgcttcttctccatggagagaggctatgcatgatagctgatgcaatcttctctggtactggtgtgaccatctcagggaaggttgctggcatacattggcactactatacttgttcacatccatctgaactgacagctggctactacaatacactactaagagatggctatcttcctatagctcaaatgtttgccaaatacaaagctgcattgtgctgcagttgtttcgacctgagggacacagaaagaacagattctgagagcagcccagaaggtactctccggcagcttgcgggtgctgctaaaatgtgcggccttcctcttaatggtgagaattctatgacaaggctggatgatgcatcactgaatcaagtcataagaagctcaaggctatactcaggccgtacttcaggaacatccttttcctttaactatgttaggatgaacaaaagcttgtttgaatttcacaattggaatcgatttacaaagtttgttaggcagatgtcagatgctaggacctttctagcaagactgtatgtcaggagagggcagcaatgcttgtcttcaatgtcggttgtttgggtggttagtcgggcttgtgtatatacatgaaagttgtcgaaagctactggggaaatcatgtgcttgtaatctcagcaatcaatgattcgaccactgtggaagt

SEQ ID NO: 25149 - DNA, 1964 bp, Zea mays
  Clone ID: LIB3689-260-E10_FLI
agaggtctcgattccatagcggtggcgagggcgccgttgcacgtcgggtaacccgggaggccgagcccagaggggaggagcccggctgcacacgcgctggccgcgttggtagcagcgactgcactgggcgcgagagggctgagcgcagtggtggtgtggaccacagcggctgcactggccgcgttggtagcagcggctgcactgggcgcgagagggctgagcgcagtggtggtgtggaccacagcggctgcgctggccgcaaccgcgaagctgtacgcagcagggtcggggatgagggccggaccagtgctggtggtggcggcggcggcggcggcggctgcagccacggcggcctgcagggccgtgacggcgtcgacgggggagtccatcaggcgcaggcggcggcggcggcgaggtcgtaccccacatcggcgagcggcggcggcaccgccggaggcaaaggcaagatgttcgggcgcgcgccgaagaagagcgacaacaccaagtactacgagatcctcggggtgcccaagtcggcgtcccaggacgatctcaagaaggcctaccgcaaggctgctatcaagaaccaccccgacaagggcggtgaccccgagaagttcaaggagctcgcacaagcctatgaggttttgagtgatccagagaaacgtgagatttatgatcagtatggtgaagatgcccttaaggaaggaatgggcggtggaggatcccatgttgatccatttgacatcttctcatcattttttggaccctcttttggaggaggtggtggaagcagcaggggaagaaggcaaaggaggggagaagatgtagttcacccacttaaagtttctctggaagatctttacaatggcacctcaaagaagctctctctttcgcgcaatgtcatctgctccaagtgcaagggcaagggctcgaagtctggtgcctcaatgaggtgccctggttgccagggctcaggcatgaaagtcactattcgtcagctgggcccttccatgatacagcagatgcagcagccttgcaatgagtgcaaggggactggagagagcatcaatgagaaggaccgctgtccagggtgcaagggtgagaaggtcattcaagagaagaaggttcttgaggttcatgttgagaaggggatgcaacacaaccagaagatcaccttccctggtgaagctgatgaagcgcctgatactgtcactggagacattgtattcgtcctccagcagaaggatcactccaaattcaaaagaaagggtgaagatctcttctatgagcacaccttgtctctgaccgaagcactatgtgggttccaatttgttcttacacatctggacaacaggcagcttctcatcaaatcagaccctggtgaagttgttaaacctgaccaattcaaggcgattaatgatgaggggatgccaatttaccagaggcctttcatgaaggggaagctgtacatccatttcacggtggagttccctgactcgttggcaccagagcagtgcaaggctctcgagacagtacttccaccaaggccttcatccaagctgacagacatggagatagatgaatgcgaggagacgactatgcatgatgtgaacaacatcgaggaagagatgcgcaggaagcaagctcacgctgcccaggaggcgtacgaggaggacgacgagatgccgggcggagcccagagagtgcagtgcgcgcaacagtaagcagactatcatcaaggcaattgggaggggtggtgcccttaaagcatgggagtgatctctggttttgctgtcgccgagctgggaaataggaagctgaatcgacctcgcaagcggggaatgtatccttttttgctgcaacataaaaaatgctacccaggcatagctgggtaccttttaacttctgtttgtgggatttgctagagtgatggtttcgatatatagggggacttgaatgtc

SEQ ID NO: 25150 - DNA, 1832 bp, Zea mays
  Clone ID: LIB3689-260-G12_FLI
tatatctaaataaaatataaaataaaaggctcgacgtcgtcgtcacctctctcgccgtccacgagtcacggcgggcgggcggcggcggcggccgggggtcccggctgcacacggctcgccaccatgcctgaccccaccaccaaactcccctctccacgcccccgccggcgccgcaggctcttcagcctctgcctcggcacagcgctcctcgcgctcatcgtctccgcgctcgtccacgtcgtcgcccagccgccgggtcccgctcccgcctccgcgcgcttctccgtcatcatagacggaggcagcacgggcacccgggcccacgtcttcgcggcggggcccgacggccgcccggatctggcgcgctccaccgtgatgcgcgtctccccgggcctctcgtccttcgccgccgacccggcgcgggccggggagtccctgaagcctctgttagattttgcgagggataagattggcggcgccgttagggaggcggaggtgcggctcatggccaccgcagggctgcgcctgctcgaggagcgcgcccaggaggcgatcttagcgtcttgtagggacgttctacgagcctctgggttccggttcgaggacgcgtgggccaaggtgatcccaggctcggatgaaggtgtctatgcttgggttgcggcaaattatgctcttggaagacttggaggggatcctaacaaaaccgttggaataattgaacttgggggcgcttcagctcagcttacctttgtttctgatgaagtacttccacccaaactgtcatataattatacttttggtgaaacaacatacactctctataccaacagctttttaaactttggtcaaaatgcagctcaagactcattccatgaaatgctgaggtcaagaggctctttcaaaaatggtacacttgctgatccttgtgctcccagaggatattcacgcaatgaaggtgcttcaaggtcaacattagagaaccagtatgttaataatgggactggaaactttacagagtgcatatcttcttcacaacttttactgcaaaaaggaaaggaaaagtgccagtatcaacaatgtcacctgggatctacttttgtacctgagctgcgtggatacttcttgggaactgaaaatttctattttacttcaaagttctttggacttaagaagtcttcatcactatctgatttcatgtttgctggagaacaattttgcaatcagcatttgtcgagtcttagaaaaaaacatcccaataggtcagatgaggatttttcacggtattgcttctcgatggcatacattgtggctctactgcatgacagtcttggtgtaccactggatgacaagaggattgagtattcaaaccaggttggagacattcaggttgaatgggctctaggagctttcatcacactgatgcaaaatacgagtttaaagccattacacaccaccgcagaatcaacccatagcaatagaccattgtttgttgtgctgggaatgtttcttttatgtggagtactctttgtatcaagatggaggaagcccaagacgaaaatcatatacgacttagagaaaggccgatacatcataacacgcatcagttgacgctaaatcttgtgcagaagaacaaaattatacgacatgaatagatgctgtgttgtgcaacgatgtacgagttcaattctttgtgttctatctttaggtagcagagctgggtgggtggagcaggaagatagctcatttgtgcgtatagaagaatgatgtgtagaacaaattgtcatgtgttaattgaattatttgatgaataattatagttgctttgttcatct

SEQ ID NO: 25151 - DNA, 1363 bp, Zea mays
  Clone ID: LIB3689-260-G9_FLI
cccggcttgggttgcccaccgagatcacccccctcaaaccctagcccctcttctcctcctctgaccatctcctcctcctcgcgcttcgccttcccaatctcgctgccgtttcttgggcctgggactcgcgctctgctatctgtgtccgcgtatggcctgcgacggcgccgccagaggccgccctcccaagcgccccgcttcgggaggcctggcccagcccaacgtcgtcacctacaagagacgccgccgcggcaccggcgccaacgccggccacagcgccgtcacgtctggccccgaccccgctgaaatggtactgtcccagctgcgttgagccagacgtagctttgaagcataaaaaccatggcaggtcacatgaaggctgtgatgtatgcgagtggctcgtggtgaagccagaagagcctgctgaagatgttagcgagcctgaactggcggtcaaaacgcaggagagctcagtgtcaagcatgggcgaagacagcgaaccagacctctcaacgactgctctagcgaacttgtgcaagaactgtggcacatgcgaagacgaggacaggaagttcatggtatgcgggcatggtttatgttctttcaagttctaccatgtcctgtgcctgaaagagagacagattgcaagcgagaagcagaagaatctaaagtgctggtactgcccgtcttgcctgtgcagacggtgcttcaaggacaaggatgatgagaaaatagtactgtgcgatggctgcgacgaggcttatcacatctactgcatggacccgccgtgcgagtctgtcccgagaggtaaatggttctgcacgcggtgtagcgcgcggaggtcagtgcaagggatgcagaggtatgagaagtcgatcctggagaaagtcaagcgtgctcctggtgccaatgggccgaaggtgcaggcatctgctggtccagaaaaataggcagcagtgtggatgatgtttcacaggccatactagggtagaagaaagggaaggatacttttgttcctctgagggagggggtatacattgctctggtagctttgaagaatcgatggatgggttgtgtatacgtggggggaaggaagatgccccgttggctgctgatgttgattcactgtgctgccatttcgtttttggaattcttgagtgtcgctcggcttgttgttgtgctgttatgttgtgtctgatggtaagtggcatcgcttatcgatgatatgtacatgcctgtaactcgttttcttttatttgttggacattgtgtgtgtgtgtgtgtgtgtttgaattgtgatgacctagagaacgctggtgtcaatcaatgcagcgtaccttgtttgcgcctaaatttggtagac

SEQ ID NO: 25152 - DNA, 893 bp, Zea mays
  Clone ID: LIB3689-261-A11_FLI
ggagcattcgagaagccgaagaaaattcgaagacgaggagcagctacactgcggacggacttcgggcatggagggccagttccaggttggcaaggaggaggtcatccaagcatggtacatggacgacagtgaagaggaccagaggcttcctcatcatcgcgagcccaaagaattcatccctctcgacaaactttccgaactaggaatattaagctggcgcctaaatgctgatgattgggagaatgatgagaacctcaagaaaattcgtgaagccaggggttactcttacatggacatttgtgatgtgtgcccagagaagttgccaaattacgaggctaagataaagaatttctttgaagaacacttgcatactgatgaagagatacgatattgccttgagggtagcggctactttgatgtgagggaccaagatgatcagtggatccgtgtagcggtaaagaaagggggcatgatcgttttgcctgcaggaatgtatcaccgctttacgttggatagtgacaactacatcaaggcaatgcgtctatttgtgggcgagcctgtctggacaccatacaatcgtccgcatgaccatctcccggctaggaaggagtacgtcgagaaaatcatcaaccgaggtggaaaccaagccgtcgaagctcgttgagcgtgtccactctacatgtcctcctgccgtctcagcctcttgtgttttacactctacaactcctagtaccgccgaataagatttgctatctgcaatgtgctcatgccaccaccgtgtgtgccagttaacagttgcacgaaacccgcttaaaatcttccctagatattttgttgtacgaatgaatgacatgtggtgtttgataaatgatgaaacgatgatggttcaaatc

SEQ ID NO: 25153 - DNA, 1684 bp, Zea mays
  Clone ID: LIB3689-261-A4_FLI
ggtggccggacggtggtggcatcgccaattcaactccgcatctgaatcggcactcggcagcgcgccagctccatagtgtaggaggaggagatggcgctcacaagaatcggtcttgctggccttgcggtcatggggcagaaccttgccctcaacattgcagagaaagggttccccatctctgtgtacaacaggacaacctccaaggtggacgagaccgtgcagcgtgccaaggcagaaggaaaccttcccgtctacggcttccatgaccccgcgtcctttgtgaactccattcagaagccacgggtggtgatcatgctcgtcaaggccggcgcgccagttgaccagaccatcgcgacgctcgcagctcacttggagcagggcgactgcatcatcgatggggggaacgagtggtacgagaacacggagaggagggagaaggccatggaggagcgcggcctcttgtatcttggcatgggtgtctctggaggagaggagggtgcccgcaacggcccgtccttgatgcccggaggctcgttcgacgcttacaagtacgtcgaagacattgttctcaaggtggctgctcaggtccctgacagtggcccgtgtgtcacgtacattggcaaaggtggatcgggcaactttgtcaagatggttcacaacggaatcgagtatggcgatatgcagctgatttccgaggcttacgacgttctcaagtcggtcggtaagctcaccaacagtgagctgcaccaggtgttctccgagtggaacaagggcgagctcctgagcttcttgatcgagatcacggccgacatctttggcatcaaggacgagcatggcgatggctacctagtggacaaggtccttgacaagaccgggatgaaagggacagggaagtggacggtgcagcaggccgccgagctgtcggtggccgctcctacgatcgaggcgtccttggactcgaggttcctgagcgggctgaaggacgagcgggtggaggcctccaagatcttccagggtgactactactccaccggctcgccggtggacaaggcgcagctggtggaggacgtgaggcaggccctgtacgcgtccaagatctgcagctacgcgcagggcatgaacatcatcaaggccaagagcgcggagaaaggctgggggctcaacctcggcgagctggccaggatctggaagggcgggtgcatcatccgcgccatcttcctggaccgcatcaagaaggcctacgacaggaacccgggcctcgccagcctgctcgtagaccccgagttcgcgcaggagatcatggacaggcaggcggcgtggcgcagggtggtgtgcctcgccatcaacaacggcgtcagcaccccgggaatgtccgctagcctggcctacttcgactcctaccgcagggacaggctgcctgccaacctggtgcaggcccagagggactacttcggggctcacacctacgagagggtcgacatgcctggctctttccacaccgagtggttcaagattgcgcgcaacatctccaacaactgatgagctgctcaacggatggcatgcccggtgttgactactccagtcggtaatgagatttcctgcaggaacttgtctattgatctttgtaagttaattatttatatgaataaaataagagcaaacatgcttgtgtttgggcaccctc

SEQ ID NO: 25154 - DNA, 1612 bp, Zea mays
  Clone ID: LIB3689-261-C11_FLI
cgcagaggcgcagagacaggcgtcttcgtactcgcctatctccgcgactcaaagcttcttccatttcctaccgccgccgctgcagctccaccccattccgtcgacaccatgagggagtgcatctcgatccacatcggccaagccggtatccaggtcggaaacgcgtgctgggagctctactgcctcgagcatggcattcaggctgatggtcagatgcccggtgacaagaccattgggggtggtgatgatgctttcaacaccttcttcagtgagactggtgctgggaagcacgtccctcgtgctgtttttgttgaccttgaaccaactgtcatcgatgaggtgaggactggcacctaccgccagctcttccaccctgagcagcttatcagtggcaaggaggatgcagccaacaacttcgcccgtggtcactacaccattggcaaggagattgttgacctgtgccttgatcgcatcaggaagcttgccgacaactgcactggtctccagggcttcctcgtcttcaacgctgttggtggaggaacaggctctggccttggttccctcctcctggagcgtctgtctgttgactacggcaagaagtccaagcttggtttcactgtgtacccatccccccaagtttcgacctcagtggttgagccatacaacagcgtcctgtccacccactccctcctcgagcacactgatgtggctatcctgctggacaacgaggccatctatgacatctgccgccgttcccttgacattgagcgcccaacctacaccaacctcaacaggcttgtgtcccaggtcatatcatccctgactgcctccttgaggttcgatggtgctcttaacgtggatgtgaatgagttccagaccaacttggtgccctacccgaggatccacttcatgctttcctcctatgctccagtcatctctgctgagaaggcctaccacgagcagctgtctgtggccgagatcaccaacagcgccttcgagccatcctccatgatggccaagtgcgatccccgccatggtaagtacatggcctgctgcctcatgtaccgtggtgatgtggtccccaaggatgtgaatgctgctgtggccaccatcaagaccaagcgcaccatccagtttgtggactggtgcccaactggctttaagtgcggtattaactaccagcctccaagtgtggtgcctggtggtgacctggccaaggtgcagcgcgctgtgtgcatgatctccaactccaccagtgttgtggaggtgttctcccgcatcgaccacaagttcgacctcatgtacgccaagcgtgccttcgtgcactggtatgtcggtgagggtatggaggagggcgagttctctgaggcccgtgaggatcttgcagcgctcgagaaggactacgaggaggttggtgctgagtttgatgagggtgaggaaggtgatgatggtgatgagtactagaagtatcctgatgctgtcatcgtcaggcttgtgtgctgctcttgtccccgttgtggtttgcaacacctgatgttgtaagactttctggttatgtccgccccgctttgccactgggttattaagaacgtcgttatggatggttgtctac

SEQ ID NO: 25155 - DNA, 2042 bp, Zea mays
  Clone ID: LIB3689-261-D2_FLI
ttgaaacaaaaattcttgatgtagttcagatgaactcgatcatgtcggattcaaagcccaagtgtctggtaattgatgaaattgatggagcactcggtgatggaaaaggtgcagtggaggtcatcttgaagatgatcaatgctgaaaagagtaataattccgacaagagcactaatggtgaggaaactcaagcccgaaagacatctaggaaaagtcatagaacagcaaaactactgaggcctgtaatttgtatatgcaatgacatttatgctccagccctgagacaactgcgccaagtagccaaggttcatgtgtttgtgcagccgacaattagccgtgtggtgaacaggctcaagtatatatgcaaaaatgaaggtttcaaggctagttcaatcgcgctttctgcattagcggagtacactgaatgtgacatccgttcatgcctaaacacacttcagtttttgaacaagaaaagagtggccctaaacattacagcgattgattcacaagtaattggacagaaagataagtcaaaaagcatcctcgatgtttggaagcaggttttgcaaaagaaaagactcaagcgggctggaaaggctgaaagccttttcaatgaagacaaggacatagactttcttttcacgctcatatctaaccgtggcgattatgaagttactatggacgggatccatgaaaatttcttgagattatcgtatcatgacccgatgttgcaaaaaactgtaaaatgtctcgatatacttggagtttcagattccttgacccaatatgtttaccggactcagcagatgccacttcatgcatatcaacctccaattgctatcactataagccgcatggttgctcaagttgagaagcctaatattaattggccaaaagctttgcagaggtctcgagcattgcttttagaaaagaaagacatgttgaaaacctggcaaaaccaaatgtcaccatttgtttcaaggcacctctcagtagaatcattcgttgaagacactgcttctccccttttacatattctctctccactgagtttgagacctgtagcactgaatttgctgtcagagagagaaaaggatgaacttgtgcaattagttgatactatggtctcctattcagttacatacagaaacacaaagtttgtccctcaagaaaaggcaaacctatctgtagtgccgcatgaagtttcatcactctctctttatcctccaattaatgatgtcataaattttgagggctatcaatcagagcacattggactgtctttagccatgaaacaggttttggtgcatgaggtggagaagcaaaagatcattaaagatagcgctggcaaattgttgaaccaatctaatgatggaaatatgaagagcgaagctttatcaactataaggaagaaaacagtagctaattccatccgtccagctttacattcttccaaggatagttccaagtgcaattcatctacacttgaaatgcagtcaaactcagcctctattgtgaatgataacgattctatatctgccaaaaaacactccagccgtgcagcaaatttctttgacagatttaggaaggaaagaccagtagacgcaaaaactcatagtgatgtggggctgcaaagagcaacacttcagagggattcacgccctctgatcttcaaatataatgagggtttcacaaatgctgtgaaaagaccagtgagagttagggatcttctgctcagctaggcccgcttggtacctgcacttctgtaaagttatctttgtgtttatgaattttcatttactgtatattgattgtatcatgaatattgtatcatgtggttgtgattggttgcctggccggatccctggctaggtcgaactcagcaacccgccctgctgtttgattgtctgtatcttccgttgccgttgagctaggacgacctcatgcaaatagtggtctggagccaggctcaggagggaagactattttggccgtatgaactcagcctggctggacacagaaaccaagatatagttttaatt

SEQ ID NO: 25156 - DNA, 1425 bp, Zea mays
  Clone ID: LIB3689-261-E10_FLI
tctccctccctctgatctgctatcgtccccttccctgcttccctccccctcttcttgtagagaaagaggaggcgagggctgccggccggccgggacgtggtgacaagctaggctagctgggggccggggagagagagatcgagagagagggcgagatcgtcgattcgtaatacatcgcgtcgccggccatgacatggtgcaacagtttcaacgacgtgcgcgccgtggagaacaacctggccaccgccgccgccgtggctgccgccgccgccaagaaacagcagcagcagcaggcatcctcgcacgtcaacctcatcaggacctgcccctcctgcggccaccgcgcacagtatgaacaggtgcaggcggcggcgacgatccaggacctgccggggctgccggccggcgtgaagttcgatccgacggaccaggagctgctggagcacctggaggggaaggccaggccggacgcccgcaagctgcaccacccgctcatcgacgagttcatccccaccatcgagggcgagaacggcatctgctacacgcatccggagaggcttcctggtgtcggcaaggatggcctcattcgacacttcttccaccgtccgtctaaggcttacacgaccgggacgaggaaacgacgaaaggtccataccgacgaacagggtggcgagacacgatggcacaagacgggcaagacccgtccagtgttcaccggtggaaaactcaagggctacaagaagatcctggtactctacaccaactacgggaagcagcggaagccggagaagacaaactgggtgatgcatcagtaccacctagggtccgatgaggaggagaaggacggcgagctcgtcgtctccaaggtgttctaccagacgcagccgaggcagtgcggcagcggttcggcgacggctaaggacgccatcccgctcgctgccaacgcagcgactgaccaccaccaccaccaccaccatgacggtggcaatggcggcggcaacaacatgttgaaggaggcaggcattgtagatttctacagcccagcagcactaattagctacaaccaggcagcttctaacagcagggttgccgcttctgctcacctggtgcctaactttgaggtgcacactacatcgggggctgctggctttggtccctgaccaagacgcgcaagaggaactattcgactgatataggttagaggggagggaaatgcaggcagataatggcaacttcatgaatgcaataacttactacaaatggtcgacgagtttactgaaccgtaatggtggacaataagaggatgagtacgtgttgagtgagtggttggacatacaaatactgaagtgtaggaatccatacaactatacattgttcattaattgttacacatatatgtaacttgatgctatcaattttttgttt

SEQ ID NO: 25157 - DNA, 2037 bp, Zea mays
  Clone ID: LIB3689-261-E2_FLI
gagtaatcgtgtagtcttaggtccgactgttaagcttcaaattcaactgtcgcctcttgtcccttgatctgtttctgccgcctacactggacgacgcttgatgcatacgagatgatgagttggccgcaagttttcttggatcccagcatacgatacgatccaccagcttaaccgcatacaaaaattattgcctttttttaaaactcgttttgatttgattgcatctgttgttttagttgcgcaggggaggaaggaagagcctgaaagggcggtgcggagagaaagactataagagcgacctgggtcccttgaggatgccgtcaagaaaccgcgtggagaggagggcgatgagatgagggatgctggccgcggtgatggactatttcagctcctgctggggcccgcgatcgggtgacgggcacagggggaagggccccgacgccgccggccggcaggacggtctcctctggtacaaggacgccggtcagctcgtcactggggagttctccatggccgtggtgcaggccaaccagctgcttgaggaccagagccaagtggagtccggatcgctctccctggctgacccgggcccgcagggcaccttcgtcggcgtctatgatggccatggcggtcctgagacgtcccggttcatcaatgaccacctcttcaaccatctcagaaggtttgcaactgagcacaagtttatgtcagcggatgtgatccggaaagctttccaagcaactgaggagggctttctttctctagtcagcaaggaatggtctttgaagcctcagattgcttcagtgggctcctgctgccttgttggtgtaatctgtgctgggactctctatgttgcaaacctgggtgactcacgtgcagttcttggaaggcttgttaaggcaactggagaggtcgtggccatgcagttgtcatcggagcacaatgcgtgctatgaggaagttagacaagaactgcagtcatcacatcctgacgatccacatattgtggttctcaaacacaatgtttggcgagtgaagggtctcatccagatctcaagatctattggagatgtatatctaaagaaaccagagtacaacagagaaccacttcacagcaagtttcggcttcgagaaaccttccagaggccgatccttagttctgaacctcaaattactgaacatcgaatacagccaaatgatcaatttgttatatttgcttctgatggtctatgggagcacctcagcaataaggaagcagttgaccttgtccaaagtagtccacacaatggaattgctcggagactagtgaaagcggcgatgcaagaagctgccaagaagagggagatgagatactcagacctcaagaagatcgaccgtggtgtgagaaggcatttccacgacgatataacggtcgtcgtggtattccttgatttgaatgccatgagcaaagctagctggagcaaaagcccctcggtttctctccgagggggcggtgtcaccgtccctgcgaagtccctcgcacctttctcagctccggcacggctgaacagcacctactgaagttgctaccactcttgaaaggaagaacacggtgcagatctgcagtggtgagagaaaaaaaaacagcaatcaagtgtagcgttacagttacacctgctgtgttgttgctctttgcaaaactactgtctagactccgcctggtaattagtgtactgatagcgaggtaaaaaaaagttagattatttgttagcagcggcagtgatttgacatctaaggaacaacaacacggtgtccaccgattctgctatcctgatggctcgcggcagcctggctggtcggcacacgacacgaagtgaagctgttttactggcggcatctggctttgttatctcatgggacagtgatccacaagagtaagggatcagctcaatccaaagtcaatagatgttccttataaaacatagaggtacagatgttctcatcggctatgtgtatttggggaaaaatcaatataaggggtgtttggtttttagggact

SEQ ID NO: 25158 - DNA, 1037 bp, Zea mays
  Clone ID: LIB3689-261-G2_FLI
cgccatcgcgtcgcgaacggcggccagaaaaaagaaaaagaaaaaaaaaaacagctcgccgcaccaatctcccctaccatatcgatcgaccctgcgatcaccttcgtcatggccgctagtttgaggtcgtagcaaggggaggacgtttgtttgggattatatataatcttcctagattatatttataatccgacaaatctttaactaacacttggttggttgaaacagaatcgaacaggtaaatgtgaggaaccctaggatagcgggggcaaccgtcataaccctctacaaagggacgccattattgacagaaacagctcatgcagagggcaccacgcacacgctggaaggcacccacacgctcggaggatgggtcgcaggatgcctcatcatgttcgcgaactgcatttgcttgtctgcgtggatggttctgcaggtcccggttctgaagaaatacccagctaagctgtcgtctttcaccatcactctggcgttgggtttcgtccagctcgctgtcgtcgcgccgtttttcgagagcgacgttgagaggtggaagatcagctcaggaggcgagcttttcaccatcctggcgttgtggtgcttggaatcgcctggtatctcatgatctggtgcataaacaaaggagggcctcacttcgtttccgtcttccagccactgcaaaccgtcatggtcgccatcatggccgccatcttccttggcgacacactctacattggaggagtcataggtgcggtgatcatagtcgcgggtctgtactgtgtactgtgggcgaagagcaaggagaccaaaagcagcggcgatctcctagtccttcctgaaagaagccccgcgcagcagaatctcctccagcgtgaagattgaagcgagaccactcactgtactgtacggttctcggccggctgtagctgccccaacaagaaatatgggggtgtttggtttgagaaatcacttcatccaaaatgtggtggtgcatcatgagtccattactcaaatttggtgggatgaccttatgcctc

SEQ ID NO: 25159 - DNA, 2115 bp, Zea mays
  Clone ID: LIB3689-261-G4_FLI
ggaaaaggctctgctctgcggccacacgcgtttggattttgctccttgctcccttgatccatccacttctgaaagggtcaccatgtctgcctttgtggggaagtacacaggttcttgctcgcgctgaatatacttttgtatgtcttttcaaagtcacgctggctgaatatactcttgtatgtcttttcaaagtcacgctgaatatactcttgtatgccttttcaaagtcacacataggtgatgcttcagtcttagaacgattacttttgcatgtaagaatttgtttctgtagcagttttgtagtcgtgctggtacgcgctgagtttttaacaatttatgggatgtttctaagaatttcttgtgtttgaaacaagtcagcgcagtttcgtctgttgatacagctgtttgtagacatattttataggagtagttgattaattatactagtctgctttgctggccggcatatagacagtggtaaacagtatttaccaacaggaagaaacagcaggaacagcgttatatacagtactgaacagtagcgcgtacagctagagctaggaaacattcgtgaacattatatgaacagcgtcagatgccctggccctggtggcctcggatttatttcgggttgaagaagtaataaaaaacttacctttgtttttaaatatttgccgctagtttatttttaaacttaaccgataaaaaccgagagattaaataatatggcgagatataaatagctgcagcatatagatgcacatatagtacagtacataatacgcgcgcgcgcgcagatgagctgatcaagaccgccaagtgcctcgcaacgccgggcaagggcatcctggcctccgacgagtcgacgggcaccatcggcaagcgcctatccagcatcaacctcgagaacgtggagtcgaaccggcaggcgctccgcgagttgctcttcacggcgcccggcgtgttcgactacctctccggggtcatcctcttcgaggagacgctgtaccagaagacctccgacgggaagccgttcgtggacgtgctcatcgcgggcggagtggtccctgggatcaaggtcgacaagggcaccgtggagatcgcgggcaccgacggcgagaccaccacgcagggcctcgactccctgggcgcgcgctgcgccaagtactacgaggccggcgcgcgcttcgccaagtggcgcgccgtgctcaaggtcggccccgcggggcaggggcagccctccgagctcgccgtcaggcagaacgccgagggcctcgcgcggtacgcgctcatctgccaggagaacgggctggtgcccatcgtggagcccgagatactcaccgacggcggccacgacatcgggacctgcgccgccgccacggagcgcgtcctcgccgccctctacaagtcgctcagcgaccacaaagtcctgctcgaggccacgctcctcaagaccaacatggtcacccccggttccgatagccccaaggtctccgcggaggtgatagcggagtacacggtggcggcgctgcggcgcaccgtgccgccggcggtgcccggggtggtgttcctgtcgggcgggcagagcgaggaggaggcgacgcagaacctggacgctatgaacaagctggaggtgctcaagccctggacgctgtccttctccttcggccgcgcgctgcagcagagcaccctcaagaagtgggtcggcaagaaggagaacgtcgccgccgcgcaggccaccttcgtcgtccgctgcaaggccaactccgaggccgcgctgggcaagtacgccggctccggcgccggggacgccgccgcctccgagagcctgtacgtcaaggggtacaagtactaaagccgccacagctgcctcgccggccagtggaatccaatccaatccaatccaatccttgtgtcccacgtcgcagcgctcggactgtgccgagatatatgtgctacactagtgtttgtgtactaaattctcttctcttcgtccggctcctatttgagcaaaacatacacacacacaacacgttgatctatttgcagctcgcaatgtacagtattactggaacataagtgcaatatatatagatgtgaccatcttacttactg

SEQ ID NO: 25160 - DNA, 1298 bp, Zea mays
  Clone ID: LIB3689-261-H2_FLI
gcgtcatcatccagaccaccattaccagagtgctctgctctcgctggaggccgtggttcattcacgttcatggaggccgccgccattcccaccagtgccccggaaaccaggtccgtacgtgccataccctcatgctttgcttcgttcttgcagtcgtccgtgcagtctttacgagaacacaagtgtgcgtgcagtccttcaactgacctggctggaactggaacctaccaggttttccttacaggaagtcgtagtttctacctactgcttgacaggattgccgttgtcaccggcggcaacaaagggatcgggctagaggtgtgccggcagctggccggcgccggcgccaccgtcgtcgtcttaacagccagggacgagacgaggggtgcagccgctgcacaagagctcagagaatctgggctctccgatgtcatcttccatcagctggacatcaccgacgctgcgagcgtcagtcggctggctgagttcctcaaggctcgttttggaaagctagatatcctggtaaataatgccgcagttggtgctgttgagtacgtccaagatcctgctgacagttcaacgagcgaggaagagctgagtggcatggatatggtccaaaggcttcagtgcatgcttaagagagtccgggagacctacgacgctgcgacagaaggcatcaagacaaactactatggcataaagcatgtgatcgaagccttgctgcctctgcttcaagcttcctccgatgggaggatcgttaacgtctcctctgacttcggactgctaaggctgatcaacaacgaggaagctaaggcaggagctaaacgacgtggagaagctcaccgaggagaggctggacgaggtgctggccgcgtacctgagagacttcgacgccggcgaggtgggggcgcgcgggtggccggtggacttctcggcctacaaggtggccaaggtggccatgaacgcgtacacgaggatcctagcgaggagccacccggggctgcgcgtcaactgcgcgcaccccggctacgtgagcaccgacatgaccgtccacaccgggcctctcacgcccgagcaaggcgcggccaacgtcgtgaaggtggcgctgctgccggagggcggcccgaccggcgcgtacttcgcgttgggagaggaggcgtcctttatgtgacgaaagcaccgtcgtcgttaagttcgtcgttgttcgccaactccctgttagtcgatttctaaatcgacgtacaatgaaatacatcatcgctgcaaactcacaaatgaaaacaagggaaccttgtagc

SEQ ID NO: 25161 - DNA, 2379 bp, Zea mays
  Clone ID: LIB3689-262-A7_FLI
ttggctgaaaggtgattcggcccattgtagccccgagacagcgtccgcctacggcctatccgcgtcagcccgccggcgagtcgcgcacgagacctgcgaggcgcgatggcaggccgcggcggcgccggccggcggcctcgcgccgtcttcatggccttcggcactcagggcgacgtcttccccatagcacttttgcgtgtgaccaacaggagtatgctgtggtgttcatcactcattcagcgcaccggagtttgtcagcacatctagcagccagcagtgttagatacatgcctgtgtcaagcccgcctgtcctcgctgccgaacagttagagaatatctcaagtgattctattcaatcaaaccatgagcgtgagtccttttcaatgcggaaaaaagccattcaagcggagcacaggaaagaatgcttgtcttttgtggaagaagtttttggaaacgacccaagcatcagtggggattttattgtgatcaatttcttcgctttggaaggttggcaccttgcagaactattccaagtaaagtgcgtcattgctgctccctattttgttccatatagtgctcctacatcattcaaacgccaatttaaacaaacttttcctctactttacaagtactttcaagaagctcctgcaaatacggtctgctggactgacattatccattggatgtgggcactcttcatggaaagttggggatcatggagaaatgattgtctgaatcttagccccattcctttcacagatccagtaaccaatcttcctttgtggcatgtgcgagaggagtcacctttattactgtatggtttcagcaaagaaattgtggagtgcccaggtgagctctggtgccctccacatctttctaaaatcattttagacatctatatatatcttcaaatttgatgtacctcatttcagtatactttacataacatcattgtaggatattggccgttcaatgctcatgcttgtggcttttggtttctacctatggattggcaattttcttgtgacaaatgcatggagttgtctggaaatatcaattcttcatttggtggtatgttgtgtgcaaaccattcttccctggaacacttcctcacaaggaatgcttattcatcaagacctatatttgtaggattaagttccattgaatgggctttcttagaaatcctaaagcatttttaatggtgcttaaggctgccatagagtcaacggattatatgttcatccttttctcatctggatacaagccattggattctgcaattcaatctattgcttcatcagtaaatgaatcaagaggggtggattcaccttctcttggtggtgacagcgctctcctttttaatggccgccttttctgctttttagggtgagtactagattgatgttatatgtttgcgttgtcctgtcatgtggaattggtggtgagaatgttaaaattttcagatcaataccgtacagttggctttttcctaggtgtgcagccgctattcaccatgctggcaggtaatggagcgctcaaatttctctcgttggcaagtgcctgatttataatcttgcatggtactggcacttccgcagaagattttatatttttactgctttgataacagtggatcaacagctgcagcactacttgctggtatccctcaggtgacaacaacactttctacagcttcaccccatgttttgaggctgtctttctgctgctcttttcttgtccttttatttattcgcaacctgtgatacctggatgtgtaggaagcatcaagcctggtaattctataacccaaaaaatgttctgatgccgactcaaacaaatacgttatctcccaacttctgcattttcttgatgatgctttgagatggatccattgtactaaattttttcgtgcaggtaacatgccctttcatgatggaccaattttactggtcagagaggctacagtggttgggagtggcgcctgaacccctacaaagacaaaatctagtcccagataatgatgacgccttgagcatccacaatgctgcagatgtgctagttggagctatcaggtcagctttatcgccggaaaccaaagctcaggcggccagaattgctgataggctttcttctgaggatggaattggagaagccctcaggatattgaaggcgagagtgttgactcagaacaaaatcatcagctcattcatcgcaagtaaataattagtactgatatgatatgaggcattgatttaaaccactaaatttaagaaatggacttctaatgcaccgccccatgtaagatagagtaatttctcaaaccaatcaactttacggggcgtttggatccctttattttagaggaattagaattcactc

SEQ ID NO: 25162 - DNA, 1926 bp, Zea mays
  Clone ID: LIB3689-262-B11_FLI
gtatgccaccaacttcaactggaaactcgtaagaggaaaaaaaaaacacacccgccccgccgtccacctctccgcctcctccggtgccggcgctggagcggccgacccacgcaatctatgggcaacatgacccgctcaaactcgcccgtctcccgccgcatcgtcctctccttcctcgacttccttaactccgtcgaattagctcctggtgttgatcctgaagctctggaagttgctaaggattgtctggagtccatttttagtgttaactcaacagccactggtgacgcaatacaaccaggactgttgtttgagctatttgcttctctcgaagcaaatgaaagagaccaggcaagagctgctttgctgtcacaatctgtttcaaacaagccatctcaaactgcgggtacatcaaatgtcgaagaagactcaaacaaatgcacaacatcaaatagcgacagccaggtggaggatacatttgaactagatcattcaggagatgaactatttgcaaaattttatgctgcacttgatgaaatcaatttctttaagacatcacctgctggagctgaagatcctggtctactttcaaaagcaacacaatactttgatgatgcattactggcgatgcagaagttgggaaagaaaagggcaagcttagtagacattgcagagtcctttaaatcaagagggaatgaattcatgagatcaaaccaacaccttaaagcggtagagctgtacacctgtgccattgcattgaaccaacaaaatgccatttactattgcaacagggctgctgcatatacccttcttaatatgaacaacaaagctattgaggactgcctgaagtcaattgaaattgaccctcactacagcaaagcatatagccgactcggatctgcttattttgctatggggaattatcacgatgctctgtacaagggatacttgaaagccgccgagcttgatcccagtaatgaaaatgtcaggcagaatattgaggtcacaaaaaagaaactggctgaacaacgagtcccaccagaagagcagaacacacatgcaggccaagctcaaggaccacatccaatatttacaagtggtggtgttcctttcaatctgtttccaccaggtagttctccagttcaagaattcttcgctggctggtcgtccgatgttggtgcaccaccaccaggacattcgataagtataaatttgaatgatatttttggccaagcaaatgtcaatgctagcggtcaaggatcaagtcaaacagggaattcaaataaccatactccatctgcttctttctcaactggtgctgctgttcctcctccctttgccttctcgggctcaggaaatgaaggaacgcaggcacgccaagcttctaatggacttgaaggggaacatggtgaaccaggcatacacagggatgatgacgtccatataaatttggctggacccgagcaggctgcggaggctttgagagctgtgatgcagatgcttgggccacagatgggtcaacatgagggtgcacctagaggaccaggttaagcgtgggaggtaggaaaatgtgttacgtggcgtattgtggtctgcaggagtcttatacgggacattattttgtcttctccatcctgacgaagaatggagattctcgtgcgccttattattatagcagcttatctgtgtgctacaacaattccaccgtaatggttaccggcgttcaacttatctgccctgttcatattggcgtaggtgtgtcattagctgtgctggggcctgggtcttgttttgttgagacttgtctcgtaatggctgtcggtccatcatgtgatcttaaattaaagcctttttgcccccctcccctgcttttccgctgcttgtcggttcccagttgatacttggaaaatatttgcaaggttggtg

SEQ ID NO: 25163 - DNA, 2342 bp, Zea mays
  Clone ID: LIB3689-262-B3_FLI
gcactgggcaggcactccggcactggctccttccttccctttcccctgatccctcgtccagtcgtcctcctctgcccggtacagctgcgaagccggcactggctctgctctgctcgccagcagcaccgacctccactctacgtctccaccagcaaggcgagctcgcttttcactcccccaaatctctgaataaaaaatcgcgcaagcaacctcgctccaccggcctcccgcaagttcgttcgttcagtcaggtcaggtcccagcctacgcagcatttgacagcgcgaggcggttgcccagtcagtctggggtggacggctttgatttgcttcgaagggagtgagattggttgaagccttcgaccaaggttgtcaatggattctgggatttgggcatctgtttggagcttcatcaagttcctgcctttcttctttgcgcttctcctcctgggcatcatcaaaggtgctttgtttggcccatgggcatggcttgtcatgacaattggaatttccgcacttattctaggcttatggcctatgcatgtgatttggacatattactgcatcatcagaaccaagatggtaggaccggtcgtaaagttgctgcttcttattgttgcaactgcggttttggttatatggctaataattggcgtcgtgggaagcatccttgctggtttggcctatggctttctcgcaccagtaatggctacatttgatgcgattggggaaggaaaagaaaatccacttgttcactgttttttggatggaacatggagcactatcacaggaagctgtacagttgtcagggacatgaaagacatgttggtacactcatatttttcaatcatggatgaagttcgtcttcatgcacctcccgacggcaagccatatgagataagattgctacaaattcctggtgcaatatttgctgctgcttgtgggcttgtagtggatgcaataatgttcacactaattgccttgtacaaattccccgttatgctattcaaaggatggaagcggttgattgaagatcttattggcagagaaggaccttttcttgagacagcttgcatgccatttgctggtcttgcaattcttctctggccatttgcagttataggagcttttatagcctctgttatctgcagtgttccttttggtgtatatgctgctgtggtggtttatcaggaatcctcacttttcttgggactgtcttatgcaatatcatcagtatccatctttgatgaatatacaaatgacgtacttgacatggcaccaggatcttgctttcctaggtttaaatataggacaaatgaagcttcctcacatggtggctctctctcgagacccgcttcattcaaggacaagcatgatggaaagaaagcccctcagcgtgtaacatcatttaaaagtagctttgatgagttcaatccattcaagttgctagatcaccttttcatagagtgtaagcaccatggcaaggatctggtcgctgaaggagtgataacctcaaaagatatagaaggaacaaaggcaggcaaagccagcactggggtacttaatgttgggttaccagcatatgttatccttaaggctctcctccgatctgctaaagccaattctgatggtctcgttctaagtaatggatctgagataacatccgacaataggcctacgagtaaaatctttgagtgtttttttgaccctctgatggtcatcaaagatcaaatcaaagctgaaaacttcacagaagaagaggaagcataccttgagaagcaagtgctcttgattagtgatccaaagcgcatcaaggagaatctcattcggcttccaccattgagtgagcgaaaacaagcagaaatagaagcatttgctcgaaggttgcaagggatcacaaagtcgatatcaaggtaccccacatccaagcgccgcttcgacgcccttgtgaaggctctttcagaagagcttgcgaggacaatgggtggtaatcaatctgctaatgggtctcaggtccggaagatgagaagtggtatcgtccgaatgcttagtcagagatcacttgggaaagcaacaggcatcccgggcgatgatcatgaggctcagctaacaagcgatggtttcacttcatgatgttctggaggtgttcaactgtaacctcagtttgaaaaggagatgctactttactgtgttattttgctaactggatacaaagaactgacacttctgtatgaagagtttagcctcaaccatctcgaggatgggttgtttgttttgaggactgtatctggacaacactgtagtaatactttgtaacagaaagcaaaagatatgtccttgttc

SEQ ID NO: 25164 - DNA, 2048 bp, Zea mays
  Clone ID: LIB3689-262-B5_FLI
cggaaaactttcgagctcgcgcgatctgtaaaaccccgtctttctctcggctgggaactcccgcgcccagaaattttcttctcccctagcttagctcatccgtctcgccgcccgccgtccatggagatcgccaagaacagcattgcgatcagccgcgtccgcgaccttccgccatcgaagcggttcaggcacatcggctcccacctcggatcgactcccagcgtgccgctgccggccaagaagcgcatgctgccgtcgcacacgccggaggaagcagccgtcgctctctgcctcccggtgaagaagagggtcatcgcggcgccgcgggtggaggtggccggcgccacattctgcctcccggcgaagaaacgagccatcgtgccgtcgccgccggaggacgcggcgcccgcgtgcctccccgctaagaagcgcgcctgcgcagcaccggcggatgcggccgtgccggcgtgcgttccggcccaggagcgcccgtgcgctccgctgccgccgccgccggttgtggtctcttgggcccgcgtgtcgactaagaagcgcgtccacgcgccagcgcctcggggccacgccgccggttccgttccggcgcgccgaccagccaacgggctctcttgcgccgagcccctggtggatacggttgcttcggcctccgtctgggctaagaagcgcgcccactcgccaactcgtcgggaggacgccgcccgttctaccccggtttgcctgccggtcaacaagcgcgtgatgccgccgtttgtgccgcctccatctgtgcagtcagacggtgcttggctaggcgccgccaaagaagccaggcctcaaggatccagtaagcacggcgacggcggcggcggcgccgtcagttctagagtggcaagttgcgccgaagaacgcgctagaggcaaggagttcaagagacctgagaagcccgtcaaccacaagggaaccaaggagcaggtgcccatggaaccaaggtgtccaccacgtgaagggaaacgtctggagaagtcctgcgagatcgtcgatggcgagcagtctgaagctgtggttgaagcgctcaggaaatccgacggagcgtctgacgccaagggagcaccgctcaaagaagagccgaggaatggtgctgatgaagtggcggcgcaagagcccgtggacgtggaggacgacgacgacgacgacggcgtgcgctgcgccgtgtgtgcgagcaccgacggcgacccgtcggaccccatcgtgttctgcgacgggtgcgacctcatggtgcacgcgtcttgctacggcaacccgctggcgcgggccatcccagacggcgactggttctgctcgccgtgcgtcgccgggaggggcaagccggcggcggcacggcgccggagctgctgcctctgcccggccgggggcggcgccatgaagcgcacgacggaggggaagtgggcgcacatctcgtgcgcgctgctcgtgccggaggtgttcttccgggaccccgacgggcgcgacggcatcgactgctcccgcgtccccgcgcaccggttcgccaggggctgctacgtctgcgggggcaacaacaacgggtgcgccctcgagtgctcccagcccaagtgcggcctgggcttccacgtctcctgcggcctcggcgccggcctctgcatcgagtaccaggaggggaagggcggcggcggcgccatcgtcgccggcttctgcagagagcacaccgagctatgggagaagcaacaattgacaggcaagtacaagattgtggcgagaggacaagaatgatgatatgggagatggataaaattgggtgcctgaagatgcgcttgttgttattaggatttgttgtacgtaggagagtctcgtgtactatgttaagaatagtcgaataagttgcttttcatttaattattttgcacattgtcctcaagatcacgatcagaaagtgtgctgttgtcggtaggttcatgcagaactaataagcttaagatctccattggtattgtacttccatccatttgttgagcaagtttccagtttcagcattc

SEQ ID NO: 25165 - DNA, 1664 bp, Zea mays
  Clone ID: LIB3689-262-D12_FLI
gcgaggaacaccagcagcacagcagccactacggccaccatttcctggtggtggcctacggcatgcagggccacgtcaacccagcgcgcgccctggctcaccgcctcgccaagctcagcgacgtcgtaggcggctgccccatcctcgccacgctttccgtgcacgtcgccgcccaccgccgcatgttcccggcaccgctggacccggacgccgccggcgaggagcatgaggaggaggccagcgacggcgtcatctcctacgtcccccactcggacggcttcgacgacggctccttgcccagaacccccgaggactgggcccgcagacgccgcgcgagccgcgagagcctctccgccatgctcgcccgcttcgccggcggcgggcggcccgtcacctgcgtggtgtgcacgctgctggtgcccgcggcggtggacgccgcgacgcgccacggcgtccccttcgccgtgtactggattcagccggccaccgtcctcgccgccgcgtaccactacttccacggctacggcgagaccgtcgccgccgccgacccggcgcacgaggtgagcctgcctgggctacgccgccctctccgggtccgggacttcccgtcctacctggtggacacgacgggcagcccgctggccaggtccgtcgtcgggatgttccgggagctgttcgagagcgtggaccggtggcggcctaaagtcctcgtgaacacgttcgacgagctggaggcgggcgtgctctcggagacgaagcgacacctcgacgtgttcgccgtcggtcccatggtcgccggcgccggtggtggctcgggctcctctgttgcgtcaaacgacgaaggacggatccatctgtacaggcacgacgacgccgacaggaagaggtacatggagtggctcggagcgcagccggagagctcggtggtgtacgtgtcgttcgggagcatagcgacgcacaccgagcagcagatggaggaggttgtccaagggctgctgcaggctggacggccgtacttgctggccgcgcgcagctggcacgggctcgaggacgacggtgcgcgccacgtcctggacaaggccgcccagagcagcggcggccgtgggacggtcgtggactggtgcgaccagccggaggtcctggcgcacccggccgtcgggtgcttcgtctcgcactgcggctggaactcgacgttggaggccgtggcggccggcgtgccgctcgtcggcgtgcccagcctgtttgaccagccaacgaacacgtacttggtggtggaggagtggggggtcggcgtcagaggggagcgtgacggtgagggcgtgttagctgcgacggagctggcgagatgcgttgagctggtcatgggtcaaggtgcaaaagcaacggcgattagggagagagtaaaggctttgagagagatggcgcaacaggcggcacgagcaggtgggccggcggagagaaaccttgaggactttgttaactctgtcggtgatagcttccgtcctgtcggaatttcagttgcggaaaaaactgatgaatctcgtacatgttcatcagaatgacttccgtacagatattatttttatctacattctacaaggagtacctgatataccatgtacgtatattttttttaagataatggatggaataaggttccagct

SEQ ID NO: 25166 - DNA, 864 bp, Zea mays
  Clone ID: LIB3689-262-D4_FLI
cgcggagagaggagaggcgcagagcatcgacgatggcgagcggcagcatgaagagggagatcagcgagacccacgacaccctccgcttcggcctcaatgccggcgtcaaggccgacctcgcgccgccgcacccgctccagtccagcatccaatcggaggccaagttctgggcggacaagaagaagtttgggacagaggccatctacggatccgccttgaacatccgcaaggatctcgatgcccaaatcctctcaaggttccaaaggccccctggtgctttgccatcatctctgcttggatatgaggcactgacaggttccctagatgattttggttttgaagattatcttaacatgcctcaagattctgaaggtttccgtcaacctgacatgcaccacggaatggaggttcgccttggtttgtccaagggacctatctgccctagcttaagttgaggcagtgaatgtagttctgcggttctgccgcacgttgatgcaccttagtcaataaaagaccacattaggatggtgaaacggtgaaaactgatggcttgcatatgttcagagtgttatgttgtaatgaacgcatatatcgcatgattggtagcctggctagctgtgcgcaggcttagtggaagcatagaccggggtgcaggtcggcgcgagctcggctcttatgggtgcatgaaccaatcacgccgattgcgaagcatcgcagttgagcttcaggatctctgcagctgcaggtggcttcttccgtactcgaattagagttggctgtgaattgcaatccttttgttatttttctctaacttgtacggaggaaagcaacccataggaaattttaaagaaaattgatgagatt

SEQ ID NO: 25167 - DNA, 1822 bp, Zea mays
  Clone ID: LIB3689-262-E12_FLI
cggcccgaagcccaaaccgcatgggctcgcggccgagctgaccgagccggacccagacccactcgctcctccgcccccgccgcaatggaggagccggcggcggcctctgccctggaggcgcgcggcgacctgcgctcggcgcttcccttcctccccgtcgtcctccgcggcggcgcactcttctggccgccggccgcgcaggagtcgctccgggcgctcgcgctcggccccgacgtcagccgcgtcgcctcgggggacgttctcgccgacgcgctcactgacctccgcctcgcgctcgccctgcccgcgctgcccccgcgcgctgccgacggcctggcgctcttcttcgacgacctcctttcacgcgcccaggcgcggggctggttctccgaggtcgtccccaacctcgcacgcctcctcctccgcctccccaccctgctcgaggaccactacgccaaggctggccacggcgcctccgggctccgcgtcatggcgtcgcaggacgcgggcgtcgtgctcctcagccaggagctcgtcgccgcgctgctcacctgcgcgctcttctgcctcttccccacggccggtagggcccaggcgtgccttcccaccataaatttcgatggcctgttcgcgccgctgattcacaatgcgaggcaaagccaggagcagaaagtgaggtgccttgttcactatttcgagagggtgactgattctatgcctactggtttagtttcgtttgaacgcaaagttcttccccgccgagcgctctctgatggcgttccctatcctgacatccatgcgtgggtggcatctagtgcaccactctgccaattcacggtattttcatcaggtttcatagaagatgaagaacaagaagcccttcaagttgactttgcaaataaatatttggggggaggtgccctttcctggggttgtgtgcaggaagagatccgcttcatgataaaccccgaattgattgtgggtatgctattcttgtcttgtatggaagataacgaggctatagaaatctttggtgcagaacggttctcacagtatatgggttatggttcctcctttcgctttgtcggtgactatttagataccaaaccctttgattcgatgggcagacggagaactaggattgtggctatcgatgctttggactgtccagctaggttacactatgaatctggctgtctcctaagggaagtgaacaaggcattttgtggatttttcgatcaatcgaaacaccatctctatgcgaagcttttccaggatttgcacaacaaggatgacttttcaagcatcaattccagtgagtacgtaggagtttcaacaggaaactggggttgtggtgcttttggtggaaaccctgaaatcaagagcatgattcagtggattgctgcatcacaggctcttcgcccttttgttaattactacacttttgaggacgtgtctctgcaaagattagaggaggtgatccagtggatacgacttcatggctggacggtcggcgagttgtggcatatgctcatggagtactcatctcagaggctgggaggagaaacgcacaagggctttttggtttggttgcttcccagcgacaggcccaagaatcaagtgcattacatgtccgaatagcaatagacccggtttttgtgagacgcgcagctctcctagggctgatttgatgattagggatccacaggggaggaattcccttgcaattcaatttttaatagcaagaggatttcttcccctcgggatcccggtcaccaaatcagctcttaggagtgtgtgcatgaacgaagttattgctgac

SEQ ID NO: 25168 - DNA, 1654 bp, Zea mays
  Clone ID: LIB3689-262-E3_FLI
ctgcggttcaatcaccgcccacgcagaacccctccgccctccgctccttccagctcgctctctacctgcaccagcctcgctcgccctttgctcgccgccgccatggggaggggaaagttcaagggaaagcccaccggccgccgcaacttctccacactagaggagatcggtaacgacgcgcccgcccaccccatggcgttccccctggatgttggtgatctgttccccacggtgcaggcaaatgttctttccctccctgcagcagcaccttggtggttgtcgagcagcacgtcgcgcttgcgcagcctcggtcacgacgttgttcaccccgctaaccattggtgtcatacctcacgtgtcatgtgttcgccgaaatgcctaaacatgtagtctgtcgtcgtcgtatccacagtcaattttagtcatggggaacttggtacagccatccatggtatcagaatatgacctgggaggagaaggggacctgttcaaagctccagaagccatcatcgaggaaccgctgctcctgaactgtctgtctgattctgttcatttgttgttgtgtaggctgggcttgtgccaagcttgaatcctcttgtgaaggagtttctcaatgctgctgatgacaagcggaaggaagtcctctctaaaatagaagaggatgttgctaagctcagcggttctgcagccaactaagaagctacaagtgaatgccgaggagagcagcgatgacttggctaacccaccgaaggtagaggagaagcttggtgctgtccctcatggcctgtccaccgactctgaggttgcccagagggaagccgagtctatctctaggaagactctcaggagctcagccgagaagtttgagttccaagctgaggtttccagactcatggacatcatcatcaactcactctacagcaacaaggatatcttcctgagggagctcatatctaatgcctctgatgctggataagattaggttcctttcccttactgataaggaagttctgggtgaaggggacactgcaaagcttgagattcagattaagttggacaaagagaagaaaatcctctccattcgggataggggtattggtatgaccaaggaagatcttattaagaaccttggaacgattgctaaatctggcacttcaggaacaggagctgctcgagtctcttgtcgaagctgatacgagaaggcaggaaagagctaaaaagatggaagaaaagaaagtgtatctgcaactatacgaagcaatggaggcgttggtcaagatcaatctggagacgaacaagatcatggacttcatcaagtttgacgtcggcaacgtggtcatggtgactggcgggaggaacaccgggcgtgtaggagtcatcaagaacagggagaagcacaagggcagctttgagaccatccacgtgctgcttggagctttttgctatgtctagttttctcctatttgttgtacaggaaaacatagaatagaattcaaatttggtggtcgcaaaagtgtggagactttaattcatataaagttaggcttaacattagtgcaaacagttgtattttagtttagatttagagtacacttatgtatgcattgtttgacaatgtttatttatgatatattaaatggtacttatttatatt

SEQ ID NO: 25169 - DNA, 1802 bp, Zea mays
  Clone ID: LIB3689-262-F9_FLI
cttcgatgcaactggtgtggcggcggcggctgcgggcggcgtgatacggcaccccctcctcccgcccccttatgcaagcgggcaatcagaactccgatcacccgcacgccggcacgccagtgtcgtcttcgcaaccatgaactccatcgagcctttcaaccggctggtgaggctggcggcccgcgccttctacgacgacgtctccatgaagggcgacaaccagcccaagacttcccgcggggacaaccgcggcatggccgtcgtcgtcctggacgcgctcaccagacgaccgtgggttcgggaggaagatttggctaaagcattgaagctccactcgaaacagctgcgtcgcattctccgtttctttgaagaggagaaactagtcacgagggatcatcgaaaggagtcagcaaaaaacgcaaaagcacataatgctgcagctgctaatgatggtcaaccaattgctaaggagggagaagagaaagtaaagctgcacacacattcatactgttgcttggattatgctcagatctgtgatgttgtaaggtaccggattcaccgcatgaagaaaaaattgaaggatgaattggacagcagaaatacaattcaacactatatatgtcctagctgcaataaaagatactcagccttcgatgcactacaactggtaagctacacggatgagtacttccattgtgaaacttgcaatggtgaactggttgcagagagtgacaagcttgcttctgaggaaatgggagatggcgatgacaatgttagaaagcgcaggcgtgagaaattaaaggacatgcagcaaagaatagaagagcaattgaagccattggttgcacaacttgatagagtgaagaatattcctgcaccagagtttgggagtctacaaacatgggaaagagcaaatattggtgcttttgcaattggtgaccctgctgcagctgattcttctaggaattcacaagggcagtatggtacaccaatgccatacattggagagacaaaggttgaagttgatctgttgagtgatggtgtgaaagaaggtgctgaatcaggtaaaactgattctgaactgaaagttttacctccatggatgatcaaggatggcatgaatcttactaaggaacaaagaggagagataattgcgccacaaaaacttgagaaatctgatgccaaagatgacaagaagcatgacttgaaagatgatcatagtgttcaggaagaatacataaaggcttattatgaggccttgaggaaaaagcaggaagaggaagaagcaaaaaggagaatgcagcaggaaggcaaggtctttctcccagattttcaaactgaacgccaagtgggcaagaaatacaagcgggacggtgatgatgaaggtattgaatgggaagaacatcaacctacaggttatgcaaccgaaacatacaaattggcagatttgaacgcggaggctcaagaatctggagatgatgaagatgataatgtgtgggaagagggttaatgctgaaaagataactggcgacccctgctccctctcgaattttgaactggtatcccgtcacacgggtcaaaattatttcactgatgagcctgattatgttgaacgcatgatcacaagaaatttttagttgaagatgtacaaaatatacttatatttgagtagcgggttaacatttttctctgttacttaaatatttgagtagcgggttaatatttgatgtgtgggggcaacttacacgcctctgtttatctgaaaggaatcagagtgaaaaatgacagatccaaacttctat

SEQ ID NO: 25170 - DNA, 2730 bp, Zea mays
  Clone ID: LIB3689-262-H2_FLI
gcaccaccgcgccgcgccgccccgccgccacccccctttcccgttcgttcccaggacgagtcacagcagccggccaaccgcacagagtggtggagcctagggacagaggaggcgccgagccatctccgcagcctgcgaccggggaacgggcgggaacggactctaacttagagagagcgcgggcgagagaggtcaaccgcagccggaggcgatggaggtggtggcgctggtgagcggcggcaaggacagctgcttcgccatgatgcgatgcatggactacggccacaaggttgtcgctttggctaatcttatccccctcgacgacaccgtcgatgagctcgacagctacatgtaccaaactgtggggcaccagattgtggtgagctacgcgaaatgcatgggcttgcctcttttccggaggcgcattcgcggatccacaagggatcagggtctcaggtacagtgtcacggcaggtgatgaggtagaagatatgtttgctctgttgagcgaggttaaacgtcgaatcccatccatcagtgcggtgtcgtcaggtgcaatcgcatccgattaccagaggctccgggttgagagtgtttgctcgaggctgggcctggtctcgctggcgtatctatggaagcaggatcagactttgctcctagaggaaatgataaggaggggcattgtggcaataattgtgaaggttgctgcactggggctaaaaccttcttcccacttaggtaaagaactggctgaacttaagtgtcatctgctccaaatgaatgagaattatggaatcaatgtctgtggtgaaggtggagaatatgaaacactaactcttgactgccctctatttcgtaatgcaagaattattcttgatgactctgaagtgatactccactctgctgattccattgcttctgttggaattcttcatccacgggcgtttcatcttgagcagaagccagattcatctgatagaattggggatggttctgccgttcaagagagttctagttgtgtatatgaggttgatgaagttaccactcacgatgatgtgggagaaaaacaggccctgggtccagctgttgatgcttacaccaatatagacctatgtatctcaaagacagggaacaatttacgttcaatgagctgttggattcaggatccatccagagcttcggaaggcctgaaggcagaccttatagcagttttgagcagaattgaaaatcagctcaaggaagaagggttaggttgggtgaatgttttgtacgttcacctctacatttcaagcatgaaggaatttggattggccaatgaagtttacgtcagctttattacggaaaagaaatgctacctgggtgttccttcgcgcagtacaattgaattgccactagtgcaggctgggttgggcaaagcatatgtggaagtcctagtttcaaatgaggtggtaaagaaagttctacatgtgcaaagcatctcctgctgggctcctagctgcattggaccttatagccaggcaactctttatgaagagattctctatatggctggtcagctggggcttgaccctcctacaatgaagctctgtcttggaggtccaagagcggaactagaattagcactacaaaacagtgaagctgtggccaatgcctttagctgctcaatctatatctcggcaatacactttctggtgtactgctctgctcagttgacgtccagtgagaaggaagaaattgaacagacattgaagagttcttatattactcgtttggatcgctcaaaaggtggatcatgtccaactgttctgtacgtattcgcatcagaccttccgaaaggagcacgtgtggaggtaaagcctatactgtatgtcccctccactgatgattgggttgttgccgaagagacggagaccggagttccactgccagcaccgagcaaaacctggactgattgtaccgcaccatactctgcgttgcgcgattcgtgttgccaggtccacacaaccggcgggagaatttgttccgccgtggtgtcgatcacagatgacatcgcatcgaagatctgctctgcagctggacagctgcaccacggagaggagaatctgaaaatcatggctagattctgcgctttccagatcgtgaagaccctggcagacaacagattttcctgggacagcgtaacgatgttgaggctctactactcggtagatctcgccgtggcggcagatgcagtgtccggagcattttccgaggccttggccgagcttgcccaagacaacccttccatgagaactgacgttcctttctacaacgttgtgcccgtagccggagctggccgctctgcgtgtgcgaacgacataatgacgtgcgagttactggcatccaacgtctccagtgcgaagtccataccagccgaaccgttcgctgtgacgcctgcttgaatgcagctttccttcggaaattggaggtgggcgcacgttggaatttctgccagaggagccgttggccagtcaactgccagatgaacgacgacggttgaccagcttctctagggctggcggcggtagcttcgtttctgctggcggtcgattaaaaaaaagaccgtacggtgatcattacagatgcacccatactgtattattctgtttcagcgtcctatacaaagtatacattgggtctgaattctgattagcccgtgctgatgcttgcaatgacattggttcttgtgtgt

SEQ ID NO: 25171 - DNA, 1484 bp, Zea mays
  Clone ID: LIB3689-262-H6_FLI
tgtgaacggtgcggcccgcttttactcgtttccgtaaccgatcgtttcttcttaattcggcggatgctcccttctgctcccgcgccggtggcagtcgtcgctgccgcagctggaccacgtcgccgacaggtgagcctcagtgacagacagtacgcccggccgcagatcccgatcgggcattctccgaccgactcccccattgtttcgccatcttttaagtctgccggccgcaacgtgcatcatgcagcatgcgtgtgaacgtactacgcaggtccaacgaggagagcggcggcgagatcgactgggacaacctcggcttcggcctcaccccgaccgactacatgtacgtcacgcggtgctcgccggaggaccgcggcgacttcccccgcggcgagctctgccgctacggcaacatcgagctcagcccctcctccggcgttctaaactacgcccagggcctgttcgagggaatgaaggcgtaccggcggccggaccgggccgggtacacgctgttccggccggaggagaacgcgcggcggatgcagcgcggcgccgagcgcatgtgcatgccggcgccgtcggtggagcagttcgtccacgccgtcaggcagacagtcctcgccaacaggcgctgggtgccgccgcaggggaagggagccctgtacctccggcctctgctcgtggggagcggcccgatccttgggctggctccggcccccgagtacaccttcctcatctacgccgcacccgttgggaactacttcaaggagggcctggcgcccatcaacctggtggtgcatgacgagttccaccgcgcgatgcccggcggcaccggcggggtcaagaccatcgccaactacgcgccggtgctgagggcgcagatggacgccaagagcaaggggttcacggacgtgctgtacctggactcggtccacaagcggtacctggaggaggtgtcgtcgtgcaacgtgttcgtcgtcaagggcggcgtggtcgccacgccggacacccggggcaccatcctgccgggcatcacgcgcaagagcgtcatcgagctcgccagggaccgcgggtacaaggttgaggaacgcctggtttccatcgacgatctgatgggcgcagacgaggtgttctgcaccgggaccgcggtggtggttgctcccgtgtcgacagtcacgtaccagggcgagaggtatgagttcagaacggggccggacacggtgtcgcaggagctgtacacgacgctgacatccattcagatgggcatggccgccgaggacagcaagggatggacagtagcagtagagtagattaataaggttggggaatgccatcgccacgacattcgatcctacatcagtattgtcatccggtagaatgcatactcggttgatcagcatatgtagtgttgcagcaaattgaagaataaaccgtgtgtgttcgatggcgatcagtgacgaggccattgagcagccattgatttg

SEQ ID NO: 25172 - DNA, 778 bp, Zea mays
  Clone ID: LIB3732-001-H3_FLI
ctacccccagcctcggaaggaaccttccagaagcgcaagactctaaaggccgtcgccttcccattcttcctcgccgcgggggtcgcctgagatcacataaacaatggtgaaggctgttgctgtgcttggtagcagcgatggtgtcaagggcaccatctttttcacccaagagggagatggccctaccgctgtcaccggaagtgtctctggcctcaagcctggcctccatgggttccatgtacatgcatttggtgacaccaccaatggatgcatgtcaactggaccacactacaatcctgcgagcaaggagcatggggcaccagaagatgagaaccgccatgctggtgatcttggaaacgtgacagctggagcagatggtgttgctaatatcaatgtcaccgacagccagatcccactgactgggccaaactcaatcattggcagagctgttgttgttcacgctgatcctgatgatcttggaaagggtgggcacgagctcagcaagagcactggaaacgccggtggccgtgttgcttgtgggatcattggactccagggctgaaaacgatcgccggacttgggggtgcctgagaggtccgtctcctgccgtccccagcagacgagcctgaacattcggagacatcgtgaaataagagcgtcgctgatctgtgatcatcgtatttgtcattatgcacctgtagcaaccgatggactgaactgtgctggattatgctgttggatcacctgagtatgtgttacatgtcggttttgatgtgac

SEQ ID NO: 25173 - DNA, 1038 bp, Zea mays
  Clone ID: LIB3732-002-C10_FLI
gtcgccatctccatttccagcatagaagacgcgatacagctcaaggacagcgctccgcacccgcacgcaagccagaccggaccgaatcgaagcagcagcagcgtacagaagatcacaccctactgccgcgctgcactgcacaatgggcatctgcgtgtcgtgcgacgcggcggacgagggcgccgcgacggcggcgcgggtggtgctccccagcggagagctccgggagtacgcgccaccggccaccgccgcggaggcgctgcaagcggcgggcgagggctcgtcgtggctcctctgcgacgccgacgggatggcgttcgagggccccgtcgcagtcgcggcggtcgcgccggggtccgagctccaggcggggcagatctacttcgtgctccccgccgagatgcagcgccgccgcctcgcccgcgccgaggtcgccgcgctcgcggtccgagccagctcggcgctcgccagggccgcggcgctcgcccagccatcgtcgccctgccgccgccgccgccggcgcggcgcggcggcgcagctcgtgttcccggtccccgaggaggagttcgcggcggcggacccggtcgcgtcgaagcccgcggctgcggtggtggcgcatcggaaacggagggtggcgtaccgcggcgggagcgggagggcgtccaggttctcccccgacctgaccgctatcccggagagcgagtagtagatggagcctgccatgtgtctccggtggcgacggctcgctcggcgctcggtcggacggtgtggccgagctcgcgcgcgccggagatcgatggagcaggaagcgttgtagacgcagagctcggggatgagaaatgtgagtagtgtttttggcgccgttggtttaggaggcaataggatgagtgttgcgttattacgaacgtttaggttttagatgcaagtgtaaatacacgggatctccgtacggtgtgcccagtgagtcacagtttggaactcagcttctaatcagtgctcgtgttcaggctaaaaaattgaaatctctcgctgtttcgg

SEQ ID NO: 25174 - DNA, 1315 bp, Zea mays
  Clone ID: LIB3732-002-C6_FLI
catgcttgtcctgcgcaggcaggcaggttccttcctgctcacctcacctcactccaccgacaatttcctttgccttctttcgccgttcatatactccgccgcttctactagtggtatcgtaggttaaggccaccccaagcaggagtctgcttccgttccattgcatcccagtcccagccaaagcaggatgccgcacgccaagacggactcggaggtgacgagcctggcgccgtcgtcgcctccgcggtcgcctccacggacccgcggcgccgtctactacgtgcagagcccgtcccgcgactcgcacgacggcgagacgatcaaggcggccacgtctgtgcactccacccccgcgctgagccccatggcgtcgccgcgccactcgcactcccactcccactcgtccatgggcagggactcctcctccagccgattctcgggccacggccacaacaagcgcaaggccgacaagggcggcagcaacaagggcgcgccgggcggcaaggggtggcaggagatcggcgtcatcgaggaggaagggctcatggacgaggaggaccacacgcggatcgtgccccgcaagtgctactgcttcctcgccttcctgctcggcttcgtcgcgctcttctccttcttcgcgctcgtgctctggggcgccagcaggtcccagaagccgcgcatcgtcatgggcaccatccgcttcgacaacttcatcatccaggccggcaccgacgcgtcgctcgtgcccaccgacatggccaccaccaactccaccgtcagattcacctaccgcaacaggggcaccttcttcgggatccacgtcaccgccgacccgttccagctctcctacagccagctcacgctcgcgtcaggagacctccacaacttctaccagcctcgcagcagcagccgcaccgtcagcgtcgccgtggtcggcaacaaggtgccgctgtacggcggcggacccacgctgacggcggcgccggcggccgggggcaaggggcagcagcaggccagcgccaaggtggcatcggtgcccatggtgctgaggaccacgctgcactcgcgggcctacgtgctgggcgcgctggtcaagcccaagttcacgctcgccgtcgagtgcagggtgctcatgaacccaaacaagcagaacaagcccatctcgctcgggaacgcctgccactactcatgatatatttagcctctcatactagctgctcaacatcaccatgcccatgcatccatctcctacctacctctcaattgtactgtaatggagtatttattgatttatttatgctttgcttcgtcttcc

SEQ ID NO: 25175 - DNA, 710 bp, Zea mays
  Clone ID: LIB3732-002-E3_FLI
ctctctcgcatccgcagcctttcgagctctactccaccccctcgatctcgaagcgcagcagcagcagtcaggcggccatggacgcgagcgcagccggagccggcgggaaggcgaagaagggcgcggccgggcgcaaggccggcgggccgaggaagaagtcggtgacgaggtccgtcaaggccgggctgcagtttcccgtcggccgcatcgggcggtacctgaagaagggccggtacgcgcagcgcgtcggcacgggcgcccccgtctacctggccgccgtcctcgagtacctggccgccgaggtgctggagctggccggcaacgctgccaaggacaacaagaagacccgcatcatcccgcgccacgtgctccttgccatccgcaacgacgaggagctcggcaagctgctgtccggcgtcaccatcgcccacggcggcgtcctccccaacatcaacccggtgctcctgcccaagaagaccgctgagaaggcggcggccaaggaggccaagtcgcccaagaaggccgccaagtcccccaagaaggcatagaggggcgggcgcctttaccgctgtgatgttgaatgctcgtgttcagtagatctttacgtctgtagtgtcgtcgttgttattggaactggttagtagatctgtgcattgtggttgaaacgtgattccctgatttcagaaatctaatttgcaatttgggtgcac

SEQ ID NO: 25176 - DNA, 2445 bp, Zea mays
  Clone ID: LIB3732-002-F1_FLI
ggtcttcccgtgatgatgatggatcgagagtcgatttattatgacacaaacacgtacaaacatgcatgggatacctgaaggagtttgttgaggctgtgtgggggctcctcatggcgcagaccgcttcgccttcccgtgtgcagcttgccgttactgcgataaggttcttgactacagttgctgagagtgtgcaccatgctttatttgggagtcctgaggcgatgaagcagatatgtgatagtgtcgttgtgcctaacttgcgcctgcgggatgaggatgaggagttgtttgagggcaattgggtggaatatgtcaggcgcgactctgagggtagcgatgcagatacactcagacgggcagcgtgccggttgctgcggggccttgcagcgaactaccaagagcaggtggctgcactcgtctcagcacaggtccagcagatgttggttgcatatgctgctaatcggtcaaacaactggaaggagaaggatgctgcaatataccttgttattgctcttatgcagaagcctggtgccacaggtggtggcacacctgtggttgacatggagagcttctttacatctgtgattgtgcctgagctccaagcccctgattggcagtctgagccaatgttgaaggcaactgtgctcaggttcttgaaggagttcaaggatcagatccccaaagctactgcactggcactcctacaaagtgtgatgcggtttttgatgcatgagtccaatgttgttcattcatatgctgcaacttttatcgagaacctgttgataatcaaggatgctgtaccggtaccaggggtgaccacagtgatcaggtctccacgttatgttgctgctgatatcaatccatttgccccacagatcattcagaacctgtccacagcactaggtttccctgattcacaagagaacccctacctgatgaagtgcctgatgcgggtgcttgggattgctaatattgctggtcaaattgttcatgagatcacagctcaacttgtgggtattctcatggaagtgtgtaataatcccaagaaccctgacttcaaccattacttgtttgaggctctggcagcagttattggccggactggtgagcaggacccaacactactccctgcttttgagaccagcctctttccagtgctccagaggatattggttgaggacatctcagagttctggccatatgcttttcagatatttgctcaacttgtcaatttgagccgaccacctctctcacagaattacatgcagctatttggtgtccttctcagtaatgcaacttgggaccggccaccatgtgttcctgccttggttcgtttgctgcgagcattccttaggaaaattctaaatgagctaaaccaagagggcaggcttccaaatatattggcaatatcccgtagcctcctctcacgcagcagcactgaagattctgcattctacatgctgaacacactagtggaaaacgttggttttgacattctgaacccatatataagtgagatatggagtgctttgtttactcggctacagactagacagacagtgaaatttgtgaactctcttgtggttttcatgtcgctagtgctggtcaaatatgggtcaagtgttcttgtcaattccgttgatgcaattcagccaaatcttttcacccaaatccttcagcgattttggattcccaacctcaatttgatcaaaggtgctcttgaagttaagttgacagcagttgcttcgataaagttgctttgtgagtctgcggtcctgttggatgctgcagcagcccagttatggggtaaattacttgacagtattgtcacactattgtccagaatgaatcaagatggatcacaacaagagcataatgatggtactgatgcagtggatactcagaagacatcaagttattctgtttcatttgtacgacttcaatatgctgggaagagtgaagatgaccttttgaaagaagtaaatgatccaaaacagtttgtggtcacatccttagccacaatttctgcccagtttcctgggaggtttggtcctgtcattgagcagcatgtggacctagcaaacaaaagtgtgcttcttcaactttgtgcagcctacaatgccaacattgtctaggtaacaacttcaatgatattattttataagtttaaaccatggatcaaactatgcattgagaatggatgtttcatccaagtttaatttcattttatatggcatggtagtcttggaaacaatgccatgaaactctccactaggaatggtcttggactcttggtggtctcaacgttcaagtacggagtaggatttagctacatggctgtcccattagtagccattcttgctacagacacaattaatgactaaatttcttttttcaagatgttttaggcgatgttataactcctaaatatcatgtgattaacac

SEQ ID NO: 25177 - DNA, 1000 bp, Zea mays
  Clone ID: LIB3732-002-F8_FLI
catacacaacacagagcatcagaaggagctgcgatctgatcgacatggctgccgccaccatggctatcacctcccgcgcgctcatcggcaagccggcggctggcacgagggacgtcttcggcaagggccgcatcaccatgcgcaagaccgccgccaagcccaagccggcggcgtccggcagcccctggtacggtgccgaccgcgtcctgtacctgggcccgctgtccggctcgcccccgagctacctgaccggcgagttccccggcgactacgggtgggacaccgcggggctgtcggcggacccggagaccttcgccaagaaccgcgagctggaggtgatccactgccgctgggccatgctcggcgcgctcgggtgcgtgttcccggagctgctcgcccgcaacggcgtcaagttcggcgaggcggtgtggttcaaggcgggctcccagatcttcagcgagggcgggctcgactacctcggcaacccgagcctggtccacgcgcagagcatcctggccatctgggcgtgccaggtggtgctcatgggcgccgtcgaggggtaccgcgtcgccggcgggccgctcggagaggtggtcgacccgctgtaccctggcggcagcttcgacccgctcgggctcgccgacgacccggaggcgttcgccgagctcaaggtgaaggagatcaagaacggccgcctcgccatgttctccatgttcggcttcttcgtgcaggctatcgtcaccggcaagggccccctcgagaacctcgccgaccacatcgccgaccccgtcaacaacaacgcctgggcttacgccaccaacttcgtccccggcaagtgagcgagggcatgatgcttgcatgcgtgtaccgtagacgtacgtattcctacgtactgcaggttgcaccagtatttgtgaagggagctttgggagccagagattgtaccgctagtgtatttgtatgcatgctgtggagctgaacaataaaatatgctgtaaat

SEQ ID NO: 25178 - DNA, 938 bp, Zea mays
  Clone ID: LIB3732-002-G3_FLI
ttgtttcccgtcccatcgtgtgtgagcgcgtctgctggtctgccaagaggaggaaaggaaggagagagatggcttgccctgcgcagtccatgctctccgccagcggctgcatcttcctgaggagcaagcctcaggcggcatcccaagtgcgagggggcatcatcggcggtggccgcagcagcaggccgttcctgctcacctgcaacgcttcctcttctccgtccccttcctcgccggcgccggcgcaggaagaccccgactgcaacgaggaggagtgcgccccggagaaggaggtcgggagcctgagcgctgagtggctggccgaggagaggacccaggtcgtcggcactttccctcccaagaagagagggtggaccggcttagtggagaaggacaccgccggccagaccaacatctactccgtcgagccgatggtgtacgtggccgagagcgccatcagctccggcacggcgggtacgtcggcggagggcgccgagaacacggccgccatcgccgcggggctcgtcctcatcaccgtagccgcggcctcgtccatcctcatccaggtgaacaagagccaggtgccgcaggtgccggaagccgcctacagcggcccgccgctcagctactacgtcaccaagttccagccggcggtggctgcgccggcgcagaccctcgaggcccccgcccccaacgagacacaagacggcgccgccgccaccgtcgcggctccggaggtaccggcaccgcagctgtcgtcgtgagctgattcggttttgtggcagctttatactacggatgagccagtagcgcatgatgatggaagatatgtatccatgatacaagcatttcggagttgtattaaagtttgtatatacacatgcattcagctcgcgcattctgtatgcttatttgaattcagacatcacggcactccc

SEQ ID NO: 25179 - DNA, 923 bp, Zea mays
  Clone ID: LIB3732-003-C9_FLI
accaccaccaccgcctggccgtaacgtcacacgctcgcctccttccatggcgcccaggaacgctctccccgccgccagcgccgtggccaacggcatggtgatggagccgaggttccgcggcgtccggaagcgcccgtggggcaggttcgcggcggagatccgggacccggccaggaaggcgcgcgtgtggctcggcaccttcgacaccgccgaggccgcggcgcgcgcctacgacgccgccgcgctccacttccgcgggcccaaggccaagaccaacttccccgtcgcgttcgccgcgcttccgccgccgccgccgcccaagaagccggccgccgtgaccgtgagccccagcagcagcagcaccgtggagtcctcctcctcctcctcccgggactcgcccgccacgccgcccaggcccgcgtctccgtcccagcaggccccgtcgctcgacctcagcctaggcggcacaccggccatggtggccgcccagccgttcctcttcctggacccgaggctcgcggtgaccgtggccgtgccggcgcccgtgccctaccggccgaccgcggtcgccgccggtgccaacaagcatgctgcggcatcctgccgtgaagaggagcagagcgacaccgggtcgtcgtcatccgtggtggacgcctccccagcggtcggcgtggggttcgacctcaacatgccgccgccggccgaggtggcgtaggtggaccgaccgccgcagcgcccggtgacacgagacgagacggctccgagaggtcgcgtagatgattagaaacaagctgtattagtacgaggttgggttcaatttgccgcgatgggttactgctagccaggtgtacatagacctttttgcatcggcagctaatacctatttgccgatgttacaaaaaaaaaagagcgaaacgttttgt

SEQ ID NO: 25180 - DNA, 1232 bp, Zea mays
  Clone ID: LIB3732-003-E5_FLI
aaaaaactaatagaaaaaataaaaagaatccattgactcgcagcttcccctgctcctgctctcaccatttccacctataaagtcggccgcagcctcctgcgcgacaaacacctcccaacccaatctcctcagtcctcactcctcagagagagccccaagccaagatctgcgcgggcaagtcaccaggcgaagcaccggctcccatggccgtggacctgatgggctgctacgccccgcgccgcgccaacgaccagctcgccatccaggaggcggcggcggccgggctccgcaacctggagctgctggtgacgtccctgtccacgcaggccgccgcgccgcacagggccgctgatcagccgttcggcgagatcgccggccaggccgtctccaagttccgcaaggtcatctccatcctcgaccgcacggggcacgcccgcttccgccgcgggcccgtcgagccgccgccgccgacgccgacgccgccgacgcctcctgtcgtccccggtcctgcccccctggcgcccgtcagcgtggcgcagccgccgcagagcctgacgctggacttcacgaagccgaacctggccgtgtcggccgccacgtccgtcacctccacgtccttcttctcgtcggtcacggccggcgatggcagcgtctccaagggccggagcctcatgtcctccgggaagccgccgctgtccggccacaagcggaagccctgcgccggcgcccactccgaggccaccaccaacggcagccggtgccactgctccaagagaaggaagaaccgcgtgaagaggagcatcagagtgccggcgatcagctcgaaggtcgccgacatcccgccggacgagtactcgtggaggaagtacggccagaagcccatcaagggctccccttacccacggggctactacaagtgcagcactgtgcggggatgcccggcgaggaagcacgtggagcgggccaccgacgacccggccatgctggtggtgacgtacgagggcgagcaccgccacacgccgggcgcggtccaggggccgagccccctggcgaccgcgtcgccggtgcccgtcgccgtctccgccggcaacgggctcgttgtctagtctactaaaagctaggattagcttctcgtcttctttgttttttttttgtttgagctgatgtccgtgtaaaacaaggaagaaggttgtagaaagagggagaggaggacaccggaatttcgatgccgc

SEQ ID NO: 25181 - DNA, 838 bp, Zea mays
  Clone ID: LIB3732-003-G10_FLI
agcagcgatccgaagctcaatcaattcactcaaacctcttccccaaatcttcgattagattctcgttgacaagaagactagaaccgaacctgaccatgtcgctgatccgccgcagcaacgtgttcgatcccttctccctcgacctctgggacccctttgagggcttccccttcggctccggcagcagcagcagtctcttcccctcgttcccgcggaccagctcggagaccgcggccttcgctggcgcgcggatcgactggaaggagactccagaggcgcacgtgttcaaggccgacgtaccggggctgaagaaggaggaggtcaaggtggaggtcgaggacggcaacgtccttcagatcagcggcgaacgcaacaaggagcaggaggagaagacggacacctggcaccgcgtggagcggagcagcgggaggttcctgcgcaggttccgactgcccgagaacgctaagacggagcagatcacggccgccatggagaacggcgtgcttacagtcactgtgccgaaggaggacgccaagaagcctgaagtgaagtccattcagatctccggctagacctcggtctgcggtcgtcgtacctgcgtggtttgaggaacggcagttcgcctcggtcgttctgtgaaataaaattgggttacaagaattatggcgtttgtcaatatggtcgtaatgtcgtaggatggtggaatgtggtcacaaactttgcgtatgttgggtctactggtggtgtctgaatctatgtatggatgtcatgagtttgtctactagagtcccagttcctgtggtgttcgtatgatgtatatcatgggttaactctatct

SEQ ID NO: 25182 - DNA, 601 bp, Zea mays
  Clone ID: LIB3732-004-C8_FLI
ggaaatggaaatatcattccggacttttgaattttcatgcatacaaccatacaactcaaataatacatcatcccaacaatttgtggatcaaacaaacttcaacttaaaacatgatatgtaataaaagattacaaacactaaaccgcgtcaatccttgtattagaccgccacttgtgactcgcgaagacctctgagtacatgacacacacacatgcttcacaagattcaaatacaaaatacaatcacaccacgtcgagggttgtatagatttagctcgacgtccttatttatctttgcactacacacacatgcatgcataaacatgcatggcttggccataaacgtgaacatagatacggctacctcaccatcccagaacgattgaaacagagacaagtgatgagcaaaaacaaggcaatctagtttcctccaccgccacctcctcctccattaccaccgccatcaccaccgccaccaccgccgccacctccgcctccaccgccgccgccgcctccccctcctcctcctcctcctcctcctccgagagactggtggagttgttgagcgagtatccttgaagaagccatttgcttaaactgct

SEQ ID NO: 25183 - DNA, 1082 bp, Zea mays
  Clone ID: LIB3732-004-E6_FLI
tctccctttccctcgccgcgtataaagattcgctgcccgcgacaagaagatgcagctcattaccacctccgcctccgcgatcgaagctcctcacaaactgttatcgtcgccatggcagccgccgcgcctgcaagctccgtgaaggaagtgctgccgtctcccctgacctccgcctccgagccccctcccctcttcgatggcaccaccaggctgtacgttgcctatcattgcccgtacgcgcagcgcgcttggattgccaggaactacaagggtttgcaggacaagattaagatagtcgccatcgatcttgctgacaggccagcatggtacaaggagaaggtttatccagaaaacaaggtgccttctctggagcacaacaaccaggtgaaaggtgagagtttagatctggtcaagtacattgacagcaactttgaaggcccatcgttgctcccagaggatccttcaaaaaagcagttcgctgaggagctgcttgcatatactgatgcatttaacaaagcattatacttttgtatagtctccaaggaagatgtgtctgaggaagctgtcgctgctttggataaaatagaagacgccctcgggaaattcaacgagggtccattctcccttggtcagttcagtctggtggacattgcgtatgtaccattcatcgagaggtttcagatattctattccaacataaagaactatgatattacaaagggcagacccaaccttcagaagttcattgaggaagtggacaagattgatgcatacacacagactaaacaggacccacagtttttacttgagcagacaaagaagcggcttgggattgcttaaagcttgcggccgaggatgactctcgacagaaataccagcatagtagatcgacacttgtttagtcatttgtgtgcttgaataatgaatactacatatatggttttcaataagacatggtcctctatactgggttgtacttctgaaaacaaactagttgtcctgatattatagctttcgtggtgtgtttacgtcactgtatatgaaagggtggggagagagaatgatatgccatgtattctgtc

SEQ ID NO: 25184 - DNA, 1189 bp, Zea mays
  Clone ID: LIB3732-004-F11_FLI
ccatcactcgcattctcaccggcgagctcagggctcagcatccgcgcgcctcctctccaagcagaccaccaccgccggaagcatggccgcgccgctgcttcggcaatggcgcagcctcgccgtgctcggcgccctcctcgggctccacctcatcgccgccgtggcgcagtcgccgccaactacacccacgacccctgccgcaccaacgactccggccgcacccacgacccctgccgcacccacgactccggctacacccacgacccctgccgcaccaacgactccggccgcacccacgaccccggccgcacccacgactccggctgcaccgacgacacctatcgcacccacgactccggctgcaccgacgacccctgccgccaccccggtcgcgccagcaaacccgccgccggctccgacaacgccagcgcccaccgccaccccagtcgcgccagcgaagccgccgccggtcgcgcccgcggtcgcgccggccaaacccccgccggtgacgccgccaccagtgacacctcctcccgcgacgcctccacccgcgacgccgcccgcggtgctcccacccgccgtgctgccgcccgccgcggcgcctccgccgacggcgacgcctccggccgaggcgcccgcgtcgctgcctcccgcgacgacgcccccgcccgtggccgaggcccccgcggagctgccgcccgccgaggcgccgtccaagggcaagaacaagcacaagaggaggaggaagcagcacggcaagaaggaggcgcccgcggaagcgccgcagccgctgagcccgccagctcccgccgcgccgtcgccggctgatctggaggacgtgtccggccctgcaccgtcagccgatgtgaatgcgagttgccggcagcaccagaactgggcctccgtcgtcgtgcagaccgccatggcggcgcttttgttatcgctagcgtggtaaactaataaatcccagagagaaacgaaagatccatatatcagcgtaccagctcagctcatggtttaattatttccgcccttcctgttcatgccgcaccatcatacataggccggtgagattatctgcgggatttgttataggaaccgttggattgtggcttgtggtatttgtttttgacacattctgtatccattttttcgttaatttttggaataaagacgcacacttgctcac

SEQ ID NO: 25185 - DNA, 788 bp, Zea mays
  Clone ID: LIB3732-004-G9_FLI
ggtgccatggcatccgccgccggcgccgccttgtgcccatgctctttctccaccgtactctcctcctccccctcaactcccttccgtcccgcaaggacgacgcctcgcccttctctccgcccgctgccgcgccgcgccaggctaccgctgcggccgggccactcgcgagtcggatcgtgtctgcaggtactgaggtgcctcccgaaatgcgactcggggaagccggacggaggaggagatgctgggttatcgggtcggaaggcggcccggccagcgggtcagggaggacccaggcggcccgcgcagttcggcgcgtcgtcgtgcgggctcgcattcacgacggtggtgggggtgataatgctccaggcatcgcagcaggcgcttgccgccacgcagttcgctggcctgcagcctgcggacgtgctgggggatctcggggacgtcagtacaggttttgcttcagctttcctgttgatcttcttttctgagctaggggacagaacgttcttcattgcggcactgttagcagctagaagttctggagctgtcatttttctaggcacatttggagctcttgcggtaatgaccattatatctgtagttcttggtcgagcattccactatgttgatggcatcattccgttcagctttggtggtactgatttcccagttgatgacattgctgcggcatgtctcttggtttattatggggttactacattacttgatgcagcctcaggtgatgatgaaaagatcaatgaggagcaagaggaggctgagttagcagt

SEQ ID NO: 25186 - DNA, 1659 bp, Zea mays
  Clone ID: LIB3732-004-H8_FLI
ggaccatgccattctggcggcgccggcacgggccatgatgcacacacctatggcggcatgtccaataccttcaagctgctaatcgtcctcggcttacttgtctgctccattgcgtttgctgccatggcgatcttgaaggcccggtcactgaagaaagccagcgaggcacgcgcttggaggctcactgcgttccagcgcctcgagttcacctgcgacgacgtgctagacagtctgaaggaggagaacatcatcggcaaaggtggagccgggatcgtgtacaaggggacgatgccggacggtgagcatgtcgcagtgaagcggctttcgtcgatgagccgtggctcgtcacacgaccacgggttctctgcagagatacaaaccctcgggaggatccgacaccgctacatcgtgaggttgctcggcttctgctcgaacaacgagacgaatctcctggtgtacgagttcatgcccaacgggagcctgggggagctgctccatggcaagaaaggtggccatctccactgggacactcgctacaagatcgccgtcgaggccgccaaggggctcagctacctgcaccacgattgctcgccgccgatcctgcaccgcgatgttaaatcgaacaacatcctgcttgattccgatttcgaagcacacgttgctgatttcgggctcgccaagttcttgcaggactctggcgcatcacagtgtatgtctgccattgctggctcctatggctatattgccccagagtacgcatacaccctcaaggtggacgagaagagcgacgtgtacagcttcggcgtggtgctcctggagctggtaacgggaaagaagccggtaggcgagttcggggacggcgtggacatcgtccactgggtcaggtcgacgacggcgggcgcgagcaaggagcaggtggtcaaggtcatggaccccaggctgtcgagcgtgccggtgcacgaggtggcgcacgtgttctgcgtcgcgctcctctgcgtggaggagcagagcgtgcagcgccccacgatgcgggaggtggtgcagatgctcggcgagctccccaagccagccgctgccgctgcagctgcagggcaaggagacgaggttcccggcagcggcgacggcgacgaatgttccgccgcgccgtcgggtgctccggcagctgatgaatctgttgaagcgccgcatggcgaagccaccaaagaaccgagctcacagtcttcgccgaccactgatctcatcagcatctgagagctgtgtcgagcttgtttttttttcttctcgttgctatgtttccttccttctccttgcgaagttcagatgtttggatgtttctagattattagggtttggtgttttaggtctcacctgcacttagggtggtctctgagattcagacatcttgtgttcatccatcttcatttaggtaggccccgggattcagacatcttgtgttcatccatcttgtgttcatgcatcttagcctcacttaggacactgctgtgtacagtagtacatatcaagctccctaaatctccattttgctgtcagaactgaaggaccatttagggggggattaaggagcctaggattatggagcagtcaaggtcgttaatgttgctgtttgtacttgtgttaataaggtgggcattgatatgt

SEQ ID NO: 25187 - DNA, 1156 bp, Zea mays
  Clone ID: LIB3732-005-A7_FLI
gcaacttgcaacctcggtgctgctgatgacgctcgcgatgagcacactcgcctgccaccgcccactcccctccaaaggttggaaatggaaactgcgaacctcggttgctacatggaaacatatgcggcctgggcgacgtaacgaggccgtggcatgcgcggcgaagaacacaaagaggaaacggagaagttctccgaacgagtcgaaggatttgctgctggtaagtgaggaagctgcttcgggcagtggaggaagtgctcctggcacaagcctcgagaccaacggcgaggatgctgctactgacgatgagatttcaggtgctccgaggagtgctgttcttcaggcttgcactctcacgtcaggcttgctgcttgccggagggcttctgcttcgcgaggcatcacacctagcatcaataaatggatggccaattgctgaccctacagatgtgtcattcagttttgaaacctggcatcttgagttggttgcgggacttgtcatagtaatctcctctacccggtacatcctgctacaaacatggccagatttcagagattccagtgaatctgcaaatagacaaatcctcgcatcgctggagcctctggactacatcgtcgttgcttgtctcccggggataagtgaggagttgctgtttcgaggggcgatgatgcctaccttgggattgaactggattagcgcccttattattggaaccgtttttggtgttcttcacttgggcaatggcaggaaatattcgtttgcaatctgggcaacatttgttggctttgcctatggtatgggaaccatagcttcctcgagcattgtagttccaatagcttctcactccataaacaatattatcggaggtttactttggcgccttaccaagaactcgcaaaagtagatatacataataccctcaacagtcatccctgttcagtttagactttttagtccttaatgcttacaaggttgtcgtcagtattagtgtcgcatgattggttcacccatgtattttcaatagcaaaatgaggacgggactgccgtaaaatcaggacttgcttcatttttctgtgtcaatgtgtccctgtaaatgaattatggagatttatatttcatagcaggtataaaataaaatttaaccgtggggccaaac

SEQ ID NO: 25188 - DNA, 780 bp, Zea mays
  Clone ID: LIB3732-005-B11_FLI
caccagaatccgcgaatcacagacgcgtctatctcagcttgctgcactgcactaccctgccctgccatcatatcgtacgtgagcccggccgagcgagagcgagggagaggcatggctgctccgaagctcgcgacgctggcgctggccgtgctcctggcggcgaccgtggtggctcccccggccgcggtgcgcgcggcgatgtcgtgttccaccgtgtacagcacgctgatgccgtgcctgccgttcgtccagatgggcggggccatgccgccccagccgtgctgcggcggcatccgcagcctgctgcagcaggccaacaacacccccgaccgccgcaccatctgcggctgcctcaagaacgtcgccaacggcgccaacgggagcggcacctacatcagccgcgccgccgcgctgcccagcaagtgcggcgtcgccctgccgtacaagatcagcaccaacgttaactgcaacacgattaattaagtgaggcgtcctgtgcgcgtcccgggcgaggaatgcatgcatggcgctggcggagagtaataaaataatgctactggtattttaagctagatcgaggtgtgcctgtctctagtcatttattatggtgtttaggaatcgtcgtctacacagttcgtaacggtgtatcgtggatgcatgttgccgcgagcagagtacgtaggcatgaaccgatgtgtgcgcttctgtctgtgtactctctctatgtagtaatgtgtgggtgctttgatccaaatgtattcgctcgtgagtcgtggaagt

SEQ ID NO: 25189 - DNA, 1550 bp, Zea mays
  Clone ID: LIB3732-005-B5_FLI
ccttaatcgaagtacacgctctgtattattcatcatttgcaacagcgtaagctacagttgtgtggactgtagtgtgtcgaatacggattctccaagaaaccaaaaccagcatgaggaaactttctttatacttgtacggtaatacagtgtgatagggacacgagttgcttaaaaccaaagaagctttctttaaggagtgatctccatatatcttgtcgtcggtttaggccgggctgagggactaggagctagccagctagtaggcacacaacgacacgagctgccatgtggtttcgttccgctgcagcagcggcagcgctcccctcctcgacgccgcggcttctcctcatcctcgcccgctccgtccgctgactggaagtggtctacacagaaggttaccatattgttaagttaaagttggatcattggaacaatgccgccccataagattgagactgggcatcaagatgtggtccatgatattgccatggattactacgggaagcgcctagctacagcctcctctgataacacaataaagatcattggcgtaagtggaacctcacaccagcagcttgcaaccttgagtggacaccagggcccagtatggcaagtcgcatgggctcatcccaagtttggttccatgcttgcatcctgcagctacgacggccgggtgatcatctggaaggaaggaagcaagcctgatgaatgggcactagcacacacctttgctgagcacaagtcctccgtgaactccattgcatgggcgcctcatgagctgggtctatgcttggcttgtggttcatcagacgggaacatttcagtcttcgctgctcgttctgatggaggttgggacaccacacgtattgaccaggcacatccggttggtgtgacctcagtttcctgggctccagcaatggcaccaggagctctaatcagcgcaggatcttctggccagtttgagtatgttcagaaactcgcttctggtggctgcgacaacacggttaaggtgtggaagctcaacaacgggagttggcggatggactgtttccctgccctacagatgcacaaggactgggtgagagatgtcgcgtgggccccaaacctgggccttccaaagtccaccatcgccagcgcctctcaggatggaacggtcgtcatctggacagcagcaaaagaaggcgagcagtgggacggccgggtgctgtatgatttcagaacccccgtttggaggctgtcgtggtcactgactgggaacatactggcggtttccgacggcaacaataatgtgaccctgtggaaggaagctgtggatggcgaatggcagcaagtgacgactgttgagccataggtcctctcgagttattcctcgcctgtattttctaaataataattgtagttttcgtgtaaggtaaagttatgcccctgtgggtagcatgtgggactgtttgtggttcacagctgttggcgaggcacagtgcacgagacatggtttcaggctcgggcaaaagtgaacaattaacttgttatacagtccattctgtttattc

SEQ ID NO: 25190 - DNA, 2129 bp, Zea mays
  Clone ID: LIB3732-006-E3_FLI
gctccaagtctcaccatccacacaggccagcgcgcaaacgccacaaagctagcctttctgctcccgctcgatcagctggctccgttgatcaccgggccgggccacaatccccatctcgctgactgattagtttccgctgcaatggcgtcctccatctccgctccagctccaccggcggctccggccaccgcgccggcttcgggcagacccaagaagccgtcccagttcaaccccagcaccggcaagaccaggaccccggtccccgcgcggccaatgcgcgccgccgctcccaagtggaacccgctccagcggctcgccgcggcggcgctcgacgcgctggaggaggggctcgtggcgggcgtcctcgagcgcgcgcacccgctgccacggaccgccgacccggccgtccagatcgccggcaactacgcgcccgtcggggagcgcccgcccaccggcgagctgcccgtgtccggccgcgtcccggcgtgcctcgacggcgtgtacgtccgcaacggcgccaacccgctccacgcgccgcgcgcggggcaccacctcttcgacggcgacggcatgctgcacgccgtgcggctccgcgggggccgcgccgagtcgtacgcgtgccggttcacggagacggcgcggctcaggcaggagcgcgccatcggcagggccgtgttccccaaggccatcggcgagctccacggccactcgggcgtggcgcgcctgctcctcttcggcgcccgctccctctgcggcgtgctcgacgcgtcccaggggatcggggtcgccaacgccggcctggtgtaccacaacaaccgcctcctcgccatgtcggaggacgacctcccctaccacgtgcgcgtcaccgccgacggggacctcgagaccgccgggcgctacgacttcggcggccagctcgacaccgccatgatcgcgcaccccaagcttgacccggccaccggcgagctcttcgcgctcagctacaatgtcgtgtccaagccgttcctcaagtacttctacttcaccgccgacggccgcaagtcccccgacgtcgagatccccgtggacgcgcccaccatgatgcacgacttcgccgtcaccgagaaccacgccatcatcccggaccagcagatcgtgttcaagctccaggagatggtcctgggcggctcccccgtggtgtacgacaggaacaagaccgcgcggtttggggtgctgccgaagcgcgccaccgacgcgtcgcggctgcggtgggtggacgtccccgactgcttctgcttccacctctggaacgcgtgggaggacgaggccacgggcgaggtcgtggtgatcgggtcctgcatgacccccgcggacgccgtgttcaacgagtccgccgccggcgaggagagcttccgcagcgtgctgtcggagatccggctggacccgcgcaccggcacgtcctcgcggcgcgcggtcctgagcgacgccgaccaggtgaacctggaggccggcatggtgaaccggcagctgctgggcaggaggacgcgctacgcctacctcgccatcgccgagccgtggcccaaggtgtcgggcttcgccaaggtggacctcgaggccggcaccgtcgacaagttcatctacggcgacggccggtacggcggcgagccctgcttcgtgccgcgccccgacgcccccgcgggcgccgcggaggacgacggctacgtgctgtgctacgtgcacgacgaggcccgcggcgcgtcggaaatgctcgtcgtcaacgcccgcgacatgcgggccgaggccgccgtcaagctgccgggccgcgtcccgtacgggttgcacggcacgttcatcgccggcaaggagctgcagcggcaggcctaggggtgccgttgccgtgtggtgctgcggctacctcgtcgatcacgaactcgaccaactcacgtacatacactgatatacacagacaatacagtagctagctagatagtgacgtggcaactcgattatttaccgtgtacgtagtacagtaatttgttcattattagagcagtagagggccgtgtgggactgatttttggggcagacgccggccctacatcttcatgtatatatacaaaaacatataggaatcaaaattgttgaatttt

SEQ ID NO: 25191 - DNA, 1934 bp, Zea mays
  Clone ID: LIB3732-006-E7_FLI
caaccaaggtgaagagacgtgtgggcaagtacgagctcggccgaaccataggcgaaggcacattcgccaaggtcaggttcgccaagaacaccgagaccggggagccggtggccgtcaagatcctcgacaaggagaaggtcctcaggcacaagatggccgagcaggtcacttttccagctctgaagtatcgtgccatgtttggtttggtgtattctcacgtcttctacattgtgcatggccccttcctttcagattctgtctgttcctcctctagtgttagtgtctttactatttttttttactacttgcaggcccaatatgggctttggcatacttgttcagagttcagtcagtagatttggtggaactagtcatttcgctgacgatgacacaaactactacatggttcgatgcagattaagagggagatttcgaccatgaagctgattaagcaccctaacgttgttcgcatatatgaggtgatgggaagtaaaacaaaggtctacattgtgctggagtatgttaccggcggcgaacttttcgacacaattgctaaccaaggtcgaatgagggaaggcgaggcgaggagttacttccaacaattaatcaacgcagttgattattgccatagcaggggtgtgtaccaccgggatttaaaaccagaaaatctactgcttgactcatatggaaatctgaatgtctctgactttgggctgagcgcgctgtcccagcaaatcaaggatgatggattgctgcacacaacttgtgggactccaaactatgtggcaccagaggtcctagaagatcagggctatgatggtgcaatggctgatctgtggtcatgtggagttatcctgtttgttctgctagctgggtatttaccttttgaggactctaaccttatgacgctgtataagaaaatctcaaatgcagaatacacatttccaccatggacatctttccctgccaagaggttgttgacaagaatccttgatccaaatccgatgacgagaataacaatccctgaaatactggaggatgagtggttcaaaaagggctacaagcgcccggagtttgacgagaaatatgacacgccattggatgatgtggatgctgtcttcaatgactcagaagagcaccacgtgacagagaagaaagaagaagaacccgtagctctcaatgcatttgaactgatttcaaggtcagcaggcctaaatcttgggaacctatttgactcggagcaggaattcaaaagagaaacgaggttcacgtcaaaatgtccaccgaaagaaatcattcgcaagattgaggaagctgcaaaacctctaggatttggtgtccagaagaaaaactacaagttgaggctagagaaagtaaaagcagggaggaagggaaacctgaatgttgctacggagatactacaggttgcgccctcccttcatatggtacaagtccggaaagcaaaaggcgacactctggagttccaaaagttctacaagaacctttccaagaccttaaaggacgttgtctggaaatctgaagacctgcaaatgcgagctgcttcttagcatccactagatggcgagatgttcgtacgtgtcagattccattcccgtagcatgatgtgtcgtcagccgtttctgttcactgcactctgcatggtccggtgggcgcgtggcttggcattttcagagaccgcgttgctcgttgcagcccgggatgaaggcgatgcagtaggttttgtggatgtggtgagctctgtatatgcctattgatgagtcatgttgcaagctgtaacgacactatgatccgtgaagtgtagaagcagccaagtatgttctttctatgctgccccatttcccggcagtttccatgcattttgaagaaaaaaatagtggctaactcattgatatttgtatttggtcatcattaat

SEQ ID NO: 25192 - DNA, 1359 bp, Zea mays
  Clone ID: LIB3732-006-F6_FLI
aaacaagataagtcgcggtttgcgacggcgagaagcgccggacgagtgtccactgtccacaagtccagattccaattccagtccgatcgtgagctcagctcagctccgctagtcctctccccgcacgcaccaccaccaccagcagtccagcaccatgggcggcgccctgatcgtcgcgctcctcctcgcgaccgtgcccctctccttgggcggcggcgcgcacccgggctactccgacgccgacgagagcgcgtgcacggtggacgcgggcgcggagctgctgcggcggctggaggagcgcgggcccggcgggcgcagcatcatcgacatcacgcacgcggtcgtgccggacctgccggcgttcgccacgggggcggtcgcggggcccatgctgcgcctcagggagtccatggcggacgggtccgagtacaacctgtcggagctgcggatggagtgccacaccggcacgcacgtcgacgcgcctggccacatcaaccaggcccacttcgccgccggcctcgacgtcgacacgctcgacctccacgtcctcaacggacctgcattgctagttgatgtgccaagaaacacaaatataacagctgaagcgatggaattcctaaacatcccgagaggggttcgccgagttctgttcagaacactgaacactgacaggaagttgatgtggaggaagggaggtgacatgagctacgttgggtttacagaggatggcgcgcagtggttagtcgacaacaccgacataaagctagttggagttgacggtctgtcagtggcatcatttgatcacctgatctctgcccacgtggtctttttcaaaaccccggatataatccctgttgagagcctgaatctggacgacatcgaggcggggatatacatgctgcactgtctacctctcaggctggtcggagccgagggtgcaccgaccagatgcatcctcatcaagtgatcgttccccggccggcctgctcttgctgccttgctggaggtggcgacactggaccatgccagctgagctggtgctccgtcgtgggtcgcgtggccaatatttggctcgcatgcagtcgtcgatctatatggaacagaacactgcatgcctatgtagatacgcttgtatggacaataaaggaaccgcagtacttctgtcgatgaaatacttttgggtgagccggtaatctaaaacaccaggcctacaggttaagctggaggccctggaaggctgaggctagcggctggggatggatccagatttttatttgaatgttatttttttgtcatctttttttgattgtaaacaaataacatatatgattttctatataaatttatattgttgttttt

SEQ ID NO: 25193 - DNA, 1272 bp, Zea mays
  Clone ID: LIB3732-006-G1_FLI
attgatgtctgcctgggtgcgcgtataaaagctagctagtgccataaagaaagagagagcgagaacgagtggcgatggcagtactgcacttgcaggtggcggcggtggcggtgctgctgatggcgacggggctgcgcgcgcagctgcgggtgggcttctacgacagctcgtgcccagcggcggagatcatcgtgcagcaggaggtgagcagggcggtggcggccaacccgggcctcgccgccggcctgctccgcctccacttccacgactgtttcgttgggggctgcgacgcgtccgtgctcatcgactccaccaagggcaacaccgcggagaaggacgccgggcccaacctcagcctgcggggcttcgaggtcgtcgatcgcatcaaggcgcgcgtcgagcaggcctgcttcggcgtcgtctcctgcgcggacatactcgcgttcgcggccagggacagcgtcgcactcgccggtgggaacgcgtaccaggtgccggcggggcggcgggacgggtccgtgtcgcgcgcgtcggacaccaacggcaacctgccgccgccgacggccaacgtcgcgcagctcacgcagatcttcggcaccaagggcctgacgcagaaggagatggtcatcctgtcgggcgcgcacaccatcggctcctcgcactgcagctccttcagcggccggctgtcggggtcggccacgacggcgggcgggcaggacccgaccatggacccggcgtacgtggcgcagctggcgcggcagtgcccgcagggcggcgacccgctcgtgcccatggactacgtctcccccaactccttcgacgagggcttctacaagggcgtcatggccaaccggggcctgctgtcctcggaccaggcgctgctcagcgacaagaacaccgccgtgcaggtcgtcacctacgccaacgacccggccaccttccaggccgacttcgccgccgccatggtcaagatgggctccgtcggcgtgctcaccggcaccagcggcaaggtcagggccaactgcagagtcgcctgatccatcatcatcatcactcgtgtggagttgtagattcgttatattgatttggaccggacgacgtcgacgggatggcgtagcatagcatggcctgcttgcgcaattgtatgtatgccctgtacttgcgcgtgtatgggtttcgctgtgcaaattttcgttggctcccccgattgattgaggcgtgtgtgcgtgtgtgtctcttctgaatctgaatggaaaatctgtaacctgagct

SEQ ID NO: 25194 - DNA, 656 bp, Zea mays
  Clone ID: LIB3732-007-A5_FLI
cgagcactcgccgccactcaccagcaaattcccaagccgccccttcccccatctctttcgcgacccatttgatcgattcctgatggcgcccaaggccgagaagaagcccgcggagaagaagccggcggaggagaaggccgagaagaagccaagggcggagaagcgcgtgccgagtaaggagggcggcgagaagaagggaaagaagaaggcgaagaagagcgttgagacgtacaagatctacatcttcaaggtgctcaagcaggtgcacccggacattggcatctcgtccaaggccatgtccatcatgaactccttcatcaacgacatcttcgagaagctcgctgccgaggcagccaagctcgcccgctacaacaagaagcccaccatcacctcccgggagatccagacctcggtgcgcctcgtcctccccggcgaactcgccaagcacgccgtctccgaagggaccaaggcggttaccaagtttacatcctcctagggtgccgccgcacgttgctacgatcctatttaattctcacatttaggcctgtgctaggttgctcctgcaacaatgtagaatttgttataattgctgaatgaatcagttacccctgttgagttttctaatatattgtaatcttgctagtataatctgcttc

SEQ ID NO: 25195 - DNA, 1153 bp, Zea mays
  Clone ID: LIB3732-007-G12_FLI
gcggccgcggcaagaagcgcgccgtcctgatcggcatcacgtacggcggcgcgcgccggggctgcggcgagctgcggggccccatcaacgacgtcaagtgcatgaggcagctcctctgccagcgcttcgccttccccagcgacggcatcatcatgctcactgacgaccagaaggacccgttccgggtgcccaccaaggacaacatccggatggcgatgcagtggctggtgcaggggtgcagcagcggcgactccctggtgttccacttctctgggctgggcgcgcaggtcgccgacgcggactgcgacgagcaggacgggtacgacgaggccatctgcccggtggactcgttccagaagggccccatcctggacgacgagatcaacgagaccatcgtccggacggtggtgcccggcgccaagctccacgccgtcgtcgacgcgtgccacagcgattccgtcctcgacctccccttcctctgcaacatgtccaggaccgggaactggcagtgggaggatcaccgtccaccgtcgggcgtctgcaagggcacgagcggcggccaggcggtgcttatcagcggctacagcgacggcaaaagcaagttcagcatgacgccggaggcctgcgcggcggtgggggccatgacccacagcttcatcaaggcggtggaatgcgagccccagggggtcacctacggccgcctgctcacctccatgaaagccatcatgaccaacgccggcggctgcaaccagcagctgcagggcgcctgcgcacccgcccgcaaggtcgtcaacttcagcggcgtgcaggaacctaacctgtcttgctcggagatgttcgacgtctaccgcaagccctttgcgctgtgaacctcctctgcattgccattgcctttgcagactaccacagattcccgtctggactctatatataaattaccgtgacggaataataaaccagacggatttatattatatatgatgatatgtcataatgtgtgccttaattgtcttgcggccaataatgtgtgtccatgtgtcgatcggttaccggccctgagccaagcttatagcctgtggaccgacgactttgttgaccattataaatacaatgttgataatgtttatacgtgtcgagtttattatgagtgatt

SEQ ID NO: 25196 - DNA, 1638 bp, Zea mays
  Clone ID: LIB3732-007-H7_FLI
gaatcgtcctcctcgcgagcctcgccgatcccccactcccctcccctcgcttcaagatgcagatctttgtgaagaccctcaccggcaagactatcaccctcgaggtggagtcttctgacaccattgacaatgtcaaggctaagatccaggacaaggagggcatccctcctgaccagcagcgccttatcttcgccggcaagcagcttgaggacggccgcacacttgctgactacaacatccagaaggagtcaacccttcatttggtgctgcgccttaggggaggcatgcagatctttgtcaagaccttgactggcaagacaatcacccttgaggtggagtcctcagacaccattgacaatgtcaaggctaagatccaggacaaggagggcatccctcctgaccagcagcggcttatcttcgccggcaagcagcttgaggacggacgcacacttgctgactacaacatccagaaggagtcaaccctccacttggtgctgcgccttaggggaggcatgcagatctttgtcaagaccttgactggcaagacaatcacccttgaggtggagtcctcagacaccattgacaatgtcaaggcaaagatccaggacaaggaaggcatcccaccggaccagcaacgtctcatctttgccggcaagcagttggaggatgggaggacccttgctgactacaacatccagaaggagagcaccctccacttggtgctgcgtcttaggggtggcatgcagatctttgtgaaaacccttactggcaagaccatcactcttgaggtggagtcttcagataccattgacaatgtcaaggccaagatccaggacaaggagggcatcccgccggaccagcagcgtcttatctttgccggcaagcagctggaggatggacgcacccttgcggattacaacattcagaaggagagcaccctccacctggtgctgcgcctcaggggaggaatgcagatcttcgtgaagacattgacaggcaagaccatcaccttggaggttgagagctccgacaccattgataatgtgaaggccaaaatccaggacaaggagggtatccccccggaccagcagcggctgatcttcgccggcaagcagctggaggatggtcgcaccttggctgactacaacatccagaaggagagcaccctccatctggtgctccgcctgaggggtggtatgcagatctttgtgaagaccttgactggcaagaccataaccctggaggttgagagctctgacaccatcgacaacgtgaaggctaagatccaggacaaggaggggattcccccagaccagcagcgtctgatcttcgccggcaagcagctggaggatggtcgcacccttgcagactacaatatccagaaggagagcaccctccacctggtgctccgtcttcgcggtggttattaagccatcagtcgttgaagctgctgctgtatctgggttatccagtgtctctgccattgcccatggatggtactgtctttcaaagtatttgtatggtttgtgtcgtgagtcgtgactgagctggtttcatggaccagttgtgttctcgttacccaaaactatcgtgcggcagcatatggcttaatcatgaataaatgtggtgtttgaattt

SEQ ID NO: 25197 - DNA, 1288 bp, Zea mays
  Clone ID: LIB3732-008-A2_FLI
gccgtgaagccgccgacagaaggagagagcacagagcgggcgaggcaggcagcatgaagtccatgggcagccgcgacaagctcgcggcggcgtcgagcccccgccgcgtcctcttggtggtcttcgccttctgcttcgcattcgccaccttcctcaccttcctctacaccacctcccacttcacgaccgcgcccggctccggctccggctccatcgcggcctctaccaccaccaccaccaccacgacctccggctctgcgggcggcggcggcggccaaggccaagcagggcccgagtccgtgtccaagcggctgccggtcccggtgttcgaggcgctggtccacttcgcgtccatctcgaacgcgacgcaccgcatgtcggacacggacatccgggccatgtcgtccgtgctccgcgcgcgggcgccctgcaacctgctggtgttcgggctgggcgcggaatccccgctgtggctggcgctgaaccacggcgggcggaccgtgttcctggaggagaacgagttctacgtcaagtacctggagccgcggcaccccgggatggaggcgtacgacgtgtcctacacgacgaaggtgcgcgacttccgggacctgctggcggcggcgcgggcggcgagggccaaggagtgccggcccgtgcagaacctgctcttctccgagtgccgcctcgccatcaacgacctgcccaacgacctctacgacgtggcctgggacgtggtcctcatcgacgggccgtccggctggaaccccaactcgcccggccggatgccgtccatcttcaccaccgccgtgctggcgcgctccggcgccaccgcggctaagggccccaccgacgtgctcgtgcacgacttccagttcgaggtggagcaggtgctgagcagggagttcctgtgcgacgagaaccgcgtcgcgggaagcggcaccccgtcgctcggccacttcgtcatccgcgggggtggggccggggccggcgacgccttctgctctgcccaggaggacggctcgtcgggggagaagacgcgccgccgccgcagccgcaagtaaattttacttgtccgctgtccgtctatcttgccacggagacgggcagacggcattagccgccagcgacctctcacttcttcctggcgagtggatctttaccgctcctcctcacccacctgttaattaattttttctctcttgcatatacatatatgttggttgttttgtttctcgggacaagaactgtaagaacaaccctggtaatatgattgcctccatcacaaaag

SEQ ID NO: 25198 - DNA, 817 bp, Zea mays
  Clone ID: LIB3732-008-A9_FLI
caacaaagtgacgcgagcacgagcatccatcgtttccccttcttccccatcgcgtgccctcgccgcagccatcttccatggcggaccagctcacggacgagcagatcgcggagttcaaggaggccttcagcctcttcgataaggatggcgacggctgcatcactaccaaggagcttggaactgtgatgcgctcccttggccagaaccccactgaagcagagctgcaggacatgatcaacgaggttgatgctgatggcaatgggaccattgacttcccagagttcctgaacctgatggcaaggaagatgaaggacaccgactccgaggaggagcttaaggaggcctttcgcgtcttcgacaaggaccagaatggtttcatctcggctgctgagctccgccatgtcatgaccaacctcggcgagaagctgactgacgaggaggtcgacgagatgatccgtgaggccgatgttgacggcgacggccagatcaactacgaggagttcgtcaaggtcatgatggccaagtgaggagccgtccccgttatctatgaattgaagttaaatatcaggcacacaagctgtactttgccatgtcccttttgagtacacatcagtatcatgcaggaggtaatgtctagtagtggtcggtttaggtggtgtagtcatgggaactcgacatcagatacctggtctcttttgattgtgatgttatcttgcattattgctcctgctggagcttttaggatttgttgtaagctcatattttcaggggggtttggatcttttgtgcgagtcatatctcgtgtacgttgcattgc

SEQ ID NO: 25199 - DNA, 2189 bp, Zea mays
  Clone ID: LIB3732-008-E4_FLI
agcattttttgtgtatggaggttgcaatttagttttggcagcagctgcagcagcaatctgtgcttatattgcacctgctgctgctgggtctggtattcctgaagtcaaagcttatcttaatggggttgatgcctattctatattagctcctagcacactctttgttaagatttttggttcaatacttggagtttcagctggattcgtgctaggaaaggaagggcccatggtacatacaggggcatgcattgccaacttgcttggtcagggtggatcacgcaagtatcatcttacttgtaactggctacgctactttaagaatgacagagacaggagagatttgatcacatgtggatctgcagctggtgtggcggctgccttccgtgcacctgttggcggtgttctgtttgctcttgaagaagcagcatcatggtggcgaagtgctcttttgtggagaacattctttacaactgctgttgttgcggtggtattgagggggctgattgagttctgtcgtagtggaaaatgtggtctctttgggcaaggtggattgatcatgtttgatctcagttcaactgttgcagtctacagtactccagatctaattgcaattatagtccttgggataattggtggaatctttggaggcctcttcaactatctgttggacaagatcctccgagtttatagtattatcaacgagagaggtgctccattcaagatccttctcactataacaatatcaataatcacatcaatgtgttcctatggtcttccttggcttgctgcatgcactccatgccctgttgatgctgtggagcagtgtcccactgttggccgctccggaaattataagaacttccaatgcccaccaggacattacaatggtcttgcatcactcttcttcaacacaaatgatgatgccatccgcaatctcttcagcaacggcacatcgactgagttccaaatgtcatctcttttcatcttcttcactgctatttactgccttggactagtgacttacggtattgctgtcccatctggtctctttatccctgttattcttgctggagccacgtatgggcgcatagtgggaactcttcttggatccatatctgatcttgatcctggcctttttgccctacttggcgcagcatcttttcttggtgggacaatgagaatgactgtgtcagtctgtgtgatccttctagagctcaccaacgatctccccatgctccctttagtcatgcttgttcttctcatatccaagaccatagcagatagctttaacaagggagtttatgatcagatagtggtgatgaaaggcttgccgtacatggaggctcatgctgaaccatacatgaggcacttggttgctggtgatgtggtgtctggcccactaatcaccttttctggggttgagaaggtggggaacattgttcatgcattaaggttaacgggccacaatggtttccctgtgcttgatgagccacccataacggaaaccccggaactggttgggcttgtgactaggtctcatttattagttttgctgaacagcaagaatttcatgaagggacgggttaaaactagtggtagcttcgttctgcgaagatttggtgcatttgactttgcgaaaccaggttcaggtaaaggtttgaaaattgaggacctggatttcactgatgaggagatggacatgtatgtggatctccacccgatcacaaatacatcaccttacacagtggttgagacgatgtcactggcaaaagcagcaatccttttccgggaacttggtttgaggcaccttttggttgtgccaaagacaccagacaggcctcccatagtcgggattctcacaaggcatgacttcatgcctgagcacattcacagtctgttcccaaacctcaatcctcacaagtaccattcagcatcaatggcaggttgacaaggagactctttctgcttctcatctatttggcattattcgggtgctggctgtatgtaaattgcaaaggtgtatgcgtatctggttttcaattggatccatctcatcttctctacatagttttgtttgtgtggattttgtagcatatgctctttttgcaataaaaaaaatgtggcagttgtttggctggtgactgcctattatgagcctgcggcaataaatgttcagcaaattgcggagt

SEQ ID NO: 25200 - DNA, 1370 bp, Zea mays
  Clone ID: LIB3732-008-F1_FLI
gtgggctcgccgtcgacggggccaggcggccgaacacatccttgacgaccgccgccgccctactcgcagcttcctgggtttcatcggatcctctgctagcgacgagcaccccctacaccaggccgttacttgggcgccggtgccatgcccggcgggtcttcgggtccagatggtgaagtggatgcaggatttgcgaagctccagggagaggatttcgagtattacatgcaaacgtactccatcatgctgggacgcaacagcaagaaatcaacagtggatgtggatctctcgagcctcggtgggggtatgaacatctcccgccaccacgcccggatattctacgacttccagcgccgcaggttcgcgctcgatgtcattggcaagaacgggtgccttgtcgagggcgtcctgcaccttccagggaacccccctgtcaagcttgactcgcaggatctgctgcagattggggacaagaagttctacttcctactgccaacacggtccatcttcgcttcggctgctgctcctcggcatgctcctattattccacagcagcttccccctccaccgtatgcacatgcacgggcaggccgccctcgtttgtccgagtttcatgaccgctccttcgaaggtgattatgggcgggaggttgatgagattgggaatggtatcagtgaaactgggatgaggggaaagctggtaaagaggaacaagaagtcttctggcgacttggatatctatggtgggcatagaatcaatgtggaaccaatagggacgctaggtgaagacagtagatcagaaataagatcaaggggtgacagggatattgacaaccaacaagcccttcaagcagaagagaaggatgttgtgtcatctgtggccacagtgttatctgatctctgtggccctggagaatggatgcccatggcaaaactccacaacgagcttcttgagcagttcggcaacgtgtggcaccccagcagggtccggaagtacctgacacaggacgactggtcgccgacggagaccaagggcaggccttggttcggccttctggcgcttctcaggaagtacccggagcactttgtcatcaacacgaggtccaagggcaggatgacctcggagttcgtctcgctggtctccttgctctcctagagggacggagagggcgtgttgtgtccagcccgtgtccagaagggtcggaggtgtactggctctcgtttgcttgccccttgctgtgtttcagcagctgttatatggacccaccctgttgtgctgtagtatctcgtgtggttgaggcagctgcactggtccgtgaccgtttctgtagcgtcggcagcagtgtatggaaagcatgcgttttaagtttt

SEQ ID NO: 25201 - DNA, 1365 bp, Zea mays
  Clone ID: LIB3732-008-H10_FLI
gtggccgccgtccgcgggcaggttccgggacgacatcgcgcggtcggtgatgaagcccatgatcgatttcctggagcggaccgggtcgtacctcaccgtgaacgcctacccgttcttcgcgtacgccgaggagccagacaagatctccctcgactacgccctggggaactccaacgccaccggcgtgcgcgaccccgtgaccgggctcgtgtaccacagcctcctggacgcccagctcgacgccacgtacttcgcgatggagaagctggggacgtccagatccagtgcgcgggggccaaaatccgtggcgccagcagcgcacgtttcggagagcgggtggccttccggcggcaaacccaaacgcggcggcaggccgcggccacgcccacgcggcggcgggaggcgtttggagttggagcaggctggaggtgaagcggcttcggtagccaacgcgcaagcgtacaacaactacctgatcaagcgcgtgctgtccggtgacacgggcaccccgtaccaccccgacgccgacatggacgtctacatcttctccctcttcaacgagaaccagaagggcgacggggcggacgacgtcgagcagcacttcgggctgttctacccgaaccggacgaaggtgtacgagttcgacttccggggcggcgcgctggtggccagctggtgcgtggcgaacgcgtccgccggggacgcgcggctgcaggcggcgctggagtacgcgtgcggccacggcgccgactgcggcgccatccagcccggcgcgccgtgcttcgagcccgacaccaggctcgcgcacgcctcgtatgcgttcaacagctactaccagcgcaacggccgggccaaggcggcgtgcgacttcgacggcgccgcctacgtcgtgtatcacgaaccagctggcacctgtgacccgaacgtgagctggtgcgtggcgaatgcggcggccggcgacgcgcggctgctggcagcgctgaactacgcgtgtgccaacggcgcggactgcggcgccatacagcccggcggagcgtgcttcgagcccaacaccgtggtcgcccacgcctcgtacgcgttcaacagctactaccagcggaaggggcggggcagcgggacgtgcgacttcgccggagccggttccgtggtctaccacgcgccaaagattattgggaagtgcgtcctcccgtcgaaagcttggattcaagaaacaacaacagtcaagtctagaggattcaagacaagttcggtttaacctcgtactaggaacgtagaataatgtaaacattggcatctgcacatcaggataactgatgtctttgtgttgctttgcttttcggacactcatgaaccatcgttcctgtt

SEQ ID NO: 25202 - DNA, 1295 bp, Zea mays
  Clone ID: LIB3732-009-D3_FLI
cacagaggctggctcattgtttcgccatgggactggaggcacggcttgcaggcacggggagccaggcgtaccagtcgctcatggcacaacacacttcggtcgtggaatttctcaaggcatatagcctttacatggcagccagctgcttcatgaaggtgaggttcatcttctccaacatgaccatttgcaatgccgtggcagggaggagcaagttgcacattgtggagtatggtgtgcagcatggattccagtatccaggtctgttccatctactagcaaggagggaaggtggaccgccagaggtgagggtcaccgcgattgctgtcccacaacccgggtttcgcccagcacaccagattgaagaaacaggccgccgtctcagcaacattgcccgtgagatgggtgtgccattcaagttccgcggtattgcagcaaagtgggaggccgtccgtgctaaggatctcaatattgatccagatgaggtgcttgctgtcaacagtgagtgctatatcggcaacttgatggacgagagtgttttggtggacagcccgagccctagggatacggtcctcaacaacatccgcgagatgcggcccaatgtgttcgtccacactgtcgtaaatggaacatatggtgcaccgttctttttgacacggttccgagaggcactcttcttcttctcggcacagtttgacatgatcgatgcaaccatccctagggacaataatgaacggctgctgatcgagcgggatatctttgggacatttgccctgaatgtgattgcttgtgagggtgcagacagggtggaacggcctgaaacttataagcaatggcaagtgcgaaaccacagggctgggctgaggcagctgccactgaatccagaggttgtcaaggcttccagggacaaggtcaagaactattatcacagagactttctcatcgatgaggataaccgttggttgctgcttgggtggaagggacgggtgctctatgccatgtcgacatgggttgctgaggataataagcccatcttttagtgtgcctgaatccaactgtagattatattgatattttgatcgaagggttatgttgaaccatgatccaccacatgttgtggttcagtggacttatgtttctagagagtttattgctgaaacctgtgaggtagaagcaattagatgcttagagctacataggctgtagatatagttcttgatatattcctgcagagttgtaatcatgtgccatgtacactagaattaaaaccctgcagctgacaagtggttacacgtttg

SEQ ID NO: 25203 - DNA, 1286 bp, Zea mays
  Clone ID: LIB3732-009-D7_FLI
taatggagtttccgcaccaccaccaccaccacggccatcgccgcgacgacgacgaagacgaccgcagaggcccgcctcccccggtctacggcggctacggccagccaccgccacccgacccgtacggccgcgcgcccgtcgaccccgatccgtacggtcgacctccgccccagtccgcgtacggtggggccggggacgcctacggccacagcggccaaggctacgcgcccccgccggcctacggcgccgggggcgggtacggcaacgtcgtccacgtcgcgcacgaggtcggcgacgagaggccttactacggcggcggcggcggcggtcttggtggcgcctacggaggcggtggctccgagtacggccacgagggccgaccgcaccacggcggcggcggatcccagtacggccacgagacacgcccgcaccacggcggcgggggcggcgccccgcctgtgaggcagcagacgtacaggatctactgcaaggctggggaggaccagtacagcctcgcctcccgcgacggcaaggtctgcctcgtgcgcacggaccgtgatgacgacgcgcagcactggatcaaggacatgaagtacagcaccagggtgaaggatgaggaaggctaccctgccatcgtcctcgtcaacaaagccactggagaggctctcaagcattcccttggccagtcacaccctgttcttctgacccgccataatccagactccctggacgagtctgtcctgtggacagagagcagggacgttggggatgggttccgctgcattaggatggtcaacaacatctacctgaactttgatgctttacatggagacaaggaccatggtggtgtgcgcgacgggacggcccttgtgctgtgggagtggtgcgagggagacaaccagcgctggaagattgttccctggtgaacaaggaaatgtgtgaccgagcccgcaccaaggaggagctcctgccgtaataagtgaagtgattggtactgaagtttctggaaataagaggctcttctgagatgcctgtttgtgtgagtatttgcgtttccattccgttttcatgataataaaacgcattgattattaatatatgtaatgtgatgctacactgagtggcagcgttggtatatatttgtaagaattaagaacccattgttgttggactaagcgtgacgagtgatgtactgatgtatgaacctttgcttgatgcatatgctcttctgctcctaccgtgggcttcgatgagtcgattatatatatgagtatcatgtttataat

SEQ ID NO: 25204 - DNA, 1175 bp, Zea mays
  Clone ID: LIB3732-010-F10_FLI
cctttgcaagtatagtctctctgctaagcgaagcgaagcttcaagctagtctcggcggctctagaagacgatgggcaaggacgacgtgatcgagagcggcgctggcggcggcgagttcgctgccaaggactacacggaccctcccccggcgccgctgatcgacgcggcggagctggggtcctggtcgctgtaccgcgccgtgatcgccgagttcatcgccacgctgctgttcctgtacatcacggtggccaccgtgatcgggtacaagcaccagacggacgcgtcggcgtcgggcgccgacgcggcgtgcggcggcgtgggcgtgctgggcatcgcctgggccttcggcggcatgatcttcgtcctcgtctactgcaccgccggcatctcggggggccacatcaaccccgccgtcaccttcggcctcttcctggcgcgcaaggtctccctggtgcgcgcgctgctctacatcgtggcgcagtgcctcggcgccatctgcggcgtcggcctcgtcaaggcgttccagagcgcctacttcgacaggtacggcggcggcgccaactcgctcgcctccggctactcccgcggcaccggcctcggcgccgagatcatcggcaccttcgtgctcgtctacaccgtcttctccgccaccgaccccaagcgcaacgcccgcgactcccacgtcccggttctggctcccctccccatcggcttcgccgtgttcatggtgcacctggccaccatccccgtcaccggcaccggcatcaacccggccaggagcctgggcgccgccgtcatctacaacaaggacaagccctgggacgaccactggatcttctgggtgggccccctcgtgggcgctgccatcgcggccttctaccaccagtacatcctccgggctggcgccatcaaggccctcggctccttcaggagcaacgcgtgatgagcggggcttggctgtggagcaatggcgggcgacctacgggcggggggccgtgagcgaggagaatgccatcattcatcgatcgacttgggtgccggtggttggttcgggtcgccttattttgtttcagcagctgctgcgttgcgcgcgtgcgtgagatttggtttggtttcgttcccctgcaatgtaatcatgtcgtgactctctcaagggattattccgctctgctctt

SEQ ID NO: 25205 - DNA, 1089 bp, Zea mays
  Clone ID: LIB3732-010-G2_FLI
gctcagttgcgttgtgggtgatccactcgttcttccctccacgcgccaaaaccccagccacggccatctcctcctccactcctcccgtagtcccgttcgtccacatccaaaagcttcctaggagaaaaaaagaacagttatttgcagcgggaaccctaacaaatcactcgctacaagcgagcgagggagagatgtctctccagtgcgtggcgcccccggtccgagcactcgccgtgctaccagcgccagccccccctcgccgccggacaaaccatgtgtccctataccttccgagccggcggccagggctcgccgtcgccccggtccgtgcggcggactcgtcctctccgcccaccgtgcccgcctccgcggccggcaaggctgtcgtcccggacgacgagttctccctcgccaaggtctctttcggtgtgatcgggctggggcttgggctctcgctcctgtcgtacggattcgggtcgtatttcaacctgcttcctggttcggagtggtcagctttgctgctaacctacgggtttcctctcacaatcatcggcatggccttgaagtatgcagaactgaaaccagtaccctgcataacctacgctgatgcctttgctctaagagaaaagtgtgctacccctattctgaagcaggtcaggagtgatgttacacgttttagatatggtgatgaacaacacttggatgaagcactgcagagaatctttcaatatggtttgggtgggggcattcctagacgtaatgcacctatattacaaaagattcgagaggaagtaactgacgatgggaaatacagtttagtactcgtatttcaagccaaagcattggagctatctgattttgagaagagacaggctaaattcacctccttttttggtcctgggattaaggcagaaatcgatgcaggaaaaggtggcggtgatctatatgaagttcgtctaatctcagacactgtttagaaacaatctttgtgaattttctctattacaaaactaaacttttttctttttttttctttgatccgctgattttgcatatatgatgttaatagcatcagattttacccttgtt

SEQ ID NO: 25206 - DNA, 1560 bp, Zea mays
  Clone ID: LIB3732-011-B6_FLI
catcgccaacgtgcaccagatcgccaggaggatggtggacgccggctttggccgcgagtgcgctgaggcctacgccgcggcgcgccgcggcttcgtcgacgagagcgttgcgcgcctcggcgtccgttcccgcaccgccgaggaggttcatgcctcaccctgggaggagcttgagttcgacatcgcccgctggatcccggcgttcaacatggtgtttcgcatactgattcccagtgagcgccgcctatgtgaccgcgttttcgacggcctcgcccccttcggcgatcttgccttcatcgccgccgtgcgtacccaggctctgcagctcatatcgttcggcgacgctatctcttcctcaagccgcgcgccggagcgccttttccgcgtcgttgacatgtacgaggctgtgcgtgacatcctccctgaccttgatcctgtgttctctgacccatactccgctgcactccgtgcggaggtctcctcgatgtgcaacacactggggtcctctatcaagggtatatttatggaattggaaaatctcatccgccgtgaccctgcccgaattgctgcccaaggtggcgtcatacatcctatcactcggtatgttatgaactatctccgagctgcgtgtggatcgcggcagacattggaagaggtgatggaaggtgactttggggctaatggaggtgcgcctgtggctgttgatcctgaccgtcccacatcatcccttgctgtgcacattgcttggatcatggatgttcttcaaaagaatctggatatgaagtctaagatataccgtgatccatctcttgcttctatcttcctgatgaataatggcaagtacatcatacacaaggtgaatgacagtgagttgggtgttttactcggtgatgagtggataaagcagatgacaaatagagttcgacgctggagcatggattatcagcgggcaacatggggcaaggttacaactgtgctgcaaagtggcactccaggcattggtggactcccagccaaggcaatgctgcagaaactgcgaatgtttaatacatattttgaggagatctatgcggcacagtcagaatgggtgatagcagatgaccagctaaaggttgacattagggcagcggtggaggagacagtgatgccagtttacgcctctttaattgccaagttaaagtcttctcctgaaactgggcgtgatttgtacatcaaatacaccccagaggatgttgtagcccacatccagcacttgtttgaaggagcagcaaagtgataaatgatatgtatccttgtagcctgttatactgcagcttctgctcttctgaacttgtgaagatgctaccatggattctccatttgtggttaatgtcttgtactcacatatggtgatgctgttgctcaaattacaactgtgcatcactgtttttgtcctccatgagtagcatgattattttgtaacaatattaggattccatatctgttttaagcactactttaatttaaccccattaagtgttatgtgtgcatttcaatatttaattcaataagtttgtgctc

SEQ ID NO: 25207 - DNA, 968 bp, Zea mays
  Clone ID: LIB3732-012-B1_FLI
cgcctccctttccccttccctccctccctctccccgcgggccgccagaggcaatttcgccctcgattcgaccccgattcgtccgcccgcgaccgggattccctccgccaagcgcggatctgaacgctgcgctccgtgtcgccgctcgaatccgccatgaagggggccaaatccaagggcgccgccaaggccgatgccaagctggcggtgaagagcaagggggcggagaagcccgccaagggcaggaaagggaaggccggcaaggaccccaacaagcctaagagggctcccagcgctttcttcgtgttcatggaggaatttcgcaaggagttcaaggagaagaaccctaagaacaagtctgtcgctgcggtggggaaagctgctggcgacaggtggaaatccctgagcgagtcggacaaggctccctatgtagccaaggctaacaagctcaagctcgagtacaacaaggccatcgctgcctacaacaagggcgagagcactgcagctaagaaggctcctgccaaggaggaagaggaggaagatgaagaggagtctgacaagtccaagtcggaggtcaatgacgaggatgatgaagagggtagtgaggaggatgaagatgatgacgagtgatggagctcctcgagacaatggaccgtgcttcatccaacaatggagcggctacacaaggccccgtggcgatcacaaaaaaggagcctatatccatgtactagaattattcagtttcactccacatcgtgatgttttatttttacttttgtcgtgctataacggatagcgctcctcgttggcgccactggcgggtggttctgcctctggtctggtgtgtttgtgtgtggtcacacttgccagccagcagaggcgcctgcttgtacctagattactgtttccattgtcgtcatcatcggctaacattgtcataatgtcagtttgggtaatgttagattaagt

SEQ ID NO: 25208 - DNA, 1828 bp, Zea mays
  Clone ID: LIB3732-012-D2_FLI
cggacctccgccgcctcgtctccgctccctcgcactcgcactcgcagctccggctgctattctgcagaagtcggtagattggttttcctcatgggtcgcaccatcaagaaggccaagaaggctcaatccaagaagtccaagaagaaaactgaatcgtcctcgtcgtccaaccctgcgattgcctctggtccggctaaggtctggcaaccgggtgtagatacactggaagatggggaggagctgcagtttgatcctcaggcttacaattatctccgaggttttggcattggctggtcttgcttgagttttgatgttgtgcgtgatcaacttggactcgtccgttcagagttccctcatacattctatggtgttgctggaacgcaggctgagaaagcttcatggaactatattggcgttttcaagctttctaacataagtggcaagaagcgggaacctataccagcttcagcagttgaagctgacactgatgtggatagtgacagcagcagcgatgaagaagatgaagagattaatgaggatacaaaacccatcctacatctaaaaaaggtggctcatgcggggtgtgtaaatcggatacgctcaatgactcaaaaaccacatataagtgctacgtggggagatactggtcatgttcaggtgtgggacttgagctcattccttaattctttagctgagtcagggacagctgcacccaaagaagacgacataatccacaaacacttacccctgaaagtatttagtggtcataaagatgagggatatgccattgattggagtccacttgttactggaagacttgtttctggcgactgcaataagtgcattcacctatgggagccgacttcaaacaactggaacgtagatgcaaacccatttgttggacactctgcaagtgttgaagatctacagtggagtcccacggaagccgacatatttgcctcatgttctgtggatggtacgatatcaatatgggatatacgtacagggaagaaaccttgtatttctgtcaaagctcatgaagccgatgtgaatgttatctcatggaacaagcttgctagctgcatgatagcttctgggtgcgatgatggcagtttctcagttcgtgatcttagatcaattgaggaggactcgttggtggcacattttgagtaccacaagaaagcaattacatctatcgagtggagtccacatgaagcatcatcattagctgtaacatctgaagatcatcaactaacaatctgggacctttcactggaaagagatgcggaggaggaggctgagttcagagcaaagatgaaggagcaggcaaacgcacctgaagatttgcccccacaacttctctttgctcatcagggccagagagacttgaaagaactgcactggcacccacagataccgtcgatgatcatatcaacggcaattgatggcttcaacgtgttgatgcctagcaacattgatacaaccattcctggcagcactgatgcagcaatgccatctgctgagccacagcactagccaacattgatacaagcattcctggcagccctgatgcaatgccatctgctgagccatagcactgatgtaggcgtttcttgtagcatggctcccagcttagaattccaggtctacgcagtggtgtatccgagtgcggttggcatttgtgttgagagtgctatgatgctatgtttgtgtttgagcatgatgggaaaggtttggttggctggcattccatgatatatgataagatttattaatatgtgcattctatgatatatgataagatttattaatatgttggcattctatt

SEQ ID NO: 25209 - DNA, 1473 bp, Zea mays
  Clone ID: LIB3732-012-E4_FLI
cccacattttccttccttccttccctcccgtcgccgcctgaaaccgcgacagcaagggtcgcacagagcaaggacgacgacgagaaggctcggttcggctcttcccagtctctccgagggagcaaggagaggatcggagggtgcgatggcgatcgaccacgagtccccgttcaaggagctccgcctcaagaaccgcaggatcatgggcggcggcggccctgaccctgagccggaggaggaggaggcggccacggcggcgtacgcggggcagtggccgcgctggctgcagccgctgctttcggcgcgcttcttcgcgcactgcaggacgcacggcgactcgcaccgcagcggcgagtgcaacatgttctgcctggactgctccgccgcgggtgcgggcgcgggcgcgcgcgccctgtgctcactgtgcctggcgcaggcccaccgcgaccaccacaccatccagatccggcgctcctcctaccacgacgtcatccgggtgtccgacatccagcgcttcatggacatcgccggcgtgcagacctacgtcatcaacagcgcccgcgtcgtcttcctcaacgagcggccccagcagcagaggcctggatgcaaggccgcgtcggcgtccgccaacctctgcgaggtgtgcgcccgtagcctcctcgacaacttccgcttctgctccctcggatgcaaggtcgtgggctgctcacccgacgccgccaaggccaggagctggctcctccggccggccgtcggtggcagcggcggcggcgacgacgactccacgtcgtcctcgccgctgcgcgacgcccagaagaggcagagcttcaccccgcccacgccgcagccggcgaagcgccgcaagggcatcccgcaccgcgcgccgttcggcagcttcatcgtcgagtactagctccctctctatccgtctccacggcggcggcggctgcattggcagtggcactacacagcacacgcgcggtaaagcagggaaaatatatatatactcttgaatgaaccaacggaattgagcagcacagagtgagtcagtgaattcaggtcatgtctgaatcaatccgccattacagggcaatgggactgggacggccaccacttccttttgccgtgacacactctggctggctggctggtggtgcttctcgaggtggatgccattcgctcgctgctggctttgctttccacaaagggagggggggaaagaaaggtggaggaagaatcaaaacactggcttttcatcactgttgctaggctctctgatatagaaatatatgtacatttttagcctttgttctgtttcaaatcatcatagtggagcattatagctagctagcttttttttactagattattcgtctgaagaaaagaaaccatggttcaggagatgaccagctagtgcaaggtacttactttatactagtaataagctatggtggtgggtgatttgtggtgctt

SEQ ID NO: 25210 - DNA, 1020 bp, Zea mays
  Clone ID: LIB3732-012-F1_FLI
acggtggtctttggctttcttccccttcttccaccttctgacgcacagcagctcttacttttcctcttctacatatgcgtagcaatctccatggaaaatctacgagctcttccttctaactaagcccgctcacctgatctggcgacatcgccaacatgccagcgtctactgcccaccgccgctaggattggcctaccacatacccctgattcttcgccttcgcctcccggcccagccactagccatgcgcatcgctcccacacggccacacccgagcgagcggtggacggaccaaggccgaccgggacagaggtcacaagctgcatccccaccgacctctgcatgattgtgtctacgactctgctttgatgcagcaggaagttagatccacactcgatgttgctaaagagtacatgaaagaaaacctacaactatatatgatgatgccatatggatgttgaatgatggatgcgatgaagctattggagctgcatgtgctgccttcggctttggtgtactttgcgtcgctctaaaatcacaggctttcatttctttgagtggacaccatatcagcagagaatgtgtttctgccatatactaatgcccacaaatatcgtttatcaaaaagtcgttgaagccatttattcccttgaaggttgaatgtggttctctccatattctccagatattcccatcctaccaggaggatcagccgtgaaactcaatgatggaattacaatttcaggaggatccttcgtctgtgctgcagaagtgtagaattctgatggatccattgtatcatatggtgtgttctgtagaattaggtatagatgtagttctatgttatgggtgattgcttgtggaataaaaatatttattttatttatggctagttttggcggggcatttgtgaggtcttggcgctgatgtgtattctaggcggcagcttttttacttttttggcgcgctaaggaatgtaacggcgtgagctgtaaataagcaaagggttctagtgggtcc

SEQ ID NO: 25211 - DNA, 685 bp, Zea mays
  Clone ID: LIB3732-012-G5_FLI
gggctttctttcctcaccaggaggacggcggggatgagatcaaggaagcagctgctgcccccaaagaatccgcccccgagggccagtaagacggatccgatctcccgacctgatgcgtgtctgctgatgtcggggagtttaccaggactgtgccgttcttgatttctgatagcttatcttctagtacacctcgtgttgttctcttcgtcacggcgccggtgcgcgtgcgctgaagctgcctgccattgccattgcctttgccgctgtttttaattaagcacacactctagatgttatgcccgcatgctatgtttcgattctcaagttgataaatgatggctggatgctggttttcgtgctccaagcctgctgcttcttccagggaaaaaaagacctgcccttgttgcagcgttgttgtttagaatgacctatatttgactggtattctgttacggtggctttgcaaagctgtttgtttggtttaatgtctcggaataatatgaattggctgcattggacgtgtgtgtttcttttaccatgtgtgtgtgtatgtgatctacggccgcaagcacacgcatcgcgcttttaggacgtgatgctgtgtgtgcctgttggcatctgatgcgcatatgcgtatggaccaggaatcatgcaggttcgatgcagactgggaataggcgattcc

SEQ ID NO: 25212 - DNA, 493 bp, Zea mays
  Clone ID: LIB3732-012-H3_FLI
gcacatacaaacacacgcacgcgcgcgcgcgcgcctcccgctgttccgcaaaacaaaggaaacgaaggagaggaggccatggcgccgagaacgtcagagaaaaccatggcaccggcggcggccgctgccacggggctcgcgctcagcgtcggcggcggcggcggggccggcggcccgcactacagaggcgtgaggaagcggccgtggggccggtacgcggcggagatccgcgacccggcgaagaagagccgggtgtggctcggcacctacgacacggccgaggacgccgcgcgggcctacgacgccgccgcgcgcgagtaccgcggcgccaaggccaagaccaacttcccttacccctcgtgcgtgcccctctccgcagccggttgccggagcagcaacagcagcaccgtcgagtccttcagcagcgacgcgcaggcgcccatgcaggccatgccgctcccgccgtcgctcgagctggacctgttccaccgcg

SEQ ID NO: 25213 - DNA, 736 bp, Zea mays
  Clone ID: LIB3732-012-H5_FLI
aaagcccacaccctcctccactccacctccaagggcgtgattgcagtagagcatctccttttctttatttgctatatatatgcatgttctgatcttcaagcagctcggccgatcaaacccatagcatcgccaccaaattaaaggtcttctctagatcattacatacacatatatatggggcctcagcaagacgggcggtcgtccacggcgaacggcggcacggcggcgaggcgcaaggaggccgccgcgaagcaggtggtgcggtaccgcgagtgccagcgcaaccacgcggcgtcagtcggcgggcacgccgtggacgggtgccgcgagttcatggcgtccagcgcggacggcacggcggcggcgctcacgtgcgccgcctgcgggtgccaccgcagcttccacaggcgcgaggtggcgacggcgacggagacggccgccgactgccgcgaccgcgcctccaccacctccgggtgaactcgacgatgagtcgtgaggtgagacgatcgactaggatcacgcacggcacgcgtgatgggcattggaatggtcgttgttgcagtagttgttcttggatgattttttgagtggatttttattgcgtgtactatactatatgctcgatgcaattaacagcatgcgtgtggatcgccgctcgtaaatacgtacgatgcttgtaactgatgattgtggaccgtggacgtgtatataaataaagtgagtggttcttccattc

SEQ ID NO: 25214 - DNA, 1516 bp, Zea mays
  Clone ID: LIB3732-013-A8_FLI
ctcgtccccgcctgccattcgcgagcatccaaagctgtagttgctgcaaagctctcgcaaaatcctactcccaccgccgactcgaacagtcgaacctcggctcccctcctccccaatccgtcatcttccttctacacttgtttctgcgggagcgggagagaaggcaccagggaggccgcccccgtcacccatagccaaagtcacgcgccaccaaactttgttctctcacccagtcgctttcgcgttcagcgcgagccgagcccagccggtgggtcggtcgctgaaggcggagccataaaggcgtcggcgacggcaggatgatgagcggcagatcgggcggcagggacggcgaggcggccggccccgtcatcaggatcagggtttcccacggagccaccttccgcgaggtcgtcgtgccggcgcaggctaccttcggtgagttgaagaggatccttgttcagactactggcttggagcctgagaggcagaggctcttcttccgtgggaaggagaagagtgacagagagttcctccacgcggcaggtgttaaggatggcgcgaagttgcttctgcttgagaagccttcccctgccaacatagagcagaaggttgagcctgtgattatggatgagagcgtgatgaaggcatgtgaggctgttgctcgtgttagagctgaagttgataggctgtctgctaaggtgtgtgacttggagaagaatgtgcttgcagggagaaaagttgatgataaagaatttgtcgtcttgacggaactgcttatgatacagctgctgaaactcgatggcatcgaagctgaaggagaagcaagggcacagaggaaggctgaggtccgccgagtccagtcccttgtggagaccttggataagctgaaggcaagaaatgcgaaccctttcagcgatcataacaacgctgtttcagtgacgacgcagtgggagacgtttgagaacggtatgggcagcttcagcgctcccccgccccacgttccttcagagcaagttaacactgactgggagcagttcgactaggctcagctgaagctgttgatgtatcgtgagatcggtatgggcattccttttcccaggcagcgaggtgttttgtgtatatgcaccgcgtttggtgcctttggtgtcctaactgcctgtgaatgttaccagatcataccatactaccatgtgaattgcattgcaccgctcaacgctcattgagggccatgtttcgatatgctcctgccaatgccattcgcatgatatttattggctaggttcagcaaggttggtggtaacggccctggccagatccctttacagcagtagctcatccgtgaatgcaattgaatcagtcatgtacacgttgacgctgtagctgttccgaaagtcctgtacagcactagctcatcggcgaatgcatctgtaccatgtacacgctgacgctgtagctgcatttgtagtgcccctttgtaatgcaggaatttaagagaaattatacaggaatttcacag

SEQ ID NO: 25215 - DNA, 1480 bp, Zea mays
  Clone ID: LIB3732-013-C1_FLI
ctgtgagcgagacagccaaggtgctcatcgactccagccagccgcccaaaaagccaggcgcaaatcacaacctcgcctcctgtcccctccccggctcctcgttcccctctcgccgctcgcctccccgccgagatcgaggaggcgccaatagcgagagggtttcctcttccctccacggctccaacgagcccccggcccctccgcctcaaatcccacgcgcccggttggccgccgcccccgccatggatgtggatctgtggatctccaaggtcaaggaaggccagcacctcgccgagcacgagcttcagtctctctgcgaatacgtaaaggagatcctcatcgaagagtcgaacgttcaaccggtgaatagccctgtgacggtttgcggtgacatccatgggcagttccatgacctgatgaagctcttcgcgacggggggccacgtcccagagacgaactatattttcatgggtgattttgtggaccgtggcttcaacagtctggaggttttcaccatcctattgctactaaaagcgaggtatcctgcacacataacccttctgcgtggaaatcatgaaagtaggcagttgacacaggtgtatggtttctatgatgagtgtcagaggaagtatggcaacgccaatgcatggcggtattgcactgatgtttttgattaccttacgctatcagcaatcattaatggtcaagtcctctgtgttcatggcggtctttctcctgatgtacgtactattgatcagaatgcttatcatcaatgaactagcattgctgactcattttttgaagaatactgagcacatgattctggggttgatttgatacgaacaattgatcgcaattgtgaaattccccatgaaggtcctttctgcgaccttatgtggagtgaccctgaggagatagagacatgggctgttagtccccgtggagcaggttggctgtttggatcgcgcgtcacagcagagttcaactttgttaacggtatcgagctagtttgccgggctcaccagctggtccaggaaggcttaaagtacatgttccaggagaagggccttgtcactgtgtggtctgcacctaattattgctacagatgtggcaatgtcgcttctatcttaagcttcgatgagaagatggaaagggatgtcaagttcttcacagagacagaggagaacaaccagatgcgaggcccaaggaccgcagtcccatttcctatgacttcaattgtacaattttagaagtctattcgaatctgtaagggctaaagatcaatcagatgtgtttattgctttaggtccagattatagtgcaatctgatgcgtttgatttctgttttcctttaaccacatgtacaatagaccatcgggacagtcatatgttcctgtatctcttcggtgacactgccaaagttttgtttgtgattttgttcccgtgctatccattttggactgtgcttgcgttgtgcagc

SEQ ID NO: 25216 - DNA, 1369 bp, Zea mays
  Clone ID: LIB3732-013-C7_FLI
gcgtccccgtgcacgcccggcctcgccttcccttccccgatatctcttcgtctcgccgccgccgcgcgcgcactctcgtgtgacgtgtcccagcagtccgtccagtccctggcttctctcccccttgttgctcttggctccgcgatggcggtgggttgcttcaaccacgtgctctcgccgcttgttccttcgccgccgggtaggcgcgtccgagcggcgctgcggtgccggtggcatcgtcacccgctgaccgcggtctccctccggcggctcccgtgcggcgcggcagctggtcgtggcacgcggcggctcgcggcggcggcagagtcgcaggccgtgcaggagcagccggcgcgggccgaagaggccggcggggcgggtgccgctgaggcgtcctccaagctggttctggtcgttggcggaaccggcggcgtcgggcagttggttgtagcatcattgctgagcaggaacatcaagtcaaggttgctcctaagagatccagaaaaggcgttgtccctgtttggcaagcaggatgagaatctactgcaggtttacaaagcggacacaagaaaccctaatgatttggatccacagatgtttgagggagttacgcatgtgatatgttgtactggaactacatcatttccgtctaagcgctgggatggagataacactccagaacgtgtagattgggatggcatcagaaatcttgtcagtgccttgccacagacagtcaagagactggttcttgtgtcatccattggtgttacaaaatacaatgagataccatggagcatcatgaatctctttggtgtgcttaagtacaagaagatgggagaagactttgtctgcaattcagggataccattcacgattattagggctggaagattgacagacgggccctacacttcgtatgatcttaatacacttcttaaagctacagctggagagcgacgagcagtagtcataggcaaaggtgacaagcttgtgggggaagttagcagacttgtggtagcagaagcttgtatccaagctttagatattgaatccactgaaggacaaatatatgagattaactcagttaagggtgaagggcccggaactgacccagagaaatgggaggagctattcagatctgctcggtcagactagtggcattctgcaaagcgtagtaacgtaatgtaggaatatgcatcgtaatacaatgtaatccatagagtgcagccctaattcaatagtcactgaacagtagcgatcatgtagagaatgtttggtttgtgtacatagtatgagcattcagatatgacgattatacctcctaaaagtgatagtttttgttggaaagtaaaatgttcagtgttatcct

SEQ ID NO: 25217 - DNA, 1780 bp, Zea mays
  Clone ID: LIB3732-013-E2_FLI
ggggaaggggagtacggacacgatggaagccgactctgggaagctcttcgtcggcggcatctcgtgggagacggacgaggatcgcctccgcgagtacttcggtcgcttcggcgacgtcaccgaggccgttatcatgcgggaccgcaacaccggccgcgcccgtgggttcgggttcgtcgtcttcgccgactctgggatcgccgagcgcgtcaccatggagaagcatatgatcgacggccgcatggtggaagcaaagaaggccgttcccagggacgaccaaagtattgcgagcaagaacaatagcagcatagggtcacctggaccaggacgtactagaaagatctttgttgggggtctggcttcaaatgttaccgaggtcgaattcagaaggtactttgagcaattcggtgtgataaccgatgtggtggtgatgtatgaccacaatacgcagaggcccaggggctttggtttcatcacatatgactcagaagacgcagtggataaggcactgcacaagaacttccatgagctcaatggtaaaatggttgaggtcaagagggctgtaccaaaggagcagtctcctggacctattgcacgttcacctgcaggggggcagaactatgctatgagcagggttcataactttctaaatggttttaaccagggttacaacccgaacccccttggtggttatggcatgcgggtggatgcaaggtatggtctccttgcaggtgcacggaatgggttctcttcgtttggtccaggttatggaatgggcatgagcgttgaaggtggaatgcgtggatattttggtgcaagttctggtttcgtcaatagctccaatgggcggcaaataggttcttactttaatggtagttcaaaccgattaggtagtccaattgggtatgttggccttaacgatgattcaggatcaatactgagttcaatgtctagaaatgtctggggtaatggaaatctgaactacataggcaaccatacaaacatgaattcttttcctcaacctggaagtggtgggggtatttctggtgatgaaattagttggggaagccttacttctgctcatgggatgagcaacatttcaagccttggatcgggaaaccttggccgtggaaccggagataacaactttggcttgccttctggaaactatgttaggagcaactcaactggtacaattggtgagccattttctgcatcagccaatgcatatgaatcgaacaatccaggtgcatatggcagcagctctatttatggtgactcaacctggaggttcaactcatctgaggttgatatgcctccttttggtcatgatcttggaaatgatgatccagatatcaaatcagaaatatcagcaagctatatgggcaactatactgttaataacaatcagacaagcagaggtatcacttcctagggagagtactattatattcatatatgacttgggataggtgaaacacccactactatatcaggctttcaggtgcatgactgtgaattggtgatgtcagattaatatacaggttagttgcttgtttctaggtaaccagaggtgtggtttacaacaccaaaatgctagaggagccgatacaaacattttagtttaatttctacatctattaggccttttgttttttgaatgagatgtgcagtgttgattgcggcacatacttagaagtgttccaacataagctggaattctgtcatacggaaggataaacttgtataccaagggaatgctgtattattatctttgccc

SEQ ID NO: 25218 - DNA, 1761 bp, Zea mays
  Clone ID: LIB3732-013-G3_FLI
gtgcttcttctagtccttggatattctgttaaatagtagtgtatgtgtattggttaggcagcggaagctcttggagctattggcctggaaaagagcatccctgtgttggaggaaagtctaacaactgatcctgctgtggaggtccaagaaacttgcgagctggcactaagacgaatagaggagaataagaaagttaatggggctgagagtacaaccacttcaccctttctctcagttgatccagcgctgccttcaaagcatgggctttcagtagatcaattaaggtattatttacaactttcaaaggattcttacatgtgttgattgtatcctatgcctacagcctttccgttgtcaacatggtggatgtttttcaggggccttcttctcaatgagcaagagagcatgtaccaacgttatgcagctctttttgcgcttaggaatgatggtggagatgctgctgtttctgctattgttgcagctctgagtgtcaaaagtgctcttctacgtcatgaggtttcttcaaaatttagctcatccttgttgtcatctttttttatacaattgtaaatcaagcaaccaacaatgtatcgtttgaatgtttttctcaaaaattattctgagctccaatggaatttttttgttgccttgtaacttgtttctttaggttctggcagtctagattattatttggcatttacactttaaaattttgagtttgcataaaaaaatacaacaaactggcataataaattgaaatggagttaagatttgagcacaaacctgagcagccttgcagctatttctttttaatatatgatgtcacatgtcagttgtttgtcagtcttgttatgtacttatgttagattggacaatatccagttacaacctcttagtttatggccagtaggatcctcaagaaatttgaccgttatatttatttagtaatggagtgggagtttgatgtttccctttctgaaaagaaacatagtaacgaaaaatcaggttaggataataggattggtggtgtgaaactgcttcagatctagtctgcacattggctgatacaccgaggtcataacatcatattcctagcaagaaattaagtagtttttttataaaaatttttttgcattacaatgcctttggttttatatccaatataacacttttttcctgggtattattcggcaggttgcttatgtgttaggtcagctgcaaaacaaagccgcttcagatgcgctttctacagtcctgaaggatgtctgtgagcatccaatggtcaggcatgaagctgctgaagcccttggctcaatcgcagaccaagaaagcattgcccttttggaggagtttgcaaaggatcctgagcccatagtctcgcagagctgtgaagtagctctcagtatgctcgagtatgagagatcggggaaatcctttgagtttctcttccttcagactcctcatgtgcagtcctaggttcctcttcgtcgatgatcactcaatgcgaagtgactgaaagcttcttgtattggttaatgtgactggaccagccatatatccactggctttgatgatactctttatcctgataggatctgttttttttttttttggttaatcgtgatatggaggttgaaacacggagcagcatgaaaacaaatggaaaagaaaccatgaaaactatgaagacttataaatttcgacaaaagaatacatgtaaactaggtcagtggatggtttcggcaattatacactcgcagc

SEQ ID NO: 25219 - DNA, 1317 bp, Zea mays
  Clone ID: LIB3732-015-B8_FLI
ggagctggcgagtactcggcatggcagatgctagttcaaggactgacacctcgactgttttagacatggatgataagaatcaaaggttagaaaatggacagagtggagctatggccctggcttcgaattcatctgatcggtctgacagatctgacaaacctatggaccaaaaggttttacgacggcttgcccaaaatcgtgaggcagcaaggaaaagtcggctgaggaaaaaggcatatgtgcaacaactagagagcagcaagctaaaacttgcaagcctggagcaagaactccagaaagctcgacaacagggaatcttcatatccagttctggagatcaaactcatgctatgagtggaaatggagctatgaccttcgatttagaatattctcgatggcaagaggaagaaaataagcagataaatgagctgaggactgcagtaaatgctcatgcaagtgaaagtgacctccgtcttatcgtcgatgggataatggcacattatgatgagatattcaggctgaagggtattgctgcaaaggctgatgtgttccatatactttcaggcatgtggaaaacacctgctgaaaggtgcttcttgtggcttgggggtttccgttcgtctgagcttctaaagctccttgtgaatcagcttgagcctctaactgagcagcaattgatggggctatccaatctccagcaatcctcccagcaggctgaggatgcattgtcacaaggcatggaagcattgcagcaatccttggcagaaacgctggctgggtcccttggtccatcaggatcttccggaaacgtcgcaaactatatgggtcaaatggctatggccatgggaaaacttggcacactcgagaatttccttcgtcaggctgacaatctacgacagcagaccttgcatcagatgcagcgcatcctgacaattcgacaagccgctcgcgcgcttcttgcaatacacgactacttttcacgtctacgcgccctgagttctctttggcttgctaggccgcgagagtagcatcacccacgttggagtcactccatgggccgatctgtgaatgtggggctgctggctgcaaactcgcaacgcatttgcagatggctggagggtcagttctctctgtacaagttgtattaacatcttctggtctcatattgcgcttcagtgttgtacaagttagggtaaagcttgcatttaacttgtaagttatcatggattcatgattgacatattgtacaattatattagcaataagaatagaagtacataaatgctggaaggactatccagcgtctatattggttgg

SEQ ID NO: 25220 - DNA, 1388 bp, Zea mays
  Clone ID: LIB3732-015-D12_FLI
gagatgtaaccatccaatgcttcatcaaaagggataaatctactcaaacctactacttgtatctgtgccttagcacagctgtgcttgttgaaagtggcaagttcctcctatgtgcgaaacggacctcccgcccaacctgtacagaatatacaatatttatgaattctgaaaatttatctaggtcaagcaaaatgtacattggaaagctgaggtcgaatctcctcggcacaaagtttgcaatatatgatacccagcccccatgcaatgcagcagaacccgggaaaacaagccgtcggttctactcccggaaggtgtcgccaaaggtctcctccagcacctacaacatagcgcaggtttcatatgagctgaatgtgttgggtactcggggccctaggcggatgaactgtgttatgcactccatccctacctcgtgccttgaggctggtggcactgttcccagccagctggacagcatccttgctcgctctactgatgagtcatttggcagcatttccttctccaagtcatctgttgtggaccggtctatgcgtttcagcagctcaagattctccgacatctcaatgagcagcagccgcaggattggagacacggcatcgggagacaatgatgagtgcaaggagaggccattgattctccggaacaaggccccaaggtggcacgagcagctgcagtgctggtgcctcaatttcaggggcagggtgacagtcgcatctgtgaagaacttccagctcgttgctgccacgcagcccgctgctggagcaccaaccccatcacaggctaccccagtgccgccgcccgagcacgagaaggtgatcctgcaatttgggaaggtggctaaggacatgttcaccatggactaccgttacccactgtcagccttccaggccttcgcgatctgcctgagcagcttcgacaccaagctggcctgcgaatgaagccaccagtcatggctcaaagtcaaggacgatctgtctgtttcacgaagacggtggccccaaattttgctgggccaccattctgttgtatgttgttgatgccttcttaacttacctaggaagctgcgtttagacattttgcacctgatctacagctgctgctgtgtttctgtcctgatcgcattgttttccatagctttgctctgtggagcggcaacttgatctgccctgcccttaactagccggcaggtttattaatttggttttccatactatggttgtattaactgagaagagactccgacactttcgttgtgcctacctaagttctgtctgcctttgccctctgggatatgcaaatgtgcatcttgtaaaatttctgaattgcttttgtggcaagtcatagtaataaaagaactagcttccattcac

SEQ ID NO: 25221 - DNA, 959 bp, Zea mays
  Clone ID: LIB3732-015-D2_FLI
ggagattaaagcattcaatcttcatgctgttttcaaagaagtgatgggtttcattaaaccaattgcatctatcaagaggctatctgtatcggttatgttggcaccagatctgccgttatgtgcaattggtgatgaaaagagactcatgcaaactattctgaacatctctggcaatgctgtaaagtttaccaaggagggacacatcacgcttgtagcttccattgtgaaggctgactctttgagagagttcagaaccccagaatttcatccaactgcaagtgatgaacatttctatttgaaagttcaggtaaaagatacaggctgtggagttagtcctcaggatctacctcatgtattcacaaagtttgctcatcctcaaagtggaggaaaccgagggtttaatggtagtggtcttggccttgccatatgcaagaggtttgttagtcttatgggagggcacatctggatcgacagcgaaggaaccggaagaggttgcaccgcaacattcgtcatcaagctcggcgtgtgtgacaacacaaacacctaccagcagcagctggttcctctagtctggccaagcagtgcagactccaatttgtctgctccgaaagtgctgcccgacgggagaggatctgtttccctgaaatctcggtaccaaagaagcgtatgagctcagtgtaaatgattgacggcatagtgccaagtaggggatcgattagtgccattgtctaattttgtttgtaacccagtcatagcaacatatagtgtacaaataatgtaaagccaatggagactgcagctgtgtatctgggtagcaacgctgacttgctgcattgagtagtatgtcctaccagcggattgaattgcttgttttggggtgtgcggcgcgcgccccgttgattgttctgttgtaacttgtaatcccatattaatcgtgtaatatgaaattcaatgcaaat

SEQ ID NO: 25222 - DNA, 1819 bp, Zea mays
  Clone ID: LIB3732-015-E4_FLI
gggatcaccgcgagagaggaggctgagccgcggaggagcagcggcgcatcgcaacactaaccaaaggtgccgagccagggtgactgttccgaggagcgtggcgtggacccatggggaagaagggcaagtggttcggcgccgtcaagaaggtcttcagccccgaatccaaggagaagaaagaggagaggctaaggaggaaatcagcagctagcaacccagcaccggtagatctgaccccatctacctccctggaagtcaatgtttcggtgccaccccctccggctcctcctccagttcctcgccagaccgacgaggtcagggtccccgaagccgagcaggagcagagcaagcatgtcaccctggaggaggcccctgctgctgctgctgccccagcacaggcgtcggtgctgccacctggtgcgccaaccgaagagctcgccgcaatcaagatccagaccgccttccgaggttacctggcaaggagggcactaagagcactacgaggccttgtacgattgaagtcattggttgagggtaattcagttaagcgtcaatctgcaagcactctgcgctgtatgcaaactctatcgcgggtgcagtcacaaatacgatctaggagagcaaagatgtccgaggagaaccaggccctccaacgccagctcctacttaaacaggaactggagaatttcagaatgggtgagaactgggacgacagcactcaatccaaggagcaaatcgaggcaagcctaataagcaggcaagaggcagcgataagaagagaaagagctcttgcatatgcattttcacatcagtggaagagcacatcaagatctgcgaacccaatgtttgtagacccaaataacttgcagtggggctggagctggttggagcgctggatggcagcaaaaccttgggagggacgcaatgggaccgacaaggagagcaacattgatcgcggctccgtcaagaatatgagcttgaaccttggagttggagagggtgagatcacaaaagctttcaaccgccgggactcaaagccagagaagccatcaccaccgactccaaaaccggcccgtccagcttccaggcaatccccttcgacgccctctgctagagtggccccaatacctgcgaggaggaaatccagcacgccaaagaatgggctttcacaggtggacgatgacgtgaggagcgtgctcagtgtgcagtctgagcgaccaaggaggcacagcatagccacgacgtcgaccatgcgggacgatgagagcctcgcgagctccccgtcgctcccgagctacatggttcccacagaatctgcgagggccaaatctcgcacagcaacggccaatggcgcagagacgcctgagaaaggaggctctgctggaccagtcaagaagaggttgtctttccaaggtggagctgcggctgcctcaccgatgcgacggcattctggccctcccaaggtggagagcgctgtgaaggacattgctgcgccaccacagcctgaggccttggtagccaatggtggtggaagcaagtgacttgtattgacaagttccaggatgggggagcgggttatggtcttatggagggacatgtttcatccgtgaacagaagttaagagtggtgccggatctacgaatggtttgaattgttttcccgttacaaccacattgtttgctgtataagattcactgtacctgccagttggttccatttgttgttttctgtaaaacaaacatcaatttgtcactagaatctgtgatgcttgtatgtaaacaggtcctctatttatgtgagccatatatttcattttcag

SEQ ID NO: 25223 - DNA, 1270 bp, Zea mays
  Clone ID: LIB3732-016-B12_FLI
gggagtcgagacaaagggagccagagttagtcccggcgccgtgtcgcgagcggaaggagaaggactgaaggaggcgacgatgcaggtgaagcagaaggtctacgagttctacaaaggcacggtggagcgggtcacggccccgcgcaccgtctccgcgttcctcgagaagggcgtcctctccgtccccgagttcattctcgccggcgacaacctcgtcgccaagtgccccacctggtcctgggaagcgggcgatccaagcaagaggaagccgtatctccccgccaataagcagttcctcgtcacccgtaatgtgccctgtttaagacgtgccatctcggttgaggaagagtatgatgcagcaggagcagaggtggttctcgatgaggatggcgaaggctggcttgcaacacatggagtgcaagcatcaaagacagaagaggaggaagacattccctctatggacaccttggacatagggagatctgatggaataaagtctatcccctcttactttagcggtggcaaggatgaagaggaggaagatatacctgacatggatacttatgaagacacaggggataatttggctgctgctgaaccatcatactttatcgcagaagaaccagaagatgacaacattcttcataccagaacatatgatgttagcataacgtatgacaagtactaccaaactccacgtgtctggctaactggatatgacgagtcaagaatgccattaatgcctgaacttgtgtttgaagacatcagccaagaccacgcacgaaaaacggtgactattgaggaccatcctcacttattggctgggaagcatgcatcagtgcacccatgcaaacatgcagctgtgatgaaaaagatcatcgacgttccaatgtcggggggagtggaaccagaagttgacaagtaccttttcatatttttgaaattcatagcgacagtcataccgactattgagtacgattatacaatggacgtcgaccttggcagtacaagctgattattggttggcttgaagcttgtcacttgtctcgggaaaaggaagcaccctaccagaaggcgcaggaagaaggctgaattgcgtgtttgtggttgaacatttgtgcatatgtgcttgttccttggatcggtttgcatttgtgaacaaactctgaaaagctcaaaggcaagacccatcttgtacattctgtgacgctgtcagcttgtgaatccattcgttaatataaatctcaacaacccgttcggcgtgcgtggg

SEQ ID NO: 25224 - DNA, 1084 bp, Zea mays
  Clone ID: LIB3732-016-F3_FLI
aaagagtatcctgacaggatacttatcggttcaattatggaggagtacaacaaagctgcatggcatgagcttattgaacgtgttgaagagtctggagtggatgctcttgaaattaatttctcatgtccacatggcatgccagagagaaaaatgggtgccgctgtggggcaagattgtgatttgctagaggaagtttgtggttggattaatgagaaggccactgttcctgtttgggcaaagatgactcctaacattacagacattacacagcctgcaagaatatctcttaagtctggatgtgaagagtttctgcaattaacacaattatgagtgtaatggggattaatctcaaaacactgcgtccggaaccttgtgttgaagggtattctacacctgggggttattctgcaagagctgtgcaccctatagcacttgctaaagtcatgcagatagcaaggatgatgaaagaagagtttgctgatggacagtctctctctgccattggtggtgtggagactggcaatgatgctgctgagtttattcttcttggtgctgatacagtacaggtatgtaccggtgtgatgattcatggttatccccttgtgaagaagctttgcgcagagttacaggatttcatgagagagcacaacttttcatcaattgaagagtttcgaggggcctcgcttccgtatttcacgacgcacacagatctggttcaccggcaacaagaggcggtcaggcagaggaaggccatcaagaagggccttcaatcagacaaggaatggacgggtgatgggttcgtcaaggagaccgaaagcatggtatccaactgatgcatctctgccaccccccaccgggccattccctccaccatgctccaacttcatctttttaataaacgcgcaccagaaatgccacacaccaagcatctagtcctcatctgtacatggttctgaaccttgggccttcagtctatagaacaggccatgaatccacacaaagtcgtgacaaccgggtgacattgagcgatatatttgtcatgtgaacattaatttgtagcactgagctgagggcttgaccttgt

SEQ ID NO: 25225 - DNA, 976 bp, Zea mays
  Clone ID: LIB3732-016-F6_FLI
tcgtggtgctgggcgtggccgccgcggcgtcggcgcagggcccgacggcggcgccaacgacgcccacgccggcaacccccgcggcgcccgcgcccgcgacggcgtccagcaacatcacgggcgtgctggccaaggccgggcagttcaacaccttcatccggctgctcaagtccacgggcgtggcgtcgcagatcgacaaccaggtcgccaacggcgggaacggggtcacggtgttcgcgcccacggacaacgcgttccagtcgctgccctcgggcacgctcaactcgctgtcggaccaggacaagaacgcgctggtgcagtaccacgtggtgtccaccgccatccccatgtcgcagttcgacaccgtcagcaacccgctccgcacgcaggccggcagcgcctcgccgggggagttcccactcaacgtcacctcctccgagggccagcaggtcaacgtcaccacgggcgtcgtcaccgccaccgtcgacaactccctctactcgggcgacagcctcgtcgtctaccaggtcaacaaggtgctgctccccatgaagctcttcggcgccgcggaggcgcccgcgcccgcgccgctcgcgccggccaagaagaagggcaagacgccggcggccgtcgccgactcgcccgacgcggcggaggcgtccccggacgccacgaccacgtcgctcgcgcccgcgaggctgacgcggggtggcctcgccacggctcttgcgctcgccggcgtttggtgggggctgtagtcacggcgaggagtgtctcgtcaggtctctccggtggccgtgacatctatactttttttttcgttcgcgggtcttgtttgtcttttcgtttttactttattgcccatttttggatgaattgttcttccctgtcattcaaattgctaggagtatgtcatgtcatgtaacgtccttgtcccatttttatgtaatgttaactaaataaatatgagttgtgt

SEQ ID NO: 25226 - DNA, 335 bp, Zea mays
  Clone ID: LIB3732-017-H10_FLI
gactagttcatcaatcaacgaggttttctttttctctttttgggttttcgatggaattgtttttgtccgtccgtccatgcaaccaagaaagaaaagaaatttccaaggcccatggagaatctgtacaaaagagtggctacgtgcaagaggagcgttgagtctgtgagcaggaccaagcagcagcagcagctaggttgttcagtcaggcagtggatgagctgtgtgtgtgagagagagacatctatttgtggcgttttcccttttttcccccttttctctcctgattattgtatgttgtaatatcctgctgtgattgaaatgaaatcaagctgtat

SEQ ID NO: 25227 - DNA, 1037 bp, Zea mays
  Clone ID: LIB3732-018-E7_FLI
caacgccacagcttgcgcccgcaatggcactcgtctccgcctcctcgtcctccaccaccgccgtcacggcgctccccaggaatgggcagcgggcgtcgtcctccttcctcggcggcaagacgctgctgagacaggccgaggcggcccggccgtcgttcgccgtgcgcgccgcggcggaccccaacaggccgatctggttccccggcagcacccctccgccgtggctcgacggcagccttcccggcgacttcggctttgatccctggggcctcggatctgacccggagagcctgcggtggaacgtgcaggcggagctggtgcactgccggtgggcgatgctcggcgcggcgggcatcttcatcccggagttcctgaccaagatcggcgtcctcaacacgcccttctggtacaccgccggcgagcagcagtacttcaccgacaccaccaccctcttcatcatcgagctcatcctcatcggctgggccgagggccgccgctgggctgacatcatcaagcccggaagcgtcaacaccgaccccatcttccccagcaacaagctcaccggcaccgacgtcgggtaccctggtggcctctggtttgacccgctcggctggggcagcggctcgccggagaagatcaaggagctgcgcaccaaggagatcaagaacggacgcctcgccatgctcgccgtcatgggcgcctggttccaggccgagtacaccggcaccggccccatcgacaacctcttcgcccacctcgccgaccctggccacgccaccatcttccaggccttcacccccaaatgaggagttgaacttattattagcattttgaggagtgctaccacacatgcatcgtcaggttgatggccgatatatatgaaacttcacattttttttggtggggaaggactgctgagtagactgtcaatgatggaatgctcgtggtgcgagtgcgatgcatggtgtacttgtactatgttgtaaccagtgtaaaaaggggatactcgttagatgttatgccatgttcactgaatc

SEQ ID NO: 25228 - DNA, 1158 bp, Zea mays
  Clone ID: LIB3732-019-A7_FLI
aaggcgaagccctagccccctccctgccgcggacgccgatggacccacctcgcgccgtcgcctttcttctcatactcctgcccgtgctcgccccggtggcctccggtgtacctttcgtcgtcctacacgggattggcgacgagtgcgggaacgatgggctgtcatccttcaccaagatgcttggggagtggtcaggctccaagggttactgcattgaaattggaagaggagcatgggactcttggttaatgccacttcaagagcaggcaaatacggtttgtaagaaggtcaagaaaatgaaagagctcagtgaaggttacaatatagttggcctgtctcaggggaacttaattggcagggctgtaatcgagtactgtgattgtggacctccgtctgggtttctttgtattcttattgatgatctgattaaatcagagatatattcagactatgtgcaggcgcatcttgcccctagtggttacctaaagatacccactgatatggaagattatttgaagggttgcaaatttcttccaaaacttaacaatgagatcccaagtgcaagaaatactacctataaagaaagattcagcagcttggaaaacttggtactgatcatgtttgaggacgatgcagtattaatacctcgggaaacagcgtggtttggttattaccctgatggagcctttagcccagtgctgccccctcaagagacgaagctgtatacagaagattggattggcttgaagaccctggacgaggctgggcgtgttaaattcgtgtctgtgccaggaggtcacctgcgtatcaccagaagcgacatgaagaagtacattgtgccttacttgacgccggaggcgtcatccaagaagaacatacacatacaccggatgctgtcgctttgagcgagtatctaacaaggtttgtatcggtggccattgtgccctgacacgtgggccatgtgttgacgccttgtaaatacgctgaacacgaagggaggaaatgatagctccttggaagagtggatccgaacttgtgaagtgaagcgtgtttggtcctttccgtttcctatctgacaaacaaatatgtccatgccgtggccacaacacgcataaatcattatgcacatttcctattgagtaaaatacaattccggtc

SEQ ID NO: 25229 - DNA, 1189 bp, Zea mays
  Clone ID: LIB3732-019-B11_FLI
cacatcttcctcgcagcgccggcgctccatcttccgctccctcccccaccttcgatcggcacgcaggctcggcgtcgtcgtcagcggttcctcctcccgcctctcgccagtagcctcgcgccctcgccgactggcgaccctgccttgaaggggctggcaagatgatcggcgtagggaaggcgaagcagtacgccaacgtccttgacaagcccctcagccgtggcaggcaggaggtcagtttgagtgcatttgcattcttgttctctgagttggttcagtacaaccagactcaagttgacaacattactgagctggaacggaggctggaggatgctggttatgctgttggtgcaagggtgcttgaactactctgtcacagggagaagggaaatagacgagagacacgacttctgggcattttatcattcatccacagtactgtttggaaagtgttgtttggaaaggtggctgactcacttgaaaagggaacagaacacgaggatgaatacatgatcagtgaaaaggagcttcttgttaaccgtttcatttctgtgccaaaagacatgggagcattcaactgtggagcttttgttgcgggcattgtaaagggtgtattagataatgctggctttcctgccgtagttactgcacattttgtgccaattgaaggccagcaaaggccaagaacgacaatcctgataaagtttgctgaagaggtattacacagagaagcaagactgggctgagtttttatgtatgtacacaaaacctttgactagcctatttgtaaggtgaatcgttactggggactagtttgatgatttcttgtatttgagtagttcggtgatttcttgtatttgagttatgtaatagcagtgtgactgagaataaaagttatgtaggtgagatcgcaggtgattcatcagtcttattgaaatccgaccgaaactgctgtattaatgcttttccttgcattcaccttgtattaaaggaatccttcatcttttgatttttcgtattttgtagccttgtagctttttattttctttttagtttttgaagctgttacattgttactacctctatttttctttataagggatacacacatcaaggttcaaacttcaaaatcgttggtggtcttgtggcatcttgaggcattggaccttggtgctgcctttgtttgtcc

SEQ ID NO: 25230 - DNA, 1329 bp, Zea mays
  Clone ID: LIB3732-019-D3_FLI
tcacgtgggttatgctcccgctgtagcaataattgaagaaacgtctagatcgctcgtccggtgtggtctctggacttgcttgccgttcacttctcttcagcggcagcgtggcaaggcaacgagagcaacgaagagtattcaaaccgaaaacaatggatccggtgcggaagagcgtgtgcgtgaccggcgctggcggcttcgtcgcgtcggagctggtgaagctcctcctctcccggggccaatacgcggtccgcggcaccgtgcgcgaccctggtgctagcaagaatgcccatctcaaggtgctggaaggagctgaggaaaggttgcagcttctcaaggctgatctgatggactacgacagcattgcatcagcagttgccggctgtgagggtgtcttccatgtagctagccctgtcctttcccatcgaccctccaaccctgaggtggaggtcatagctcccgctgtaataggtacaaccaatgtgttaaaggcttgctatgaggcaaaagttaggcgagttgtggtggtgtcttcatgtggagctgtgtatgctaatcctatttatccgaagggtaaggtgtttgatgaagactgctggtcagatgaggattactgcaggaagaaggaggattggtatttagtttccaaaacactgtcggaacgagaggctcttgcttttgcagcaaaaacagggctggacgttgtaactgtttgtccgtcattagtatttggacccttgatgcagcctacagtaaatttgagcagcgaaatgatccttaaatatttcaaagatctcgagactgttgaaaatgtactcagtaatatggtggatattcgtgatgttgctgatgctcttcttctgacttacgaaaagccagaagcgtctggacgatacatctgcagttcacatgcaataaaaatttctgatatgataaacatactgaagaccatgtatccgtcttacccttatcccaaaaattttgtggaagatgatgtcaactctgtatacagctctgagaaactgcagaagctggggtggagcttcaagcctatagaggaatccctccgtgacactgttgaatcctacaaggcatttggcatcctgaattgaacatcgaactaggattgtttccatctgctgttgcctccgaactcctcctgaataatgtaggcgcagtgacagcagcactgccgttctctttatttttcaacactattatgtagtggttcaggccaaataagtaggcccggtgctgactgttgtatggtttgtggcctattgtcgttgctaaaaactagaaatatgcgtactaatgttgcattgctgc

SEQ ID NO: 25231 - DNA, 1011 bp, Zea mays
  Clone ID: LIB3732-019-D8_FLI
caaccagtcaaccaccctataaagcgcggggtctcagtctcaccggcacctcttcaatcccagtcccacacaaagtttctcctcgatcctcatctcctccctctctcgagtcaagagcagagcagctaccaaacaagctctcctttcgcttccgatccatggagctcgacgccgacaacctgagcgccaccgagctccgcctcggcctgcctgggaccagcagcagcagcagcgacgactggcagaagaagccgtcgccctccgtcggggccaagcgcgctctggacgacggcaccaagagcgaggcctcggggaccagcccggccgccagagacctcgacttcgaccacgaccacgacaccgccgcgcctcccaaggcgcaagtggtcgggtggccgccggtgagggcgtacaggaagaacaccttccaggcggcggcggcggccaagaaggtcgagcagaagcagaagcagcagcagcagggaggcctgtacgtgaaggtgagcatggacggcgcgccgtacctcaggaaggtggacctccggatgtacaaggggtacagggagctcagggaggctctggacgcgctcttcaccaactccttctccgcggcggcagagggcggcggcgaccaccaccagcacgccatcgcctacgaagacaaggacggcgacctcatgctcgccggagacgtgccctgggatatgttcatctcttcgtgcaagaagctcaggataatgaagggctctgcctctgaggccaggtgatcgctgatccatacataaacagaggctacagacacgccacctgggaacgcggatccaagagcacacacggatcgtacttgacgaggaaggagggaggagcagtgtggcttgagctctccagtgttgtacaaagacatgtttctttctgaacccaaaagggagaaagatgtatgaagcgtgtatataagatcttagctagcagtttgttttcatttgtatgagcgatcgaaggctgtaaaaaatg

SEQ ID NO: 25232 - DNA, 879 bp, Zea mays
  Clone ID: LIB3732-019-F5_FLI
ctcgctagcactagcatagtcgtctctttcttttctgcttccagacattgtccacgagctagtgcactggtgtcgctcgcaaccaaattaaggactgaggcatggcatccaagggcgtcctcttcttggctctcaacctcctgttcttcacagtggccaacgcctgcggcagctgcccgaccccaacgccgccggtcgtgccaccgccgccgcctcctgctgctaccccacccccttcatcatccagtgggaagtgcccgctgaacgcgctcaagttcggcgtgtgcgtcaatgtgctcggcctcgtcaaaggcgaggctggcaaggtaccagctgagccatgctgcaacctcatcaaaggccttgcagacttcgaggccgccgtctgcctctgcacggccatcaagggcaacgtcctcggcgtcgtcttcgatgtccctatcaagttcaatgccctcgtcaactactgtggcaagtgcgtgcccaagggctacatgtgtgcgtaagctccgcgcggttacactctcgtagccgttcgcgtgcgtaattaagcatgcacctgcatggcacacatgtattgtgcgcctgctgatctctcctgtctcatttgtgcaccttaggttctacagtcctagaaccatattccaggcaaattcttgtcagttcacatgtattgtctcttgttgaatttctatttttttgttttattttgtatttgaacatttgtttataagagtttgccatcttcttctccaagaaaaagaggagtgctgcttctagtttttatatctacgagtcatgcatgtaatctgttgagagtcatgtgtttgtgtatgtaaaaccaagcacttgaatttaatatatacttattcgatttgt

SEQ ID NO: 25233 - DNA, 882 bp, Zea mays
  Clone ID: LIB3732-020-H3_FLI
gcgagatcgtgcgcacctccgagatctccacgaagttgtggtaacatggggctcaccttcacgaagctcttcagccggctcttctccaagaaagagatgaggatccttatggttggtctcgatgcagctggtaagaccaccatcctctacaagctcaagctcggagaaatcgtgaccaccatccctacaatcgggtttaatgtggagactgttgaatacaagaacattagcttcactgtctgggatgttggaggtcaggacaagatcaggccattgtggaggcactatttccagaacacccaaggccttatctttgttgttgatagcaatgacagagatcgtgttgttgaagcaaaggatgagctccacaggatgctgaacgaggatgaattgagggatgctgtcttgctcgttttcgcaaacaagcaagatctaccaaatgcaatgaacgctgctgagatcaccgataagcttggtctccattccctgcgccaacgccactggtatatccagagcacttgtgctaccacaggagaaggtttgtacgagggtcttgattggctctccaacaacattgcaaacaaggcctgaatggacaattctgctgtttcacgaagcacatctgcacatggcgaggcatggtcattttgaccctcagacgattattgtttcattggaaagtatcgtatttctttgctaggcttttcagagagatctctctaagaaactgatccgaaattaagacactataattggcagtggcactagtagatcgtttactgagtaatgcagtttattttaatgtatcccaattgtgttgtaagatacaaatatctgtcggaattatccattcaatttgaatctagatacgtagtttttgtt

SEQ ID NO: 25234 - DNA, 1263 bp, Zea mays
  Clone ID: LIB3732-021-B5_FLI
gcgcggcgtcgcctgccgaaccccgaaccttctcgaggtcgaggcccctcccctttcgccaggagaaaacaatgagcaggcgcaacagccgtaccatctatgtaggcaatctccctggggacatccgtgagagggaggttgaggatctcttctacaagtatggccgtattttggatattgacttgaaaatacctccgagacctcctggatacgcattcgttgagtttgaggatccacgtgatgctgatgatgcaatttatggccgtgatgggtataactttgatggctacaggttgagggttgaattagctcatggtggcagaggccagtcttattcttatgatcgttcaagcagctatagcagtgcatgccgtggaggtgtttctaggcgctctgatttccgtgttatggtcactggtttaccctcatcggcatcgtggcaagatctgaaggaccacatgcggcgcgctggtgatgtctgtttctctgatgtataccgtgaggctggagaaactattggaattgtggattatacaaattatgacgatatgaaatacgcgattaggaagcttgatgactcacagttcaggaatgcattttcaagagcatatatcagggtgagggagtatgatgctagatcacgaagcagaagccgtagccactcgtactctagaagccccagctacagcaggagcaggagtccaaaatctgtttctcagtcaccctcatctgtggatgaaagatcgctatcaagatctcgatccccaatttcttctccttctcatgcaagatatgcgacaagccctaggagcagaagcgcatcccgttctcggtctcctgtgagatccgattgaactttgagagcccttgaagcagtgagcagccccagggagaagaaaggaacttgagagtatgccgtgccatcacaatggtccgagtgattatgctgttgccactgctccctcacatttaagaggtttcctcttatttagacggagcatttaattaacattatcttgctaaagagagacttatgcgtagtctacttgtgtactcgttcgtttgtcctcatgttcttggcttcaggaactctggttttttatcattgtacccatagtaaaacctagatgtagttggggtatgccgtatgcgtctatattcggttggtcgaatgtaaatctggatgcatatatgcatctgtttggtttcatttaggcctttccttggtttcgtgattaatgacaacataagcttattgctgtg

SEQ ID NO: 25235 - DNA, 1161 bp, Zea mays
  Clone ID: LIB3732-021-E3_FLI
cgcatacccatggaggccaccgcggtgccgcgggctctgtccctccttgggccatctctgtcgacggcgcagctgctgccttggatgcgtatgaactgcttgcgcgtagccgttggaggaggtgtcaggcggcaggggggcgtagtctgggcgaagaagacgagaaggggccgggacgacgtggcggaggagcgggtggacacgcacagctttgcgccaaaggccgtcctgcttagaaagaaaatggtgagagaggatggccaagtgtcaccagaatttgctgatgcaaatgaagaaaagctgtatgattttcttaatatccagctaaaaagcgatatgaaaagaattcaaaggaggaatctgctgtcgacaatgctctccgcttggacgatcctgctcttgggtccgggtcaggtcagcttagcagagacaaccggtggcgcattcagggagtatatcgacacgtttgatggctacaccttcctgtacccgaagaattggatccaggtccgtggagctggcgcggacatattcttcagagaccccatggtcctcgacgagaacatgtcggtggagatatcgtcgccttcgtcgtccaggtacacgagcgtcgaggacctcggcccaccggagaaggctgcagagaaggtcctcggtcagtacctgacggagttcatgtccaccaggctgggcgttcggcgtgaatccaacgtcctatcggcgtcatccaaggtcgctgacgatggcaagctctactacgaggttgaggtgaacataaaatcctatgcgagcaacaacgagctggcggtgatgccacaggacagggtgcagagcttggagtgggaccgccgatacctgtcagtgctcggcgtcgagaacaagcggctctacgagctccggctgcagacgcccgagcaggtgttcatgcaggaagaggaggacctcagaagagtcatggactccttcagggtcatcaaggcggcgtagtttgtcgatagtagagtgcacatgttttgtttttgtttgcttgtttgtttcttttgtacccgcagaaatgttcatatcacttgtttcttctgtagagcgcacatgtttccattcatgtctccaaagggatgtttacactttaaaataagtaagccaactatcagaaggttggtc

SEQ ID NO: 25236 - DNA, 2718 bp, Zea mays
  Clone ID: LIB3732-022-G10_FLI
gtcgcctaccaagtgttcgacgatggatttctccgacgccgacagcgccaggacttgcgatgtcaccgacgtccccatcgtgcactccgcactcaaggcgttcgtcaaaatgctcaacggcgggagtgagcatccgcaggaggtgacgcaaacctccatcgcgcggtgcgccaggatctccgcctgtgacacccaccagccgaccacctccatgtcgtggctgcacacacgcgtccatcgctccgtgcagacgccgtccttgcggggcgtcatcggaatcgcctagacgagcggcggacctgacgcacacagcctgatggacagctcacggagctggatcttcaccgagctcggccaaccaacatactgcccagagactttcccggaggtgccatttgagagaccaactccacccataattttcttcgacgaggaacatatcttcgaggaagagtcgtcttcttccaccacggcgacaccaagaaatccgtccgatccgaagcaggcgggtggcgacctcgattccatcgctactgcggcgctgtcggcgtcggaggagatcccccagtccctgctcgtcatcgacctcgagcgcgccacctccaagtgcatcaggacccacgctgtcaacgatgtcccagctgtgcactccattatcaagggcctgcaactggagcggatcggtctggcggggagcgcgcccgacctggacaccctcaccaccgcccgccattgtggcagtgagctcagctgccagctcggcagcaacaagcgggatgtcagcctccgagttgggtgcgaccaaagctatgagtgggtcgacccggagaccctggacaggagcttcgtcgtgctagataatgcttgtgctacccatgaggtgttcgaggtattgcctctaagcttccctgctgcttgggttaatgttggcaagctcccaaccactttatgttggaaaattccatggccacctcccgttttgtgggtgaatttgcatgctggcggtcgttatataacttcattgttggaagaatgtcagctagtgttcaccatattcttcggtggtgtttgctcacttgccaagattcagtggccttatatggtgttggaataccttgctaatttgcatgtgattcatgggaaaattcatatgcatccggtacaagtttgtgtcaggtcctatgcagtgatgccatctgctaagggtcttgtggcagagacgcacctccacttcatcggcacctacaggggcgtcgtcagcaccgccttctgtactgagattgttgagtctgcagatgcctatatctttgcaggctccattttcaaggactacagctccgtcggttactcattcctcctcaagaaggccaaggccatcattgtccagcctgagcgtgtgggagtgggaaatgggttgtcattcagatgtttgatgatgaaggagtactggactgaaattgctaagaaggttaaaaagaacaccactacgtatgagaactacaagaggaactttgtacctgaagggcaggcgctggagagcgagccgaatgagccactgcgagtcaatgtgctcttcaaatacatccagaagatgatgacagttaatagtgtcgtgatggctgagaccgatgattcttggttcaactgccataagctcaagctgccagaaagctgtggatatcaattccaaatgcagtatggtttaattggatggtcaatgggtgcactgcttggctatgctcagggtgcgaatcataagatcttatcaccattgactgccttgcatcctcttgtcgcagtttgctatgaccatgatattataatggatgctgccggttttggtgatgagctggtggtcatcagcttgggtgctgactgccaaattattgcatcctaccacaggtggcctttcggacagactggaactggtcatttctccccaattggtggctaccaggttagacaagatatggtgctcatcttggatgttgctcgtttcattccattacaatttttttgggaagccatgaatacaactaatgactcaactctgagagggtccatgcttatatcaagaaaggttgcagagtcttcattgttgtacacagtgagttgcagagatgaaaactggaaaatcatgccaaagttttgtgttgaagatttaccaagtcttctgaaggcagggattggtgcttgcgtgggcttggttacctctggtctgagtgttgtcagcagtggccaaggcaatttttcagtatttgtttgggatcctggtgatagcggcttggttacctctagtctgagtgccgtcagcagtgaccaaggcaaattttcagtctttgtttgggatcctggtgatcgtggcttggttacctatggtctgagagttgtcagtattgcaagagttactgctattatgtcaggcacatatgcaagaggtgctgctacaacttcctctccgaagatgcgccagacccagttcagatggagggccgaggagaggcatgatgcattcaacaatgatgctaatccacagataaagttgatcctacaccgtcagcggcttgggggcaagccgtatttcaaggagtggggaatgttagatatattaggtgtagtagatgagctatgggttatgtgggcttgaggagatataaatataggctgagtcagctgtaaaaggcatcaaacaacgaaatacaaaataccaatttactt

SEQ ID NO: 25237 - DNA, 1234 bp, Zea mays
  Clone ID: LIB3732-023-B2_FLI
ctcgacactgtcactagctagttgctctactagagggcgggtatagagctgcctgcaatccgccgctgagaagggaggatcggaagcgacgatgaggtcgtttgctcctgtctttctgtcggcggtcgtggcctggctggagctggcgggcaccgcgcagggcggcaacttctaccaggacacagagatgacctggggcgatggccgcggcaaggtagtggacggcgggcgcgggctggacctgacgctggaccgcacgtccggctccgggttccagtccaagagcgagtacctgttcggcaagatcgacatgcagatcaagctggtgccaggcaactccgtggcacggtcaccaccttctacctgtcgtcccagggcgacgcgcacgacgagatcgacttcgagttcctgggcaacgtgagcggggagccctacacgctgcacaccaacgtgttcacgcgcggacagggccagcgggagcagcagttccgcctctggttcgaccctaccactgccttccacacctactccatcctgtggaacccgcagcacgtgatcttcgcggtggacggcaccccggtgcgggacttcaagaaccacgaggcgcgcggggtggcgttcccgaggacgcagcccatgaggctgtacgccagcctgtggaacgccgacgactgggccacgcagggcgggcgcgtcaaggcggactggtccaaggcccccttcgtcgcctccttccgcggtttcagcgccgacgcctgcgtctgggacggcggcaggcagcgctgccctgagggcaccatggaggccgccgccgtcgcgggtgccggctccggccgcggctggtggaaccagcagctcagcgacatgagctaccgccgcatgcgctgggtgcagcgcaagttcatgatctacaactactgcgccgacgccaagcgcttcccgcagggcgtgcccgccgagtgcaagctccggtgagggagcgaggtttgttgggacgtccgtggggcatcaaaaccaagcacgatccctagtcgtggaaagtagaaaccaggcatcgattcgatcgtcgtcgacggtcttagtagtagctacttattttgcagtgggcgatgaaagaatggtgtcatgtaaatgtagctccagtcgtgtcgcattctttgatttgttgtttcagcagcaccggatgtacaagtactgagtttgggctagcaagaataagtaatctttttcggcc

SEQ ID NO: 25238 - DNA, 1505 bp, Zea mays
  Clone ID: LIB3732-023-C2_FLI
gaaacaacaacaataactgaaagagaaagaacgccggagcgggagcctgacactgacgccatctctcatccttctcctcctccctggttcagatctctcatcggcccccgctgcattccatcccgaccccgtctgccactggtcacaccctctccatcgcttcctgccaccgaccacaccctctcgatcgccattcgccaccggccaaatggaggccatccggaagcaggcctcaaagttccgggagcaggtggctcggcagcagcaggcggtgatgaagcagttcgggggcgggtacggcgcagacggcgtgttcgcgaacgaggccgaggcgcaacagcactccaagctcgagaagctctacatctccacgcgcgccgccaagcacttccaaagggatatagttcggggcgtggagggctacatcgtcacggggtcgaagcaagtcgaaatcgggaacaagttatgtgaggatggcaagaagtacggcaccgagaacacttgtagcagtggaagcacactgtcgaaggcggcgttaagttttgctaaggcacgatccatgatggaaaaggaaaggggtaacctgctgaaagcccttggcacacaggttgcagaacctctgagggctatggttatgggagctcctttggaggatgctcgccaccttgctcaaaggtacgacagaatgcgtcaagaagctgaagcgcaggctattgaagtttcgaagcgccaaatgaaactaagagaggcgtctggaaatagtgatatggtttcaaggctagaagcagctgagtcaaagctgcaagagttgaaatcgaatatgggggtattgggcaaagaagctgttgcagcaatgactgccgttgaggcccaacagcaaagattgaccttgcagcgtcttattgcattggttgaatcagagagaaactaccaccaaaaggtcctacaaattcttgatcaacttgagagagagatggtatctgagcgccaaagaatcgaaggagcacctccggtggttgagagttccatgcctccaccgcctgcatatgaagaagtcaatggtatattcatgagaaatacagttgcagaattggtcgagactgtggagtatttcttggctgaggcaatccagtcataccaagccgaaagcgataccgagctcaacctttcaactggtgactacatagtggtccgaaaggtgtcgaacaatggatgggccgaaggtgaatgcagggggaaagctggttggttcccctacgactacatcgagaaacgggagcgtgtgcttgcaagtaaagtcggccaagttttctaagtcttccgctgagccatgtagtatatccccggggttgtacactgtgtgttgtttatgcttgtcatcttcagagaatcagaggagatctgtaattttgctgaaagctgcctgttgggtggtttgtttctgcctggcccccttaattgttcaaattcatgtggcaggaactgaatatattcattcttcagtt

SEQ ID NO: 25239 - DNA, 1614 bp, Zea mays
  Clone ID: LIB3732-023-C5_FLI
cgggagcacgacccactggagccagcaaacaacaacgagtccctttcgcctcttgcccgttgcccctcggtttcgtcgccgctacccggcgatctccgcgacagcgacccggtgccgccgccgcagatctcgccgagaagacaggtatcggtgccgccgccagatcaactggacctgtaaaacgagggcctgcgctacctgtggagttcccgaggcgctgttctgccaggattcggcatctttggttgcccacatggccacttccacatctcagcatgcgctttcatccatcaaattgctgtccacaggctgcttgcatcccgataagagaaattgccgcgtgctttctgtttcagtagggcgtcgctgtcccagtgcccgcaatttgggtctactttgtgcttcaaactctcaatcttcagtgattgagccggtccagctaccgaggagccctaaaagtggtgtaactccaaagaaatcaggtgaaagcgcactcattctgatacggcatggagaatcgttgtggaacgagaagaacctgtttactggatgtgtcgatgttccactgacccctaagggcgttgacgaggcaattgaggcggggaaaaggatatgcaatatcccagtcgatgtaatatacacttcgtcgctgattcgggctcagatgaccgctatgcttgccatgatgcagcatcgccgaaagaaggttccaatcattttgcacaacgagagtgaacaagctcacatgtggagtcagatatacagtgaagagacaaagaagcagtccattcctgtcataacagcttggcaattgaatgaacggatgtatggtgagcttcaaggccttaacaaacaagaaaccgccgatcgatttggtaaagaacaagttcatgaatggcgtcgcagttatgatattcctcccccaaatggcgagagccttgagatgtgtgcagagagagcagttgcttatttcaaagaccaaattatacctaaacttgtggatggaaagcatgtaatgatcgcggcccatgggaattcacttcgttcgatcataatgcatttggacaagctgacttctcaagaggttatcagccttgagttgtctactggcattcctatgctgtatatatttaaggaagggaaattcatcaggcgaggaagccccgctggaccttctgaagcaggtgtctatgcttataccaagaatttggctcagtacagacagaagcttgatggcatagttcagtagccatctgcaggcttttcgtttgctactcatccgtcgaacatgcatttggtcccggaaaacaaggggccaagctcctaccatctcatcgacattcaactgccaagtagtccattcctgtcacaagtttgtagcggctcatttatctcttcagaaacctcccaccacgtggtagtaaaatatacggagtagatgccaattttaggtggtgagctgtagatacaaatggagatatactggatggcagttgtgttatctttccgctttccccagtcacttagatctcagatgtttgtaatggtgcagtaataaacacagcgaactgcatggaacgagacgctgttatcgaatccttgttccccgtctac

SEQ ID NO: 25240 - DNA, 1526 bp, Zea mays
  Clone ID: LIB3732-023-C8_FLI
gcgccgtctgccttctgcgcctccatttcggcctctgtcccttgcaagttcaatctcacctccaaccatgggtaaagagaagtcccacatcaacattgtggttattggccatgtcgactctggcaagtcgaccaccacaggacaccttatctacaagcttggaggcattgacaagcgtgtgatcgagaggtttgagaaggaggctgctgaaatgaataagcggtccttcaagtacgcgtgggtgctcgacaagctcaaggctgagcgtgagagaggtatcaccattgatattgctctgtggaagtttgagaccaccaagtactactgcacggtcattgatgcccctggacaccgtgacttcatcaagaacatgatcactggtacctcccaggctgactgtgctgtccttatcattgactccaccactggtggttttgaggctggtatctccaaggatggccagacccgtgaacatgctctccttgcgttcacccttggagtgaagcagatgatttgctgctgcaacaagatggatgcaaccactcccaaatactccaaggcacgttatgaagagattgtgaaggaagtctcatcctacctcaagaaagttgggtacaaccctgataagattgcctttgttcccatttctggttttgagggtgacaacatgattgagaggtccaccaaccttgactggtacaaaggcccaaccctgcttgaggctcttgaccagatcaccgagcccaagaggccttcagacaagcccctgcgtctgcccctccaggatgtgtacaagattggtggtattggaactgtaccggttggtcgtgtggagactggtgtcatcaagcctggtatggttgtcacctttggtccaactggcctgactaccgaggtgaagtctgttgagatgcaccacgaggcgcttcaggaggctcttccgggtgacaatgttggcttcaacgtgaagaacgttgctgtcaaggatctcaagcgtgggtttgtggcctccaactccaaggatgaccctgccaaggaggctgccagcttcacctcccaggtcatcatcatgaaccaccctgggcagattggcaacggctatgccccagtgctggactgccacacctcccacattgctgtcaagtttgctgagctcattaccaagatcgacaggcggtctggcaaggagcttgagaaggagccaaagttcctgaagaacggtgatgctggtatggtgaagatgataccgaccaagcccatggtggtggagacgttctcagcgtatcctccccttggtaggtttgctgtccgtgacatgaggcagacggttgctgttggagttatcaagagtgtggagaagaaggacccgaccggcgccaaggtgaccaaggcggctgccaagaagaaatgatgcgatcctgcgcctgctttagcaatacctagttttcatcatcacaagttttgtttgtgatcgttgctgttatcgtgtgaactgttgagatctgttagcatgtgcacttttatct

SEQ ID NO: 25241 - DNA, 1477 bp, Zea mays
  Clone ID: LIB3732-023-D12_FLI
tcggagtttcgcatggagtcatcgcggtctcggaagcggacgcgccaggcgcatgactgtgccgccgcgccgccaccagagcgagaagtggtagcgaggggtggcgcgtcgccaccatggagggaggatgaccgtgatggacacttcgtattcgaccttggcgagaacttgacccgccgatataaaatcttgagcaaaatgggagaaggtacatttgggcgtgttttggaatgctgggaccgtgaaacacatgaatatgttgccataaaagttgttcgcagtatccgcaagtaccgtgatgctgcaatgattgagatagatgtgctcaatcgccttgcagaaaatgaaaagtacagatctctttgtgttcaaattcagagatggtttgactatcgtaatcatatatgcattgtttttgagaagcttgggccaagcttgtatgattttctaaagagaaatagataccaacctttccctgtggaacttgtgcgggagtttggacggcaactgttggaatctgtagcatatatgcatgagttgcggcttatccacactgatctgaagccagaaaacatactacttgtctcttctgagtatataaaagttccaagtacaaagaagaattcgcaaggtgaaatgcatttcaagtgcttgccgaagtccagtgccataaagctgatagattttggcagtaccgcctttgataatcggaaccataactcgattgtttctacgaggcattatagggcacctgaaataatattaggtttaggctggagttttccatgtgatatttggagtgttggctgtattcttgttgagctatgctctggggaagcattgtttcagacacacgagaatctggaacacctagcaatgatggagagggttttgggacctctaccagaggatatgatacggaaagcaagctcttcagctcagaaatattttaggagagcaacacgattaaattggcctgaaggtgctgtttcaagagaaagcatcagagctgtgaggaaactggatcgactaaaggacttggtatcgaggaacgctgaccattcaaaggtggcactggtggacttgctatacggtctcctacggttcgagccatcggaacgcctgacagcagaagaagctctggaccatccattcttcaggaacccaacatgacttgttgagcaggcttgactcatgtaactctactgaaggtggtggtaggaagcaggcagagccgtccccattgcaaagctgaaggcatcttgttcctctataccagagagtttgtgtaaggcctgtcaatggggcttcttgtggtgataaaactgatggctttagtcacccaatgtcatgtacactagcatttttcctagggagcttagttcgccagacggcgcttgtatgttgttaaccgggatacactatgagctgtgccccgatgccctggtgctataatccaatcgcaaatgatgaaatc

SEQ ID NO: 25242 - DNA, 978 bp, Zea mays
  Clone ID: LIB3732-023-E3_FLI
caatacaaacaaagctgtaacgtactgtaaaagtaagatatggaggccgccggcggcggcggcgaggttcacaaggctagcaacgacaaggaggagcatttcgtgctcgtgcacggcgccggccacggcgcctggtgctggttcaagctggcgtgcctgctccggggctccggccgccaccgcgtctcctgcgtcgacctcgccggggccgccggcagcctcgtcgacccggacgacgtccgctcgttcgacgagtacgacgcgccgctcctcgacttgatggccgccttgccggacgacggccgcaaggtggttctggtagggcatagcgcaggaggactgagcgtcacccacgcgatgcatctgttcagagacaagatcaagcaggccatcttcgtagcagcgaccatgctcccgttcgggtaccagtcggagcaagatatcaaagatggagcacctgatctatccgagttcggcgacgacgtttacgacctcaagttcagtctgggagacgaccgccctccgacgagcgtggcgctgagagaggagcaccagcgcgcgatcctgtaccagcaatgcacccacgaggactccacgctcgcatccattctgctgcgcccgtggccggcagctctgggcgccgccaggttcggccgcgccgacgacggcgccgtgaacactgtgcgtcgggtgtacgtgaagacggccaacgaccgcatgctgaagccggagcagcaggaggcgatggtccgccggtggccgccgagcgaggtggcggcgatggacaccgaccacagccctttcttctccgcgccagagcgcctcttcgagctgatcatcaagtcattgtgaatctctcatctgtattaatcgcttgtgttcttccagactccagtgcctggtgctgtcctgtatgccatgccaaccaataagttatcatttatttatcaataaattatctcaaccaagttatcattt

SEQ ID NO: 25243 - DNA, 742 bp, Zea mays
  Clone ID: LIB3732-024-A11_FLI
acaacccgtcagcccctctcgtttttcatccgccttcgcctccaaccgcgtgcgctccacgcctcctccaggaaagcgagagcttctgcataagaacaacaaatcaaaagcgtgatcagctcggtgccaacaaaacctcaacaaccaagtttcatgtctgatctcgacgtccagcttccatctgcctttgatccgtttgctgaggcaaatgctgaggactctggtgctggtcctggaacgaaggattatgtgcatgtgcgcatccagcagcgcaacggcagaaagagtctgactacagtccagggtctgaagaaggagttcagctataacaagatcctcaaggatctgaagaaggaattctgctgcaatggtactgtagttcaggacccagagctaggccaggtcattcagctccaaggtgaccagcgcaagaatgttgctactttcctagttcaggctgggattgcgaagaaagagaacatcaagattcacgggttctaagggacctgtaaatgcttgtgccctatattgtgtgcctcaacatattggggagcttgaagcatcgacagttgctagtcattgcttacttatataagaacataagtagtatttgctattgtcaagtgtgccttgcttgatgcaagttgtgttttcgtctcattattattatgcacggccatcgtacgtgtatggcttgtatgggttattgccaacttaataaaagcacactctgtttgcctat

SEQ ID NO: 25244 - DNA, 1450 bp, Zea mays
  Clone ID: LIB3732-024-C2_FLI
ggattcgattattctgttcgctctcgcccaagtcatcgtctggtcgtcgcccgcagaggcgcagacgcccaaaaccggaaggggcgccatggccgcgtcggatctggagagcaaggccaaggaggccttcgtcgacgacgacttcgagctggccaccgagctctacagccaggccatcgacgccgggcccgccaccgccgacctctatgccgaccgcgcccaggcgcacatcaagctcggcaactacactgaggctgtggcggatgctaacaaagcaattgagcttgatcctatgatgcataaagcttactaccggaaaggtgctgcatgcattaagcttgaagaataccaaactgcaaaggctgctcttgagttgggttcttcttatgcatcaggcgattcaaggtttgctcgtctattgaaggaatgtgatgagcgcatcgctgaggaatctagccaggcaccagtaaagaatgttgaggctactgtggctgctactattgaggacaaggaggatttcacaaatatggagaatacaccaccagtgatagaacccccaagcaaaccaaaatacaggcatgactactacaacagtgccacagaagtggtactgacaatatttgctaagggtgttcctgctgatagtgtagtcattgattttggtgaacagatgttgagtgtatccattgaagttcctggtgaagaaccataccattttcagccccgtctgttttctaagattatccctgagaaatgcaaatatcaagtcttatccaccaaggtcgaaatacgccttgcaaaagctgagcaggtgacatggacaaccctggattatagtggaagaccaaagactgttccccagaagataagcacgccagctgaaacagccccaagaccttcatacccatcttcaaaggcgaaaaaagactgggataaactggaagctgaagtcaaaaaggaggagaaggaagaaaaacttgatggtgatgctgcattgaacaaattcttccgtgacatctacaaggatgctgatgaagatatgcggagggccatgatgaagtcattcgtggaatcaaatggcactgttctctcaaccaattggaaagatgttggagcaaagaaggtagaagggagcccccctgatggtatggagctcaagaagtgggaatactaaagtttggactgcccatcttttgtaaatccaggtcttggaaactatgacctaattccgtccacccatagtgccatgagcttgcttggttaagtctctgcttttgtaagctttctgtatgacagtctagcgtgtgtctgagtgctacttgccgtagcttttgatggacataggtatgctattatgtggtatcgaccgggaaccatctgtggtatcaaagacagcaaactataatgtatggaatgcctattctttttggtctaagatgtttttcttgtc

SEQ ID NO: 25245 - DNA, 634 bp, Zea mays
  Clone ID: LIB3732-024-G5_FLI
acacaacacaaacaaactaaccttatcggtttatctatccttctatccccattcccatcccgagacaggagagggcaaggatgctgctcctgagctcccccttcgtgtccgtgtcgccgccgccgccgccgctcagctcccatggcgctcgcccggcgctgcggatcgaggcggccaggcagctgacggggcgggtggtgacgaccaaggcggacaagacggtcggggtggaggtggtgcgcctggctccacaccccaagtacaagcgccgggagcgcatcaagaagaagtaccaggcgcacgaccccgacgaccagttcaaggtcggcgacgtcgtcgagctccaaccctcccgtcccatctccaagaccaagcacttcctcgccatcccgctcccgccccgcgacactcgccgcaagtctcagctcctaccgccgctccagtccgacgacgaccaggagccgtcctcgcgagagtgattgattgtgattgattgctgcctgtctatggcttcgtcgtaagctcctctccatcagaggtgctgcttcccaattccaaatgcgaatccatgtgtgtttttgtcagactatttcctttttcttttcgatcaaaggctttagcccaatttcatccg

SEQ ID NO: 25246 - DNA, 1354 bp, Zea mays
  Clone ID: LIB3732-024-G6_FLI
cattgcccattgccattccttccttcctccacagagaaatccgatccgcggagatttgacccaaccagatcatatcacacacgtaatcccatcccattccgcccgcaacagcagcaccaccggtgggaagaagaagatgaagaaggccacttcgctctccgagctgggcttcgacgccggcgacgcgtcgtcgggcttcttccgccctgtgtccggcgactcgtcgacgccgacgtcgcagcaccaccggcggaggctgaccaaggtgtcggtcatcggcgcgggcaacgtggggatggccatcgcgcagaccatcctcacgcgcgacctggccgacgagatcgcgctggtggacgcggtcccggacaagctccgcggggagatgctggacctgcagcacgcggcggcgttcctgccgcgcacgcgcctcgtgtccggcaccgacatgtccgtgaccaggggctcggacctggtcatcgtgacggccggggcgcggcagatccagggcgagacgaggctcgacctgctccagcggaacgtggcgctgttccgcaagatcgtgccgccgctggcggagcagtcccacgacgcgctgctgctcgtcgtgtccaaccccgtggacgtgctcacctacgtcgcctggaagctttcgggcttcccggccagccgcgtcatcggatccggcaccaacctcgactcgtccaggttcaggttccttctcgccgagcacctcgacgtcaacgcccaggacgtacaggcgtacatggtcggcgagcacggcgacagctcggtggcggtgtggtcgagcgtgagcgtggcggggatgccggtgctcaagtcgctgcaggagagccaccgctgcttcgacgaggaggcgctggagggcatccgccgcgccgtcgtcgacagcgcctacgaggtcatcagcctcaagggctacacctcctgggccatcggctactccgtcgccagcctcgccgcgtcgctgctccgggaccagcgccgcatccacccggtctccgtcctcgccagggggttccacggcatccccgacgggaacgacgtcttcctcagcctgcccgccaggctcggccgcgccggcgtccagggcgtcgccgagatggagctcaccgaggaggaggccaaacgactgcgccgctccgccaagaccatctgggagaactgccagctcctcggcctctgatgatcacatcaccgtctctcttcattaattaattattgcatcaatttccacaacctagcagcagcatccggtacccgtgttcaataaaaacaaaccgctacaatgtgtgctttctagctgcattaagctgcttactacgagtatttgggc

SEQ ID NO: 25247 - DNA, 1183 bp, Zea mays
  Clone ID: LIB3732-024-H1_FLI
gtactgtgcaacatgacaatcgcattttattactctctattaaccaaccaaatacagtacaaagcaacaaaatagcattccaaccttttatgaaagaaaaaaaggtgttggtttggttccacaaccattattattgtttgctgtctcgctcggacgcatgccacttcttttcaatacataacaaaacagatacaccaaagggtactactacacaaggatgccttcatcgcctatcagacgccaccgattccgcagagaagagatacttcactcgagacagcaccgagtcgtgcgctggatcatatggatggtccttggatgggatctccagaatagcagggactggcttgttgtagctatccaccagaaatcttatcatgttggcaatatactgactgatgagcacaatagcaatatcctcccttgcagtaaattctttgaacgcgtcctcgatttgtttaactgtcgtcttgttgtcgacgaggaggtaattggttttcttgcgcagatcaacattgccaacgccggccatcaaaaagccagtgacggtgtcctcgtcggcgatgattgcgatgagggcggagttgttagtggggatgttagtcctccccgccatggcttgtggttgtggatgctgctcccctgcctcctcgtgttcgcggtcctgcacatccacttgggttgggaggaaggctcgtcgccaccggcaagcccgagagcttcggcgggcccttcctcgtgcccagctaccgcggctcctccttcctcgaccccaagggccgcggcggctccaccggctacgacaacgccgtcgcgctccccgccgggggcagaggtgacgaggaggagctccagaaggagaacatcaagaacgccgcctcctccaccggcaacatcacgttgagcgtcaccaagagcaacccggagaccggcgaggtcatcggcgtcttcgagagcgtgcagccgtccgacaccgacctcggggccaaggcgcccaaggatgtcaagatccagggggtctggtacgctcagctcgagtgattcgagtgtctaactgctaggtgtccgaccgccgtcatggatcttgggaaggtgtatgtataccatggaaaactttggagagcagaggaggaatcgtgtatgtaatgtacttgttaatgcaaattcgggctgtcgctttttt

SEQ ID NO: 25248 - DNA, 1407 bp, Zea mays
  Clone ID: LIB3732-025-A12_FLI
ctgatttgactattacaagcttgttgaaactggatgacgcgtcgttgccttcgacgccaaccagagtctcaggcatgtcagctgactcttatgtccatatcgtccaagccaaggtcaacgtgacatttggaaggttcgattcagctgtcgcactggctgagaaggctaagcttattgatggcgtgagctcagaggttgaagtgatcctaaacaacgtgagattagtcgcattggctcgagcccgggggaatgacctttttaaggcaggcaagtttgctgaggcgtcgctagcctatggtgaagggctgaaatatgagccttctaatccagtgctatactgcaaccgggcagcttgctggtcaaagctgggtcggtgggcaaaagctgttgaggactgcagcgaggccctaagagtccagcctaactacacaaaggctctgctaaggcgtgcggcgtcatatgcaaagcttgagcgctgggcggactgtgtgcgggactacgaggtgcttcgcaaggatcttcctggtgacactgaggttgcagagtccttgttccatgcccaagttgcattaaagacagcccgtggagaggtggtatctaatatgaagtttggaggggtagttgaagaaattatcagcttagagcaactccaagatgttatccgttcacctggtgtatccgttctttacttcatggctacaatgaacaagcaatgtgcacaaattaccccgtctgtggactccctttgctccgagtgccctgcattgaatttcctgaaggtaaacgttgacgagcgccctctggtagcaagcgcggagaacgtgcgagtagtcccaagcttcaagatttacaaggacggcacgagagtgaaggagatggtctgccctagcttgcaggtcttgcgctattccgtgaggcactatgctgtctccagctcttgaggtccggcactcagttcgctggccctgttagtgtcaccacatgccaacatttcaccaacaaatctgtccctctatagtatcacagcatttcccccttcccatcgcgtcacttaggctcctcctaccgcaacatctctagaaccatttgatccaagcttaagcaattctcatgcctcgctttccaaagtgatgacttcaactcctgaagaaaggctccctgtggtggtgttcagggaataggtaaacacggctggctggttttctcattacatgtacatatattcccgtatagcaacacatcaaacccattgatagattggttcactgtggagaaaaggcggggttcggacttggatgaagagtacaggtctagttgccattgaatgtagagatggagaagatagatgggtcgtgttgttggtatggtacgtagagagacagaggagggaggtggctggtgtggttc

SEQ ID NO: 25249 - DNA, 1497 bp, Zea mays
  Clone ID: LIB3732-025-A8_FLI
agaatcctaccaaacctagctaccaactcgatcgtcgtcatcacgctcgaccgcacaactgcaccaaggggggaggagacctaaaaactactacatcttttatagctacatctctagctaaagatcgagagggtaaataaggacgagcgggcgcgagctagaagagcagctgcaggtactaccatcatcgtcgtcgtcgtcgccaggatgaccgtcgtcgacgccgtcgtctcctccaccgatgccggcgcccctgctgccgccgccaccgcggtaccggcggggaacgggcagaccgtgtgcgtgaccggcgcggctgggtacatcgcctcgtggttggtgaagctgctgctcgagaagggatacactgtgaagggcaccgtcaggaacccagatgacccgaagaacgcgcacctcaaggcgctggacggcgccgccgagcggctgatcctctgcaaggccgatctgctggactacgacgccatctgccgcgccgtgcagggctgccagggcgtcttccacaccgcctcccccgtcaccgacgacccggagcaaatggtggagccggcggtgcgcggcaccgagtacgtgatcaacgcggcggcggaggccggcacggtgcggcgggtggtgttcacgtcgtccatcggcgccgtgaccatggaccccaagcgcgggcccgacgtcgtggtcgacgagtcgtgctggagcgacctcgagttctgcgagaaaaccaggaactggtactgctacggcaaggcggtggcggagcaggcggcgtgggagacggcccggcggcggggcgtggacctggtggtggtgaaccccgtgctggtggtgggccccctgctgcaggcgacggtgaacgccagcatcgcgcacatcctcaagtacctggacggctcggcccgcaccttcgccaacgccgtgcaggcgtacgtggacgtgcgcgacgtggccgacgcgcacctccgcgtcttcgagagcccccgcgcgtccggccgccacctctgcgccgagcgcgtcctccaccgcgaggacgtcgtccgcatcctcgccaagctcttccccgagtaccccgtcccagccaggtgctccgacgaggtgaatccgcggaagcagccgtacaagttctccaaccagaagctccgggacctggggctgcagttccggccggtcagccagtcgctttacgacacggtgaagaacctccaggagaagggacacctgccggtgctcggagagcggacgacgacggaggccgccgacaaggatgcccccgcggccgagatgcagcagggagggatcgccatccgtgcctgagagggcgatgccacacatgaacacaaagcaatgttcatactgctgccctgcacctgctgtgtaaccaggcctgtgtttgttctggctgatagtgatgtaccctaagacttgtaacgtcatgttcgttcttgtgaactatagcgagtgaataaatttggttaatgttggatgttc

SEQ ID NO: 25250 - DNA, 2705 bp, Zea mays
  Clone ID: LIB3732-025-B5_FLI
gcacggcgcatgcctgcgcgagcgcagccggcagccgcgcccaaggtcctagcggcggcggctggcggcgcgccgctcgccgcagccccagccccagccgccgccgtgctgtccgttgggattggcggcggctagcgtcgtagccgacggacaaaggggaaagaatcgaacatgtgctgctgggccagatggcagtgggccggaggggagtgtttggttctttgaactcttctttcttcttctcttaacaaagcgagacagtttttatttaactctgtctgaccggagcagggcaaaccgccaaccgggaacacagtacaatggtgggggcctgaccacccagtcacccacccacggacccacccgactcttccccagtgattctcttctacgcttactaggctatacttgacttcgtgtgtttccattccacagaggaagggatggccgggagcagcgtccgcggcggcagcaactgcccaccgctgttcgtgacggagaaaccaacgcggatggcgaggtacgcttaccggctgttcgcgagcacggtcctcgcgggggttcttctggtatggctgtacagagcaacgcacgtgccaccgatgagcagcggcgcccggtggtgggcgtggcttgggctctccgcggcggagctctggttcggcttctactgggtgctgacgctgtccgtgcggtggagccccgtcttccgccgcgccttcccggaccagctcttgcgaaggtacaaggaagagcagcttcctggggtggacatatttgtgtgtacagcagaccccactgttgagccgccaatgcttgtcatctccactgtcctatctgttatggcttatgactacccgaaggagaagttgaacatatatttgtctgatgatgctggttccatcataacattgtatgctctatatgaagcatcagagtttgcaaagcactggcttccattttgcaataagtaccaagtggagcccaggtcaccagctgcctactttggtacagaagctagccctccagatgcatgtgaccgtaaagagtggttttctttgaaggagatgcacaaagatttggcagctcgagtgaattcagttgttaattcagggaagatccctgaagtttcaaaatgcaagcttatgggcttctccaggtggagcgagaatgcaagttttagagatcacccttcaatagttcagattttaattgatggaaacaaaaggaaagcaactgatgttgatggaaaagtgttgcccacactggtttatatggctcgtgagaagagacctcaagaacatcatcacttcaaagctggatcactgaatgctttgataagggtatcatcagtgataagcaacagcccagtcattatgaatgtggactgtgatatgtactccaacaattcagggtctatcagagatgcattgtgcttcttccaagacgaacagctaggtcaagatattgcttttgttcagtatcctcagaactttgaaaatgtggtgcaaaatgacatctatggcaatcccatcaacaccgtcaatgagttggaccatccttgcttggatggatggggtggaatgtgttactatggcacaggatgcttccatcggagagaggctctatgtgggcgaatatacagtccagactacaaggaagattggactagggtggcgaggaaaactgaagatgtcattgacttggaaggaatggctgagtcacttgtgacttgcacatatgagcacaacaccctttggggagtcgagaagggagttatatatggttgcccactggaggatgtcattacaggattgcagatccagtgccgtgggtggagatcagtttaccacaacccgccaagaaaggggtttttaggcatggcccctacctcactaggacagattctggttcagcacaagagatggacagaagggttcctccagatctccctctcaaagtacagcccgtttctgctaggtcacaggaagatcagcctgggccttcaaatgggttactccgtatgtgggttttgggctgctaacagcttccccaccctttactatgtcactatcccttcactttgcttcctcaatggcatctcattgttccctgagataaccagtccctggtttgtaccgtttgcatacgttgctgtggctgcatactcctgcagcttggtggagtccctgcaatgtggcgacactgctgtcgagtggtggaacgcgcaaaggatgtggcttttcagaagaatcacctcatacctcttggcagccatcgacacaatccgcagaatgcttggcgtcaccgagtcggggttcaccctgacggcgaaggtgaccgatccgcgggccctagagaggtacaagaaggggatgatggagtttgggtccttctccgtgatgtttgcgatcattacaaccgttgcactgcttaacctggcgtgcatgatgctcggggtggcaaaggttctgttgcgtaaaggagcggtgagtctgggagctatgtttgtgcaggccgttctatgtgcgctgatagtagcgatcaattttccagtgtatgaagcaatgttcgtccgcaaggacagtggcagattaccagcttctgtcagtgtcgtttcgctctgcattgtattaccattctgtatacttccaaccaagttgtagatgtggagctggtgaaagatgatatatatatttgaaacc

SEQ ID NO: 25251 - DNA, 1528 bp, Zea mays
  Clone ID: LIB3732-025-C7_FLI
tcgaagtacccgttaccgccgccgcctctcgcctagccgccggagaagcgccgctcgctcaggaggacagccatggcgccggagccggaggatgatattatgaacgagaagaatccccgcccgctcgacgaggatgacatcgcgctcctcaaaacctatggactggggccgtattcgaccagcattaagaaggtcgagaaggagatcaaggaaatggccaagaaaatcaacgacctctgtgggataaaggagtctgatacagggctggctccacctagccagtgggatttggtttcagataagcagatgatgcaagaagaacaaccgttacaagtagcaagatgtacaaagattataagccctaatacggatgatgccaaatatgttataaatgtaaaacaaattgcaaagtttgtggttggattgggagataaggtctctccaactgatatcgaggaagggatgagggttggtgttgatcgcaacaagtaccagattcaaatccctcttccaccaaaaattgacccaagtgttaccatgatgactgtggaggaaaagccagatgtgacgtacaatgatgtcggtggctgcaaggagcagattgagaagatgcgtgaagttgttgaacttcctatgcttcacccagaaaagtttgtcaagcttggtattgaccctccgaaaggtgtcctttgctatggcccacctggtactggcaagacacttcttgcaagagctgtagcaaaccggactgatgcttgtttcatccgtgtaattggaagtgagctagttcagaagtatgttggagaaggtgctcggatggtcagggaactgttccagatggcccgctcaaagaaggcatgcattgtattctttgatgaagttgatgcaattggtggtgctcgttttgatgatggggttggtggtgacaatgaggtgcagcgtacaatgttggaaatagtaaaccaacttgatgggtttgatgcaagagggaacatcaaagttctcatggccactaataggcctgataccttggatcctgcacttctgcgccctggtcgcttggacagaaaggtggaattcgggctacctgacttggagggccgtacccaaattttcaagatccatacacgtaccatgaactgtgagcgagatattcgtttcgagcttctggcacggctctgccccaactctactggagctgatataaggagcgtttgcacagaagccgggatgtacgccattcgtgcccgcaggaaaacggtgacagaaaaggattttctcgatgctgtcaacaaggtcatcaagggctaccagaagttcagtgcaacacctaagtatatggtgtacaactagtcggcgtgtcttcatgggatctgttgtttctagaaactctggatctttttcatggttgtatcatcatgagattctctatgcaaaggttgttgtttgtttagcaaattggatgccgagtgatttgtgacctgtaccgcatgtttttaagataacaatgttcttcgctcggtggttc

SEQ ID NO: 25252 - DNA, 942 bp, Zea mays
  Clone ID: LIB3732-025-G7_FLI
ccagtcccagttcagattccgcaaaacaggcagtcaggctcaggcaccaacaccaaccatggcctccgctgcgacacctgcgcctttgctccccgtgaccagcacggctgccggcggcggctccgcgccgtcctccgccacgggcctctccgacgcggcgctcgccacgccggccttccgcctcttcgtgagccggctggccgagacggcgcggcgctcgctcgcggaccggcgcccatggacggagctgctggaccgatcggctttctcccgccccgactccctctccgaggccacctcgcgcctgcgccgcaacctcggctacttccgcgtcaactacgccgccgtcgtcgccttctccctcgcggcctcgctcctggcgcaccctttctccctcctcgtcctcctcagcatcctcggcgcctggtgcttcctctacgtcttccgcgcccccgaccagcccgtcgtgctcttcggccgcacggcgcctgccgcattccagaggacctcttccttgatgatccgagcgctgcgtccagtggaaacaccaccagcaggctgatctccttccttgcgtcgcccggatctggggtttgatgcatcaaggaccggtaggaaattcttgtgctcggcgaattcagttgaagtcaaatagagatctgatccagaagctgtataaaccagctccttgctcatgtggtacctcacctgcgagtagcattgtataagtggatccgatttttctgttctactttgtgtggaattacgcaaggatctgcaattgctgtacttctcttgcacttcaccagatctggtgacaatgaccattaagcattgtcaaatgccaacatgtatcggtgtgatctttacattcatcattcatgtgtacaactctacatcatgacaaattttatggatctctggttatttttgcctcattag

SEQ ID NO: 25253 - DNA, 987 bp, Zea mays
  Clone ID: LIB3732-025-H11_FLI
catgatttcgctctcttcttcccgtcgagacccaaccataccagcggcgccgcaggctgacgaggaggcggagtagagtggccggactacctcgacacctccactgcaaccatgggtatctcacgtgattcgatgcacaagcgccgggccaccggtggaaagcagaagacgtggcgcaagaagcgaaagtatgagcttggccgccagcctgctaacaccaaactgtctagcaataagacagtgaggagggtccgtgtccgtggaggcaacgtgaagtggagggctctccgattggatacaggtaactactcgtggggaagtgaggctcttacccgcaagacccgcatcctggatgtggtctataatgcatcaaacaatgagcttgtgaggactcagactcttgtgaagagcgccattgtacaagttgatgctgctccattcaagcagtggtacctcactcactatggagtggacatcggtaggaagaagaaggtgcctgttgctaagaaggatgcgactgagggacaagagggtgaggctatagctgaggaaacaaagaagagtaaccatgtgcagaggaagattgagaagcgacagcaggaccgtgcactcgacactcatattgaagagcaatttggcagtgggagattgttggcctgcatttctgcccgtcctgggcagtgtggccgagctgatggctacatccttgagggtaaagagctcgagttctacatgaagaagctccagaggaagaagggcaagggtgttgcatcttagagcattcttttagctagaactgcaaaatatcttctacttgggggattttgttgttagtctttatgcatatcatttgcggacctgatgaacacttcataagtgaatcaactctcgattctaagaattgataattttcacatgcggtggttgtaattgtgatatttaggtttgctatttattgaaacttcttgtctaaagcagtttaagttt

SEQ ID NO: 25254 - DNA, 888 bp, Zea mays
  Clone ID: LIB3732-027-E9_FLI
cgagaagagcggcggcgcgggcggacaaggagcaggcggaggaggagctgtgccaagccacaatgggtatctcacgcgactcgatgcacaagcgccgtgccaccggtggaaagcagaaggcctggaggaagaagcgaaagtatgagcttggtcgccagccggccaacaccaagttgtcaagcaataagacagtgaggagggtccgtgttcgtggaggtaacgtgaagtggagggctcttcgccttgatactggtaactactcatggggaagtgaagctgttacccgcaagacccgtatcctcgacgtggtctacaatgcatcaaacaatgagcttgtgaggacacaaacccttgtgaagagtgccattgtgcaagttgatgctgccccattcaagcagtggtacctcactcactatggagttgacattggtaggaagaagaaaacccctgctgcaaagaaggataatgctgagggacaagaggttgaggcagcagctgaggaaacgaaaaagagcaaccatgtcacgaggaagcttgagaagcgcaaggagggacgtacccttgacccacacattgaggagcaatttggcagtggacggttgctggcatgcatttcttcccgccctggacagtgtggccgagctgatgggtacatccttgagggtaaagagcttgagttctacatgaagaagctacagaggaagaagggcaagagcgctgtagcttagagcattctcatggattgtcttgcaccgaaatgtgtgtcctgatgagtacacttttttttggttagtcgtctcaagttcagagcgttatgccatgttttcagacctgattagtacactgttttctaaaagcgattgagctctagtccaatgtattgataat

SEQ ID NO: 25255 - DNA, 1208 bp, Zea mays
  Clone ID: LIB3732-028-D3_FLI
tcccggaggaggtgcaccgcggccggggcggcaccgcggcacacgagccggctagccgcgactgtctagtacgactgtacgagacacggcggtagtggcagctggcaggaagggagatgattaaaaataccgtggccacgctgatggtgcgcctccaccacctgcccctgccccgcgccgcgcccgctcccacctaccgttgccgccgccacctcgccctcgcgccccctctccctcggctacgggcatcggccgccgtcatgtcaacggcggcggaacagacgatcgctgaccagaagcgcacgctgcgcgccgaggtgcgcagggcgctgaaggccctctctgccgaccagcgcgccagcgaagatctggctattcaaactacaatactggattcctcttggttcaaagcaagcaaacggttgtgcgcttatataagctgtcagcagttgcgagaagtcgatacatcaaaaatactagcagagtgtctaccgtcaaatcctggacaagaggaactagcaaaggatctttatgttcctcgagtggaggataagaaccgtaatatgaggatgctcaaaatcaccaccatggatgatttagttaagaattcaatgaacattctggaaccatcgcttgtggatgctaccgggaacaatcgtgaagatgtattgtcatcatcgtcccctgttgatctttttttattgcctggacaagcttttgatagaactggtcgaagactggggcgtggcggagggtactatgatacattcttgctgaagtaccaagaacttgcaaaagagaaagggtggaaccagcctctcttagttgctctttcgtactcggtgcaaattatggacgagggcatcatcccagtcaattcaactgatgttcctattgatgctctggtctcatcctctggtgttattacaataagtgctgcggcgttgcagaggatgcaatgaagttgattggccctctgtagccatgctttgacaagaagcaccttcttctggtccctggttgcactagcaaatacaccagcagatcagggaaactgtctcttttttccccctcgtggctcctgtcttgtatcatcttttacgttttaacagggtgaactggacgtctacgtcttattccagccacttcagatttatagatttataatgtaaaccgtcgagctgaccaaaacagtcagtagacttgac

SEQ ID NO: 25256 - DNA, 2290 bp, Zea mays
  Clone ID: LIB3732-028-H1_FLI
ggcgcctttgcctgcatcactcgctcattcggagcccctctcttcgccggcgtcgtaagaagagatggcagagcgtttgacccgtatcgccatagttagcgaggacaagtgcaagcccaagaagtgccgccaggagtgcaagaagagctgccccgtcgtcaagactgggaagctttgcattgaagtgacttcggcgtcgaaactcgctttcatttctgaggaactgtgcatcggttgtggtatctgtgtaaagaaatgcccatttgatgccattgaaatcatcaaccttccaaaagacttggaaaaggataccactcaccggtatgggcctaataccttcaagctgcacaggttgcctgtcccgagacctggtcaggttttgggccttgttggaacaaatggaattggaaagtcgacagctcttaaagtgttggctggcaagctgaaacctaacttggggcgcttcaaaaacccgcctgattggcaggaaattcttacatacttccgtgggtctgaacttcagaactacttcacacgcatattggaagataacttgaaggcaatcatcaaaccgcagtatgttgaccacatcccaaaggctgttcaagggaatgtaggacaagtgcttgaacagaaggacgagagggatatgaaagctgaactgtgtgttgatcttgaattaaaccaagttattgaccgaaatgtaggagatctttctggcggtgagctccagagatttgcaatagcagttgttgcagtgcaaaatgcggaaatctacatgttcgatgagccatcaagttaccttgatgtgaagcagaggctgaaagctgcacaagtcatcaggtccttgcttaggcccaacagctatgtcatcgttgtggaacatgacttgagtgtcttggattacttgtccgacttcatttgttgtttatatggcaagccaggtgcttatggtgtggttaccttgccattctcggtccgagagggtatcaatattttcttggctggatttgttccaacagaaaatcttcggttccgagacgaatctcttacatttaagattgcagagactcaagaaagtgctgaggagattgagacatatcagcggtataagtaccctactatgagcaaaacacaggggaatttcaagcttactgttgttgagggtgaatttaccgattctcagattgttgttatgcttggtgaaaacgggacagggaaaactaccttcattagaatgctggctgggttgttgaagccagacacagtggaaggaactgatattgaaattcctgaattcaatgtgtcttacaagccccaaaagattagcccgaaattcaagaacaccgtgaggcatttgctacaccagaaaattcgggattcctatatgcaccctcagtttgtgtctgatgtaatgaagccactgcaaattgaacaactcatggaccaggaggttgttaatttatctggtggagagctccaaagagttgctatatgcctctgccttggaaagcctgcagatatctatctgattgatgaaccaagtgcttatcttgattcggagcagcgtattgtggcctcaaaggttatcaagagattcattcttcacgctaagaaaactgcatttattgttgagcatgatttcatcatggcaacatacttggctgacaaggtcattgtttatgaggggcgaccttctattgactgttctgccaatgcaccacagtctttagtatccgggatgaataaattcttatcgcatcttgacattacttttagaagagacccgaccaactataggccacgtataaacaagttggactctacaaaggacagggaacagaagtcggccgggtcctactactacctcgatgactaatgaggaagcacagattcttcttggagagccatatggcgcatagtctttcgagggcgcggagagtgcggaaacgagaagctactatgaagctaccacactacatggcatgagacttggttgcaggagtagagtgcgccggttataacttataaagcagagcatgctgtgttgatactggttttttttccctttttggcttgacctatatgaagaaaaggattggcgttaaaatggtattgtgaagggagaggtttttaagcaaaaatgttgtaccgtcgttttgccatcgagtatatttgaccctcgattatatagatcacattaaatttttggagcaacaatatgaaatctcgtgacaagtcgttgtgctttttggttctgattgtaattcattcttgagtttgaatgatc

SEQ ID NO: 25257 - DNA, 792 bp, Zea mays
  Clone ID: LIB3732-029-E9_FLI
aaacctctcaaaccctagccgcctcctgcaagtttcagagctcaggaatctgcgccatggcgagtgagacggagaccttcgcatttcaggctgagatcaaccagctgctctcactcatcatcaacaccttctactccaacaaggagatcttcctccgcgagcttatctccaactcttccgatgcgctggacaagatcaggttcgagagtctcactgacaagagcaagctcgatgcgcagcctgagcttttcatccaccttgtcccagacaaggccacgaacacgctctccatcatcgacagcggcatcggcatgaccaagtccgaccttgtcaacaacctcggtaccatcgccaggtccgggaccaaggagttcatggaagcccttgctgccggcgctgatgtgtccatgattggccagttcggcgtcggtttctactctgcctacctcgtcgccgatagagttgtcgtgaccaccaagcacaacgatgacgagcagtacgtgtgggagtcccaagcgggcgggtcgttcactgttactcgtgacacgtcaggggagcagcttggcaggggcactaagatcacactgttcctcaaggacgatcagctggagtaccttgaggagcgtcgcctcaaggatctggtcaagaagcactctgagttcatcagctaccccatctccctgtggactgaaaagacaacagagaaggaaatttctgacgacgaagacgaggaagagaagaaagatgctgaggaaggaaaggttgaggatgttgatgagaaggaagagaaag

SEQ ID NO: 25258 - DNA, 575 bp, Zea mays
  Clone ID: LIB3732-029-H11_FLI
cgtcggttcacttctccaggaaagggttcgtactcatggcgccgccgcagccaaagtcgggcctcttcgttggcatcaacaagggtcatgtcgtcaccaagcgcgagctgcctccccgcccgtgccaccgcaaggggaaatcaacgaagagggtgtctatggtcaggggcctgatcagagaggttgctgggtttgctccttatgagaagcgtatcactgagcttctgaaggttggcaaggacaagcgtgccctgaagcttgctaagagaaagcttggaactcacaagagggcaaagaagaagagagaggagatggcgggcgtcctcaggaagatgaggtcggctggtacgcacactgacaaaaagaaatagagagcatttcaagttcatggagctggctgccagagattatgttccagtgtctgattttccatacatgtagaacctaatagacatgtcaaagtattatgtatcgaaccagctcatgggattttgctccttccaatgcatccagggtttatgtatcgaaccaatttatgggatcttgctcttgttctaatgcatccatggtttgtg

SEQ ID NO: 25259 - DNA, 868 bp, Zea mays
  Clone ID: LIB3732-031-A1_FLI
ctctgaattgtgggtctccggcgatggcggctctagctccatccaagattctgggcaccaagctcaacttcgccggctcctcccgctacgccacggcagcgcccaccgcgggggctcagaagatcgtctccctcttcagcaagaagccagaggacttcgccaagtaccaggcctacgagctgatccatgccagatgggccatgctcggtgccgctggcgctgtcatcccagaggcgtgcaacaagttcggcgctaactgcggccccgaggccgtctggttcaagaccggcgccctgctcctggacggcaacaccctcagctatttcggcaacagcatccccatcaacctggtggtcgccgtgatcgcggaggtcgtcctcgtcggcggcgccgagtactaccggatcatcaacggactggacctcgaggacaagctgcaccccggtggccccttcgaccccctgggcttggccagcgaccccgaccaggccgccatcctcaaggtgaaggagatcaagaacggccggctcgccatgttctccatgttcgccttcttcatccaggcctacgtcaccggcgaaggccccgtcgagaacctcgccaagcacctcagcgaccccttcggcaacaacctgctcaccgtcatctccggcgccgccgagaggacgcccagcctgtgaggacgcgccacaagccggcagcgatgccaagtcatgcgctgctgccgtccttgattttaccggggaaagagctgtgtgtgagggtctgaagtgaagaacgtgccatgcccatgcgtgtacattatcgagagggggaagaaaccttctcattctgatctctgatatgactgcttcagattgcgcctgag

SEQ ID NO: 25260 - DNA, 1078 bp, Zea mays
  Clone ID: LIB3732-032-E6_FLI
caaagacacgcggaaaagaagaggaagggggaggcgactcgaccgaggccggcgactcgaccgaggcccggtttcaatctccggtcctccgattgcgtccagatctaccagcaatggcatcatcttcggacccatggatgaaggaatacaatgaagcatccagacttgctgatgacatcagttccatgattgccgacagagggtctcttccacagtcaggcccagaaattatgcggcatacttcagccattcggagaaaaataactattcttgggactagactggatagcttggagtcattgcttggcagaattcctccaaagtcaatcactgacaaggagatgcataaacgccaagacatgctttccagtttgaagtctaaagccaagcagatggcgacaagtttcaacatgtcaaacttcactaacagggaggatctgcttggtcaaagtaaaaagccagatgacatgagcagagttgctgggttagataaccaaggaattgttggccttcagaggcaaattatgaaagagcaagatgagggtctcgagaagctggaagagacagtgctgagcacgaagcatattgcattagcagtcaacgaagaacttaccctgcacacaagattgatagatgaccttgaagatcatgttgatgttacaaattcacgtcttcagcgtgtgcaaaagaggcttgcaattctgaacaagcgcaccaaaggtggctgctcatgcacgtgcctgctcctatctgtcgttgccattgtgattcttgcagtcatcgtttggcttctcgtcaagtatctgtaaagaaaagaaagaagcagccggctaccctgcggacctctctcgaaatgctcacctgcagccttcgcttgaaaagttccttctgtgttactccataaaatgtgcagccctttaaaattaatatgtatacacggtggtttcatcttcccttcatgagtggaatggttatggctatgtacattacatagaatttggtacgtacatgatcatcatctgcatgactgcattttgtatatggcgtttgtcagtttgcaatgacagggtgttgattt

SEQ ID NO: 25261 - DNA, 1171 bp, Zea mays
  Clone ID: LIB3732-032-G8_FLI
gccactcgccgccatccgctccgcaggtcacgtgaaaagcagtgcaggcgcaagggcaccgccgaggcagaaaagggcggataaactgcttgaactggaagcgaccctagtccaaaccaccgcaccgacaccgactccgagccccgccgcgccgcgctacctccgctcctctcttcgcccctgccggcgtcgaggccgaagcgaaggcgagcatgcatcacgaccccaaccccttcgacgagggcagcgccgaggacaaccccttctcaaatggaggagccggaggcggcaagcagcagtacggcttccggccgactgagcccgtcgggttcggcggcgctagcaggggcgacgccgtcgttgacgtcccgctcgagaccatgggggactctcggagcaaggtgaaggagctctcgtcgtgggaatcagatctgaagcggcgagaggcggatatcaagaggagggaagaggcgctgaagaatgctggcgtgccaatggaggagaagaactggccaccattcttccccatcatccaccatgatattgccaatgagataccagcaaatgtgcagaagttgcagtatcttgcatttgcaagctggcttggaattgtgctttgtttgtcctggaacttcgttgctgtcatagtctgctggatcaaggagggagattcaaagttgtttttccttgcaacaatctatgctttgcttggaattcctctgtcatatttgatatggtacaggccactctaccgtgcaatgaggactaacagtgctttcagttttggatggtttttcctgtgttacctgatccacattggtttttgcataattgctgccattgctccaccaattgtatttcatgggaaatcattaactggtattctggctgcgattgacactttctctgaacatgtgataattgggatcttttactttgtggggtttgcactgttttgtctggagacactgctgagcattggggttcttcagaaagtgtacatgtacttcagagggaacaagtgaagccagtcatgatggagagttacgtttgttgagaaaatttggagttacttgtggctacttgtagcacatgttcattcgatggttttgtgcatacctgtcagtacaccttgaatctataatttcttatgtcagttattggtgccgag

SEQ ID NO: 25262 - DNA, 880 bp, Zea mays
  Clone ID: LIB3732-032-H1_FLI
gtcttcgtcctcacccttaccggcgacggcgagcaccgcctgggccacgccctcatctcctcgctccgatccgccgtcgcctccgcggcggctggtgcggccaaggcggggcccggggccgcgctcgtcaccgtcggcgagggccgcttcttctccaacggcctcgacatcgggtgggcgggaacctcccgcgcgcgcctaggcgagctcgtcgacgcgctccgcccgctcgttgccgacctcctcgcgctccccatgcccaccgtcgccgccgtcaccggccacgcctccgcgggcgggtgcctcctcgcgctctgccacgactaccgcatcatgcgcggggaccgcggagtgctctacatgagcgaggtcgacatcggcctccccctcccgccctacttcatggccgtgctccgcgccaagatcaccgccgccaacgcgctccgcgacgtcgtgctcaggggcaagaaggtcagggccgcggagggcaaggatatgggcatagtggatgccgtctacccctctgcgctcgagacggcggaccaggccttcaagtttgccgagcagctcgcggcgaggaagtgggacggaggcgtctacgcgtccataaggatgtccatgtaccctgaggcctgcaggtcagttggaatcgtcgaggagagcgatgaggagaagcggaagcacttcgcttctaagctctaacttcgtgattggctgatgagagggtttctgtggaagcatggaggaacctacacattctgtatctgtacatcgtccaaccattggcgctgtcgctacgtgtgaagtacacaccgtgtacttgtgcagaccttgtaatttttacttgcctggtagcgggaaataaatcgaagctcctctc

SEQ ID NO: 25263 - DNA, 600 bp, Zea mays
  Clone ID: LIB3732-033-B6_FLI
gatgtcgtccccgagcaagcgccgcgagatggaccttatgaagctgatgatgagcgactacaaggtggagatggtgaacgatgggatgcaggaattcttcgtcgaattcaaggggccggccgaaagtatctaccaaggcggtgtctggaaggttagggtagaactgcctgatgcatatccttacaaatccccgtccatcggcttcatcaacaagatttatcaccctaatgtcgatgagatgtctggctctgtatgtttagatgtcataaaccaaacatggagcccaatgtttgatctagtaaatgtttttgaagtattccttccacagctgttactatatccaaatccttctgatccattaaatggggaggctgcagcactgatgatgcgtgatcgtcctgtttatgaacagaaagggaaaggagaagagcaggtgattcaggaggagccacaaggcgaggagtatgatctgatctaggtgtcgtttctcagttgacattggcgccgacgatccttagttcgttttatgtttatccttttattttgtaataagtcttccgctatgtaataaatactctgattattgtgacatttatctgt

SEQ ID NO: 25264 - DNA, 1016 bp, Zea mays
  Clone ID: LIB3732-033-C5_FLI
catgttgcgaagcgctgtgctcctaaaatatctgatagtggtgatgatgacactcctgtcacaaaacctgttgtcaaacgtagagcttcaatatttgatagtgacagtgatgaagatgataatgtacctatttctcttgcattgggtaagaaagacaatgctaaggttgctgaggaaactgaacatcaaaatggacaggcaaatggcatcaccaaaaaaaggattattgatgtcaagaaaagaaaacagtcttccatcagcgaggatcctgcatcgtcaatggatatgacagatgctaatgcaccatctgtttcaaaacaagttgatgaaataaaaaagaaatcaaagaaaaagatgagaaatcaatcaggggaaaataatgagaagcagtccaatataagaacattggatgacgggttggtggttgaatatttgtcaatgggaaacaatgatgcaaaagtggcttctgatggctgcaaggtctatatcaaatatgttggcatgttgaaggatgggaaaattgttgagtctaatgttagtgaaaagccttacaagttcaagcttggtgctggaaaagttatccgtggatgggatgttggtattcatggtatgcgtgttggcgagaaaagaaagcttacagttccaccttcaatgctctctggcggtaaatcagtgggagaagtacccgaaaattcttcagtcatatatgaaatcgagttagtgaaagtgaaataaagaaaaaatatgtcaggcttttgcatgtgccctatctcagcagctgcaacagttgcaggaattttgttgatatacagatgactcatgctcatgttttgcttccttctggaagaatttatatgtgccactcgtgccacaccataggacatcgagcagtgaactgcagcgggtgctttatccatgcatgccttgactggatacttggttttgcactatctggctacattactttgtaaactgcatacgatggttgaagcactattgtggtctggtgatttgcc

SEQ ID NO: 25265 - DNA, 1367 bp, Zea mays
  Clone ID: LIB3732-033-D2_FLI
ctgcgcgccgccagccgtcagcccgtcaccgattggagatccttggaaacctgcgcgccgccagcccgtcaccgcttggagacccgctcagccgcgcttccctgcgcgccgccagccgtcgccgatccgtggccgcgtccgccgccgccagctctgaggtcgcgccgtcagccagcccgtctgccgtcgtgaggtactgagggttttgacagataacggcaatcttcttccaacacactgacatgatcagccaatgatgctacgagagctagatatgtgttcaactcagcgtttagttctgcatgttcgtcctgaatgccagccaactttttctgcaactcctcaatcttgttgaggttcatcgctcaaccctgtcgcaaccgcaacgtccatctccccgtcctcgctgcccggaggcctggcacacctcccagtagcagcggcctcccgaagcattgtttcaagttgttattaggcttcatggatatgtctcaagagcaagaacaggattttggcgtactgctgaagcaaggtgcagaagggagggtatttgcttcgacatttgtgggacgaaagtgtgtaatcaaagagcgtttttcaaaaaagtaccgacacccattgttggactcgaagttgactctaaagcgcttaaatgctgaagctcggtgcatgacaaaagcaagaaggcttggtgttcctaccccagtactttatgctgtggatccagttctgcatactttgacctttgagcatgtggatggcttgtctgtcaaggatatacttcttaggtttggttcagatggggtcaatgaggaacgcctgaatgatattgccacacaaataggaaatgccattggcaaactacatgatggaggccttgttcatggtgatttgaccacgtcaaacatgataattaagaacagtaacaatcaattggttcttattgattttgggctgagtttcacttcgacaattcccgaggacaaagcggtggacctatatgtgctagagagagctttgatttccatgcattcgtcctgtggggatgtgatggagaaaatcctggctgcgtacagaaaggcttcgaagcaatggtgctccacccagaacaagctggctcaagtgaggcaacggggcaggaagcgcaccatggtcggatgaatggagaagaaaaaaaatatgtggcatgcaatggatgtatgttattagaaagaccgtcgtctaaaacgagagtgatgtaccaccattgctgtattttttttagcggtgagtggctttggctgctgtaacgtttgtgaaatctggaactatgttgcatggctgcaccatttggtcagaactcagaagcagagtgccgtttcatccgg

SEQ ID NO: 25266 - DNA, 1093 bp, Zea mays
  Clone ID: LIB3732-033-G7_FLI
gccacctgctcggcgagccatggccggccgccgcgaaggcgagcaccaggcgagcccgtggcgatccgggacgcccgcggcggaggaggactcgggcgccttcccctccgccatcatcttcttcgctctcgttggcgctaccgccaccaccgccgccgtcggacaactgcgccggacggtcagctggttctacactcaacttagtaggtcggaaccatatgttttctgggaagacatacctcgtcgaccaaatcgtcatcggtgcggtgaagcctgggaacgatatcaccagaggatgcgtgacaggaccgaggatcaaagggaaagagtggaacgcatacggcacatgcaagatgtatttaaaaaggagagaagtaaatgtcgggattatcgaaattgggatagccataatcccaactattatcagcatcatcaaagagatgactggtactggaacgcagaagcattttatgccaatcaaaggacaaatttcagggcaatgaccagggaagccatgacttacactatgtcacaccactattctgttttgggccttgacaggtcaaggtcagagccattttcagatgctgaaatcaagaatgctttcaggagaaaagcaatggagtatcatccagaccaaaaccaaaataataaagaggttgctgaggcaaaattcaaagaggttatggattcttacgaagcaataaaacgagaacgacgagacagaagttgctgaatgtgaaatgtgctcatggttctcaggcggagtgaggaactgttgtatataaattgtttgatgtgggacaaactaaatctagggctagtttggcatccccatttttccatgggatttctaattcccaagggaaaatgaactaatttcccttgggaaaatgaaaaacccttgggaaaatgaggtttccaaactagcccctaaggtataaaactaccgctctgatccaaaagagcgtgtagcttagtggttacaagggccacaatgccacattagtattttatgttctggcttcgactctctgtagaagggaaaaaaatacgggagataatgaattcagatgggggacgatggcaggtc

SEQ ID NO: 25267 - DNA, 1012 bp, Zea mays
  Clone ID: LIB3732-033-H11_FLI
aacctccacgaatcgccgacactccaacccggaagagccaacgaggtgactccgcgccccggtcatgggtgacagccaatactccttctctcttaccactttcagcccgtcgggaaagcttgtgcagatagagcacgcgctcacggctgtcggatccgggcagacctccctagggatcaaagctgccaacggtgtagtgattgccaccgagaagaaactgccttctattttagtggatgaaacatctgtgcaaaagattcaggcactaacaccaaatattggagttgtctatagtgggatgggtccagattttcgtgttctggtgagaaaaagtcgaaagcaggcacagcagtattatcggttgtacaaggagcatatacctgtaacacagcttgtgcgggagactgctgctgtgatgcaggagttcacacagtcaggtggtgtaagaccatttggagtatcactgttgattgctgggtatgatgacaatggcccacagttgtatcaggttgatccctcaggatcatacttctcctggaaggcatcagccatgggaaaaaatgtgtcaaatgcaaagacatttcttgaaaagagatacacagaggatatggaacttgatgatgccatccacactgcaattttgactttgaaagaaggatatgaggggcaaatttcctccaacaacattgaaatcggaattattcgagctgaccgtgagttcaaagttctaagcccatcagagatcaaggatttcttggaagaggtggagtaagttgtctgttgatgatttactgtttcaaacaagaatagcagcatcacttatgagcagccagcctgaagcttgtcttggttttatcactctgtaaactgatttgctccagcgacatgtcttggttttatcactctgtaaactgatttgctccagcgacatgtggttcttacatttgaaaccctcctgaacgcatactgtagacaaatgagatacgtaagatggattttgtatttgacagtc

SEQ ID NO: 25268 - DNA, 1400 bp, Zea mays
  Clone ID: LIB3732-034-D10_FLI
aattgatgttcagagaagatgattttgctttaggcaatggtaatgaagacggtgacagcgacagatttgtttacttcgtcataacgtttctctccctccatgatggccctattttgaagtttgaaatgaatgctcgacgggttcacatgttttctcctggaggacacatccacaggtggatgcttatgctgtcaagaaatggaataaaagaaattcaaattaagacaaggatatggaggaattacaaaatcccttcttctttcttctcatgcgtggaattggaatatgcttgcctgcaaggatgtatattccagttgccacctctgtttgcaggctttaagcggatgcgtacccttcatttcgttgagttctgtgcaacggaaaacaatattggggaattagtagcgagctgcccgaacttggaggaacttattctctccaggttgctcagctttgctgatatcaccatccactcaacaaagctcaaagtcctaagagttgatggcatgtttaaacatctcaatcttgtgacgccgcacgtctcttcagcagtgattaacctgcaagttaacactggttatgtcaaaagggctgggtccaactttaatctttcccaattcattggttctcttttggatattgaaaatatttcattgctcgggcacgcttttgagtgtgcagcacatggaatcgtgcctggtaaactaccgagatcgttaaatcggctgaccgagataaccctggagcttgaccttggtaacctgaaggaagcaaacgcggctcactgtttgtttcaaattgctcccaacttgcgacgcatggagctacagcttatgcacaggggctattctgcacccacctcgagtttctgggactcggttgatcgtcaggattgtctcttcaagaacctttacacagttgtcatgaacaacttcactggttcctgtgcagagtcaggcttcttgaaacttctgctcgatgacgcgcctgtacttagaagtgcgcggatagaagacaacaacaaactggacaaagaatccctcaaacgcctcctgaagatgagaagagcatccaaggacgcagaaataatcctcctttgaggcgtggtcccctggctccagtagatgcccactgttctttcctggtgaagcgatttggtctgctgtgttataggttttattcaactaggcgtttgggcacaacttcgtctgaacaaaagttgtgtcttcgcgtatacctgtgtttcagtgtgtcaccttcagcaaagctaaatgttgcacccgagtcagagtcgtgtttcttttagcattttgtgttggtacttcgaaattctcttgctgcgctggccaacatgggtttgcttatatggctttggaatgatggacaaaatagtgcttgtt

SEQ ID NO: 25269 - DNA, 2508 bp, Zea mays
  Clone ID: LIB3732-034-E6_FLI
cgctggacacttccatcaatctctttcccccttcccttggattcgtttcagctactgaaactgaacgcgggcagtggcaggcaggatcagccgagccgagttccatttccgccaccgtcccttccccctctgcccctcgttcctcgtcttctctatttgcttggcttggcttgcttttggttcaacttccacaccattcattcatttcttggatttctttggtggcgtccgcaagtcaagtcccttcccccttccgcccctcgtcaaagcaagcaagcaaaagtggtgcggtgccatcagagtaagcaagctccccattttccctattcctatactactactagtagctgcagcagcatccaccggatggccatgtccagcgacaccgccgccacgacggggacatgcaccaagcccaaccccaaccaccgcctcccactctcaatagcctgattgattcatggcctccgcccccaccaccgcctcttctccgctaccggcgtcctcgcggcccactgccacaccgcccgacaccgctgccacgcccccgcccctcacctctcccgcacccgccgctcctccaccctcctcccactcccactcccactcccagccgtcgcctgggcctcctcaacacacagcctcgtcgccgccgcgggcggctgctgctcctccaaggccgccgctgctctcgccccctccaacgtccccgacgccgtctgccgctccgacgccctcgccatctccgccagcgtccccggcccctgcaccacctccttttagcgctcctccgccgtcagcacgaccactgcctacgcctgccatcgcagtcgacccggccaggggcaagaacccaagttggaacaagtcgtccagcccgggtgcgccgtccaggagcccatccgccccctttggcggccttggtaatggtgttgtagccatcgccgctgcggtggtcgccctgctccttcttagcctcctagtcacagcagtttggttcaaccgcaagcgcaagaggaagcagatgagtggttacagagctggtctcatgtcgcctttttcttcgcagcaaccttcgggtgaatctgcaaatgtaggatggtcagctgatccttctgtccacaccaactatagcgccgggagccccaggctgaaacaatgcttgtctgatatcagcatgggcaactccaggttcttctcatatgatgagctgtatcagatcactgatggtttctcagctcagaggctgctaggggaaggaggctttgggtcggtgtacaagggccgcctgccagattataaagatgtcgccgttaaacgactaaaggatggcggcggacaaggggagcgcgagttccaggccgaagtggagataattagtcgcgtgcaccaccgccatttggtttctcttgtgggatactgcatttccaatgaccaaaggttacttgtatacgactttgtttctaataacacgctgcattatcatcttcacggacacggaatgcctgtgttagaatggtccgcacgggttaaaattgctgcaggtgctgctcgtggaattgcttacctacacgaagattgccatccgaggataattcatcgagacatcaagtcctcaaacattttgttggataacaatttcgaagcaaaggttgctgactttggtcttgcgaggctggctttggatgctgtaacccatgtgacaacccgtgttatgggaacatttgggtacatggctccagagtatgcatcgagtggcaaactgactgagagatcagatgtgttctcttttggtgtagttttgttagagcttattactggccggaaacctgttgatgcatcaagaccaatgggtgacgagagcctcgtcgagtgggctcggccattgctctctcgagccctggacacaggcgatttggaagggttggttgaccccaggctcgagatgaagttggacgaggtggagatgttccgcatggtcgaggccgctgcagcctgcatccggcactcggcgtcaaggaggcccaggatgagccaggttgtgcgggttctcgagagctcagcggacatcgacctgaccaatggtgttcagcctgggcaaagccagctcttcaacgtggccaacgcggcggagatacggatgttccgccggatggtagccggcgcgcaagacgacgacagctctgacttgacacagtacgattggagcaggggtagcgacgctgccccgggctccaggatcttgtaacgatgaccacattgtggtttctgaattctgactctgcctgcagtacttgttctgtagggagagggatggaattcagttcaaagtttgttccctgaccggccgggtcttattctttaggaaaaaacaaagtgatgtgttgtgttgtgtgtagagaagattgcactcctaggtttggtgtgaaggaagaggtttgcagttcattcagatttttaggcagtcaaggacaaggacgtggaaattgaagcaattgttgttacttg

SEQ ID NO: 25270 - DNA, 1078 bp, Zea mays
  Clone ID: LIB3732-034-G6_FLI
ccaaggatgaagagaagagttgaacttggaatgtttcactccatgcctccaattagtaggagatatcagaccaactaattggcagagcatcagaagcagctgcgatctgatcgacatggctgccgccaccatggctatcacctcccgcgcgctcgtcggcaagccggcggctggcacgagggacgtcttcggcgagggccgcatcaccatgcgcaagaccgccgccaagcccaagccggcggcgtccggcagcccatggtacggtgccgaccgcgtcctgtacctgggcccgctgtccggctcgcccccgagctacctgaccggcgagttccccggcgactacgggtgggacaccgcggggctgtcggcggacccggagaccttcgccaagaaccgcgagctggaggtgatccactgccgctgggccatgctcggcgcgctcgggtgcgtgttcccggagctgctcgcccgcaacggcgtcaagttcggcgaggcggtgtggttcaaggcgggctcccagatcttcagcgagggcgggctcgactacctcggcaacccgagcctggtccacgcgcagagcatcctggccatctgggcgtgccaggtggtgctcatgggcgccgtcgaggggtaccgcgtcgccggcggcccgctcggggaggtggtcgacccgctgtaccctggcggcagcttcgacccgctcgggctcgccgacgacccggaggcgttcgccgagctcaaggtgaaggagatcaagaacggccgcctcgccatgttctccatgttcggcttcttcgtgcaggctatcgtcaccggcaagggccccctcgagaacctcgccgaccacatcgccgaccccgtcaacaacaacgcctgggcttacgccaccaacttcgtccccggcaagtgagcgagggcatgatgcttgcatgcgtgtaccgtagacgtaccgtattcctacgtactgcaggttgcaccagtatttgtgaagggagctgtgcgtgggagccagagattgtaccgctagtgtatttttgtatgcacgctgtggagctgatcaatgaaatatgctgtaaat

SEQ ID NO: 25271 - DNA, 1088 bp, Zea mays
  Clone ID: LIB3732-035-B7_FLI
gctcagtgacgcggaggccaagttcctgcccaacaacatcaccgtcgttggctccgtctactgcgacgcctgctccaacaataccttctccaagcacagcttcttcctgaaaggggccagggtgctgatcaagtgcagcttcaaggtgaactcgacgtcgtccgaagagctgtccctggaagcggagcgcaccaccgaccagcacggcgtgtacaagctggacgtgccccccgtggacggcttcgagtgccgcgagggccacgagctccggtcggcgtgccgcgccacgctcgtccggagctcctccgccgcctgcaacgtcccgggcctcggggcctccacgcagcacatcgagctccgctcccgcgccaccagcgcctgcttcctcaacctcaacgcgctcaacttccgccccgccaaacgggacggcgcgctctgccacgcccaagggggcgacgacgcgttcggctcctcgcttttcttctggcccttcctgccgctcttctggccgccgttcagggtcccgggcggcggcgccggcgggacggtgtcgttcccgtggccgttcccggtgccggcctggctggtgccgttcctgcggccaccgttcttgccattcccgctctacgagccggcgccgtcaccaccgccgccgttctaccgtttcccgcctccccgagaagcggtttctcggccttgaaatcccatgagccaagaagcttgtcaagatacgctattttagcctttcttggcattagattgtgtgttagtgatgagaaactgatcagaggtcgtgtgatatttggcccggccccatgataggttgacctccgtgcgcatgtaaccgatgctagtactgatgctgccatgtagttcattgtgctcgtgaactgatgaacacgtgtggtctgatatttagtagtggcaaactggcaatggttacttgttacatctcctatttgaaggttcagccaagaaagcccatggtgtatatttccgtgcagtaagattaaattcctaatgaatcggtccatcgtatggggtgtttggtttgaagaatcaattcattctagatgaaatggtgcatc

SEQ ID NO: 25272 - DNA, 2483 bp, Zea mays
  Clone ID: LIB3732-035-C10_FLI
cccagcccggcgaccccgccgcgctcctgcctcgcctcgcctcgccgtcggcgaccgaccccacgtctgcccggcgatgtcctcctccgtatccattgcggcagagtgggatctcctctccgatcgcttctaccgccggctcacactctactcacctctcccatggtccaccccagccgcggccggcgcgacctcgtcctcctccggcgtcagcggtgctgtgatcggtcgccttgacctgtccacccacatcgtcgccgccgcgccctttggaggcccgatcgccgccgtccgcgacgactctaagatcgtgcagctccactccgagccatcccgccgccgcgtcctcctcttctcctcctccggccacccaattgcctccgcgccctggccaccccttctcccacgcctccactcgctcggtttctccagctccctcagcctcctcgcacttctctccgacggctcgctcctccgcttccgcctccccgatctgcaacccagcccttgctccagtcccgttcccctgctcccgccggcctccggcggcgtcgccgacgctctattctggggcggcggtgtagccatcctcacggaagacaaccgcgtcgtggtggccactgacatcgaggtcgacgatcctcacccccgtcacctcgccgacccaggcatcggtgatgaggaacatgttctgtgtatggccgtggtggaggcacagtttgtcatgtcagggagcccagaagtgctgcttgctgttggcgaccgggtcattgcggttgacgaggatggcgtacaagtgcttggggaagagctggagattggacccgtgcagaagatggcagtttcacccaatggcaagctcctcgcagcatttgcacatgatggtcgccttctcgttattcccaccgatttctctaggatcatattcgagtatgagtgcgaatctgcattgccaccagagcaaatagcttggtgtggactagacagtgtactcgtctactggcctgaagtgcttttgatggttggtccaaatggagatcctgtccaatacaattatgatgaacccataaaactgattcctgagtgcgatggtgtaaggatcctatctaactcaagtatggaatttctacaccgagtctcagactctaccacgtcaatttttggcattggaagcatgtccccagcggcattactgtatgatgctcgtgatcactatgacaggcaaagtgcaaaggcttatgacaactatcaattaatatcatcttcattgcctgaggcaattgaggcttgcatcgacgctgctggccatgagtttgatgtttcacgccagcgcacattgctgagagctgctacatatggcctagctttctgcagtcgatttccacatgaacgctttcaagaaatgtgcaaaatgttgagagttctaaatgctgttcgtgatcctgagattgggatgccactgaccattcatcagtacaagctgcttactacatcggtgctcattggacgtctcattaatgctaatcagcaccttttggcccttcgcatctctgagtaccttaacctgaacccggaggttgtgataatgcattgggcatgtgagaagataacagcatcaacaactcttccagatacagtccttcttgatggtctgcttgataagctcaggctatgtaaagggatatcatatgctgcagtggcagctcatgcagataacagtggtcgacgaaggttggctgcaatgctcgttgatcatgagtcacagtcctctaagcagatccccttgttgctcagcatcgatgaacaagacaaagcattatcaaaggcaattgaaagtggcgataccgatcttgtgtaccttgtgctattccatatttggcagaaggtagctgtagagaagaaagctcctttggatttttttggtgttataaatgcaaggcctgtggctagagatttgtttatggcatatgcaagacattctaagcatgaagaattgaaggacttctttttatcgactgggagacttcaagatgccgcctttcttttgttgaaggaatcatgggaattggagaagaaccccatggcaagcaaggggtctcctctccatggtccacaagtgaggctcattgagcaggcccatagactttttgctgaaaccaaggaacatgtttttgagtccaaagcttctgaagagcatgccaaattgctaagatcacagcatgaacttgaagtttccacaaagcagccaatatttgtgggttctagtgttagtgatacaataaaaacctgtattgcaatgggaaacgagcgtgctgcactcagagtgaagtccgaattcaaggttcctgataagaggtggtactggcttaaaacgtgcgctttagccacagttggaaactgggatggtttggaaaaattttcaagggagaaaaggccaccgggaggctataaaccttttgtggaagcatgcattgatgctggtc

SEQ ID NO: 25273 - DNA, 654 bp, Zea mays
  Clone ID: LIB3732-035-C4_FLI
tttacaactaaaccaactgagcaatggggaggcaaccgtgctgcgacaaggtggggctgaagaagggcccgtggtcggcggaggaggacgagaagctcgtcaccttcctcctcaccaacggccagtgctgctggcgcgccgtgcccaagcttgccgggctactgcggtgcggaaagagctgcaggcttcggtggaccaactacctgcgcccggacctcaagcgcgggctgctgtcgtcggaggaggagacgacggtgatcgacctgcacgcgcagctgggcaaccggtggtccaagatcgcgtcgcacctgccgggacgcacggacaacgagatcaagaaccactggaacacgcacatcaagaagaagctgaggaagatgggcatcgaccctgccacccacaagcccctccacccacagccagcagctcctcctccgactcagcaggagcaggacacgggcgggtcgcccgaggaggagggggagaaggccgacgcggtcatgatggcagcagctacgccgattatcgggcacgagacggcgccgttctttaccgacgaggaggagatgctggcgcacctccttgacgacatcgacgacttcccacccgcggcttattctcccgacgactcttcttcgccctcctcctcctcct

SEQ ID NO: 25274 - DNA, 1011 bp, Zea mays
  Clone ID: LIB3732-035-D6_FLI
cgcaccgcaccggcggcggggatcctgatccgcctctgctcgctgtgctcggccggccggccggctcaccgccgggagtgtcacctgcgcatttctttcagagtcggtcggcttgcaaagcaaagagacgatggcgccgacgacgacgctcatcgtcaccgtgaacctggaatgctgccgctgcagcagcaagatccagaagatcctctgcggcattcagcaagaaggagagttcaccatcgagaagatcgtgtacgagaaggacaaggtgttggtcacaggcccattcgacgccgacaagctgtcctgcaagctgtggtgcaaggcgggaaggatcatcaaggacatccaggtcgccaaaccaaaagacgaaaagcctaaaaacccttcatgcaagctggtatacccttattacccttgctaccctttccagctgtgcccgcagcagcagcccggtgcatggccctgcagcggcggctgcccacatcctcactgtgggtgccagtccaagccgccgccgccgccggttccaccaccacctccacctccacctccacctccgccgcccatgccgccggcgtgccagtgctccacgtggccgtcgtgctactgcggcggctacccgccgcccatgccgccgtcgtgccagtgctccacgtggccgtcgtgctactgcggcggctacccgccgcccatgccctacccgatgatcgtctgcgatgacagcccgccctatggcgcctgcaccgtgatgtaatgctgctgctactcttttccctgccgtaacaaattaaagcagggccggggtcatatatcgcagcctgtattcatgcctacatatatacgagagctagcggctctccattacctaaagaaaatgttctcctgtgtatttcattgccagtactgtatcaattagtatagttaccggtgtgtaccataaacctcacggcagttcatcaattatatgttgttttccgcccagaatactatatatgtttctaggaaaac

SEQ ID NO: 25275 - DNA, 1498 bp, Zea mays
  Clone ID: LIB3732-035-F9_FLI
gtcatcttgtctcgatcctctgctccgtgttcatggcgacgtccatgctctccgccaccacggtgccactccagcaggtccaggggggcggcctgtccgagttctccggcctcgtcaggagctccgcgtcgctgccgatgcgccggaatgccacctccgacgacttcatgtccgccgtctccttcaggacccacgcggtacgtgcctgccggccgatcgatccgcgcgcggtcgtgccgcatcgtagcgtaggaatgtgttagtagcagcacgatcgaacggcttggggtcggattcacatgtctgcgccgctgctgcccctggctgcctggctcgcttgcttgtgcttgtgcatcgatcaggtcggcaccagcggcggcgggccgaggcgggcgccgacggaggcgaagctcaaggtggccataaacgggttcggccgcatcgggcgcaacttcctgcggtgctggcacgggcgcggcgacgactcgcccctcgacgtcatcgccatcaacgacaccgggggcgtcaagcaggcgtcgcacctgctcaagtacgactccacgctcggcatcttcgacgccgacgtcgagcccgtcggcgacaacgccatctccgtggacggcaaggtcatcaaagtcgtgtccgaccgcaaccccagcaacctgccgtggggcgagcttggcgtcgacctcgtcatcgagggcaccggcatcttcatcgaccgcgagggcgcggccaggcgggcgccaagaaggtgctcatcacggcgcccggcaagggcgacatccccacctacgtcgtcggcatcaatgccgaccagtacaacccggacgagcccatcatcagcaacgcctcctgcaccaccaactgcctcacgccattcgtcaaggtcctcgaccaaaagttcggcatcatcaagggcaccatgaccaccacccactcctacaccggcggccagaggctgctggacgcgagccaccgcgacctgcgccgcgcccgcgccgccgcgctcaacatcgtgcccacgtccaccggcgccgccaaggccgtcgtgctggtgctccccaacctcaacggcaagctcaacgggatcacgctgcgggtgcccaccccgaacgtctccgtcgtcgacctcgtcgtgcaggtctccaggaagacgctcgccgaggaggtgaaccaggcgttccgcgacgccgcggccaacgagctgcagggcatcctcgaggtctgcgacgtgccgctcgtgtccgtcgacttcaggtgctccgacgtctcctccactatcgacgcctccctcactatagtcatgggagacgacatggtcaaggtcatctcctggtacgacaacgagtgggggtactcggagtctcgcagagggtcatcgacctcgctgatatttgcgccaaccagtggaagtgaagcattgcattgcattgtaatatcttgtaaacaaagcacaagaatggacacattgtcacaatgaaatcgttttgtggac

SEQ ID NO: 25276 - DNA, 1554 bp, Zea mays
  Clone ID: LIB3732-035-H8_FLI
acccctaaccttttcgcagctccaggctccagcgcacagccgccgccgtttcttcatcttcttcgcagagccggcgctccatcttcggctccctcccttacttgcgctcggcacgcaggcggcggcggcggcgctgtggctcgggatctcagtgacggcatcagcggcttcccctcccgcctctcgccagtcgcctccggtcctccgcacaccggccggtgatctctctcctcccgcctccggtggatcgtcaacgacgcccggccccggcggctgcgccgcgcgcgtcctgagggcagctgcaggcgctgctccaccaaggcggtcgcgccgctttgggagcggtttatgcccccaaagtgaagcgtgctcttagtgccgctctttggaaccctggctactgctgttaaatggctcaaccttcagtcattctagcaactgcaagttatgatcacacaatcagattttgggaagccaagagcggtcgctgttaccgcactattcagtatccagactctcaagttaatcgccttgagataacccctgacaagcggttcttagctgctgctggcaatcctcatatccgcctttttgacgtcaactcaaatagccctcagccggtaattagctatgattcacatactagcaatgtgatggctgtgggatttcattgtgatggtaactggatgtactcaggctctgaagatggtactgttagaatttgggatttacggactggcacttgccaacgagaatatgaaagtcgtgctgcagttaacactgtagttctgcacccaaatcagaaagagctaatatctggtgatcagaatggaaacatacgtgtatgggatttggctgctaactcatgcagctgtgagttggtgccagaagttgatactgctgtaagatctctgacagtcatgtgggatgggagtatggtggttgctgcaaataaccgtgggacatgttacgtttggcgcctgcttaagggtactcagacaattacctgcttcgaacctctgcacaaactgcaagcccatgatggctacattctgaagtgcctgctttcacccgaattttgcgatccaaacaggtatcttgccacagcatcatctgaccgcactgtaaagatttggaatgtcgatggcttcaagttggaaagaactttagtcggccatcagcgttgggtttgggactgtgtcttctccgtcgatggtgcttatctgataacagcatcttctgacactacagcgaggctatggacgatgtcgactggagaggccatcagggtgtaccagggtcatcacaaggccaccgtgtgctgtgctctccatgatggagcagaatcagcgccctcataagcatgttgtgactgcttttctgtacatacgttagattgcagaactctttcactcttgtaaacttgagacctagcaagttgttaacgcaagcctctggggttgcgtacaaataatttgcgtgctgttggtggatgtttaaacctgctatgttttatggtgtgaatgctataaaaagacaacatgttcgttcaat

SEQ ID NO: 25277 - DNA, 870 bp, Zea mays
  Clone ID: LIB3732-036-C3_FLI
agttcattcaccgccggctccttcatagttcattcccgaggcagagattttttttggggggtgaagcaccgcgcaactccttctcagttctcagcggcagacatgcagcggaacaactcgttcgggacgtcgtgggcggaccagtgggactacggcggcgacccgagcccgagggcgccgcgcgacggcggcgtgggggagaagaccaaggcggccgcggccaccggcatgaggaaggtgaaagagggcacgtcgcaggggttccagtggatcaaggacaagtgccagcggaagaacggcggcggcaacaagaagcagcagggctccgaggtccctgggtactgacccctcctgtcctcgtcacgtcagtgctgttgcttggcagacagcagaattttctaaattttttctcggttcttgctgttggtacgaatagtatactgcgtataggttgtgatctgatctcggtgctggttgcagttgtagagtagtttcatcgtacctgatatgtctccttgatactgaattggtcacttcgatatatataaaaggatatttatatcgaagtgaccaattcaggatcaaggacaagtgccagcggaagaacggcggcggcaacaagaagcagcagggctccgaggtccctgggtactgacccctcctgtcctcgtcacgtcagtgctgttgcttggcagacagcagaattttctaaattttttctcggttcttgctgttggtacgaatagtatactgcgtataggttgtgatctgatctcggtgctggttgcagttgtagagtagtttcatcgtacctgatatgtctccttgatactgaattggtcacttcgatatatataaaaggatatttat

SEQ ID NO: 25278 - DNA, 2774 bp, Zea mays
  Clone ID: LIB3732-036-E1_FLI
aaacaatgttgcttctcgcctgctagtcgccctattctactccactccgcccttggacccgccgccgccgccgcttgccgggtctatagccatgtcaccagcggttgcctctgcctcatctggcgaccgcatacgaacctacgaagacttcgtgcgggtacacgcgtacctgctggccgcggcgggcatcccgccgtcgctgcaccagaggctgtaccgcaagctcgcggacgaggtcttcgacggcggggaggtctttgccgtcgagccgtgcgaggacgggaggcagcggcgcctcgtgctcaccgccgatcagtctctaggaaaagagtccgatgtcttcctcgtcgaccatgcgtggtccttccgcctccctgatgcgctcaagcagttgcgggaagtaccaggattggctgaaaggatggcagcattgatgtgtgtcgatttggaccgcaagattgaagaagatgagcaggatgatgacgagagtgggagcttggagcatgtatcgcaagtagtcgagaaagaaagggctagagttcaggagagaagtgattctacagcttggctggaacttgaagaacttggaattgatgatgacatgctagtagccttggatctatctgcaaattttccgaatctagtagctctgaacctatggggaaacaagctgcgggatccagagaaagttatgcaagaaatcaggaagtgcacaaagctaaaggcactttggttgaacgagaatcctgttcttggcaaaagtattgacaaagctgttctcgatggcctctctggattggaaatatacaattcacattttacaagtaaagccggagagtgggcactaggtttttgcgcagacattgttggagtagataatccctgttcttctgtggaaagcacattgtttgggagcattgggactattgacctttctgatagatgcattcacaagctaccagaggtgttctctcctagtaaattgccatctctgtcaaaattgaacgttcgtggtaatcctctggatcaaatttctggcgatgatctcttaaagctatttggtggattcactcagttacaagagttggaggttgacattcctggccctctgggaaacagtgcaatctccattcttgagtctcttcctaatttatctttgctaaatggcgtggattcctcaagcataatagagagtgggaagcatatagttgactctgcacttgaaccacggcttccagaatggtcacctgaagaaccccttgctgaaagagttattggcgcaatgtggttgtatcttatgacataccggcttgctgatgatgaaaagattgacgaaacacctgtttggtatgtcatggacgagttgggctcagccatgcgccacagtgataatgcaaacttcagaatagctccattcttgttcatgccagaagggaaactgcacactgctataagttacacaattctgtggcccactcatgatgttcatactggagaagagtgtacccgggatttcttgtttggtattggtgaggacaaacagcgttcagctaggcttacagcttggttccgcacacctgagaactactttattcaggaattcaggaggtaccaggaacagcttcaatcaaatagcatttgttcttcgacaaaaatagaagagacacagacaccctcaaccaaaagtgtacgcccaagggatggtcgcgtccttcgagtatatactgacatacctcatgtagaggagtttttaacacggccagaatttgttctcacgactgatccaaaggaagctgacatcatctgggtaagcatgcaagtagattcagaagtaaagaatgctgtagggctcacagaccaacaatacaaaccaatttccttttgaagcttgcctggtcatgaagcaccaccttgcggagaccatccacaaggcttggggctcacctgaatggcttcaacctacatataacctggaaacccatttgtctccactcattggtgattattgtgtgaggaaacgagatggcatggacaatttatggatcatgaagccttggaacatggcgagaacaatcgataccacagttactggtgatttgtctgctatcatcagacttatggagacaggccccaagatatgccaaaaatatattgaacgccctgcacttttccaaggaaggaagtttgatcttcggtacattgttttggtccgtagtatccgccctttggaaatatttctgtctgatgttttctgggttaggttagcaaacaatcagtacactttggagaagactagcttttttgagtacgagacccatttcactgtgatgaattatatcggaaggatgaatcatatgaacacgccagagttcgtcaaggggttcgagaaggagcaccaagttaaatggctggacattcatgaaagcgtacgatctaccatacgccatatctttgaggcagccgcagctgtccatcctgagatgcagaacccattctccagggccatctacggtgtagatattatgcttgacaacagattcaaaccaaaggttttagaggtgacatactgtccagactgcgggagggcatgcaagtatgacacgcaagctctggtaggaagccaggataccatcagaggccgtgatttttttaactcggtgtttggctgcctctttcttgacgagcaaacgcatgtattgcccttataggcatccgccccagaggcggctgctgtaacatcaggttttatcataataataacgtgacatatgtat

SEQ ID NO: 25279 - DNA, 864 bp, Zea mays
  Clone ID: LIB3732-036-F5_FLI
gggccggtcttcgtgtgctgtgttcagcagctagcagtgcgtgccgagatgttcgcgagccggccggtggtgcacccgctggaggtggcggcgcccgcgcatccggtgcagcagccggcgccgggcgtgctgatgaaggacctgcccggtatgccggggacgcccggaggcctcggcctccgcgtcctgcagctcctcttcgcagccatctcgctggccgtcatgtcgtccaccgccgacttcgccagtgtctccgccttctgctacttaattacaacaaccgtcttgcaatgtgtgtggagccttacggtagctattgtggacatatatgcactgcttgttaagcgttgtttacgaaatcgtcgggctgttactctcttttccattggagacgggatcacatggctagtgtccttatctggagcatgcgctgcggcaggaatcaccgtcctgatcgacgcagatctgatcatgtgctcagagaacccttgtgctagttttcagactgcagtggcaatggggttcatgtgctgtttttctctcttaccatcctttctcctgaacttttattcgatcgcatctagtcatggctagctgaaaagaaagaggaggatagaacctgatctcggagcagtttgagcatccaattgcggttttagtgacaacaggatagagtggcacagctgttagtattagaattggaaggtgaagtatgtgtatggctcaccatatctagtttaacctgtaaaaaagaaatagggaacggcctgtttggccgcagctgcattaccttgcagttctgtggtactactatgtaaaatgcttgaaaatgttatagttttaacgtgtcctgactcttcaacc

SEQ ID NO: 25280 - DNA, 1587 bp, Zea mays
  Clone ID: LIB3732-036-F7_FLI
gcagcaagtagtgaccaggagcgagcagccaaggaaaggagtcaagcaatggagaaggccgtcgacaggcagcgggtcctgctgcggcacctgaaccccgccgcggcggccagccccgccccgcacgccatctccgcaagcgcgtgcgcggcgggggacagcgcggcgtaccaccggaggccggccttcgccgacgacgtcgtcatcgtcgctgcttacaggacggcaatttgcaaggccaagagagggggtttcaaggatacctttgctgaggacctcttggttcctgtcttcaaggctttggtagacaagacgaagctggacccaagtgaagttggcgacattgttgttggtactgtcttagctcctggttcccagagggcaatcgaatgcagaatggctgcactgtatgctggtttccctgacactgttcctcttaagactgtaaacaggcagtgctcttctggccttcaggcagttgcagatgttgccactgctattaaagcagggctctatgacattggtattgctgctggtttggagtccatgacagtgaacaaagttagtcttgatggccaagcgaatcccaaagttgagctgttttctcaagcacgcgattgtcttctcccaatgggcctcacatctgagaatgttgcacaccgttttggcataacacgactggagcaagatcaagctgctgttgagtcacatagaaaggctgctgccgcagcagctgctggtaaattcaaagaggaaattgtgccagttcatacaaagattgttgatccaaaaactggtgaggaaaagaagatcgtagtctctgcagatgatggaatccgagtggatacttctcttgcagtcctgtcaaaactcaaaccagcattttcaaaggatggcagcactactgctgggaatgcaagccaagtgagtgatggtgctggggccgtcttgctaatgagacgggatgttgctatgaagaagggtcttccagttcttggtgtctttaggacctttgccgctgttggagttgatccagctgtaatgggtattggtcctgccgttgcaatccctgcagcagtgaaagctgctggccttcagatggatgatatcgatcttttcgaaatcaacgaggcttttgcatctcagtatgtctactgctgcaagaagttggaacttgatcctgctaaagtcaatgttaatggcggtgcaatggctcttggacatcctttgggtgctacaggtgcacggtgcgtcagtactcttctcaatgagatgaagcgccgcggcaaggattgccggttcggagtgatttctatgtgcataggttctgggatgggtgctgctgctgtgttcgagcggggagacggcgttgatgagctcaccaatgctcggggaatctcgacccacaactggctttccaaggacgccatgtaaagctacacccaccaaaatttgccggaactggtagcattgtttccagatcgctgtagggagcgaattggggaataaaatgattttgtatttgtcgcccctgctggggatttagtaagatttttacgccactggtattggaacttgcttacctgg

SEQ ID NO: 25281 - DNA, 726 bp, Zea mays
  Clone ID: LIB3732-036-H5_FLI
ggggtgggagacccgcgagaggctgccgtgtagggaccgtagactcagcgactgcgaaggagggataaggggatggccgggatcggaccgatcaggcaggactgggagccggtcgttgtgcggaagaaggcacccaccgccgccgccaagaaggatgagaaggccgtcaacgccgcgcgccgcgccggtgcggagatcgataccatgaagaagtacaacgctggtacgaacaaggcggcatccagcggtacatccctcaacaccaagcgcctcgacgacgacaccgaaaacctcgcccatgagcgagttccaagtgatctgaagaagaatctcatgcaagcaaggctcgataagaagctgacacaggcacaacttgctcagatgataaatgagaagccacaggtgattcaggagtatgaatcaggcaaggcaatccccaaccagcagatcattagcaagctcgagagggccctgggaaccaagttgcgtggcaagaaatagctttcctacgagtttgtgtcccggagcatcataatagggggaagacaaggcaagctgtctgcttatttgtctatgtttggtatctcaagtcctgcggactgtttctgttggcacaagagggaataaatgtgttcacggacctgtaatgcttgctccttgtcatatgaccttgctctaaacatttgtgatgaagctgtcaaggtaatatattttctctaaatattt

SEQ ID NO: 25282 - DNA, 536 bp, Zea mays
  Clone ID: LIB3732-037-B4_FLI
ttgttggggactgtgaggtgggggcagcaaagaaagcatgcaagaactgtacttgtggcagggctgaggccgaggagaaggttgggaagctggagctcactgcggagcagatcaataaccctcagtcagcttgtggcagttgtgggttgggtgatgccttccgctgtggaacctgtccctacagaggtcttccaccattcaagcctggcgagaaggtttccttgtctggcaacttccttgctgctgacatatgatggcgatgcaatcggcaaaacaaggagacgggggttacctacgttgttagtcgagtgcactgcattccaaatagcttctgttagccaatgcgaatgtgcgtgtgagtgacttgtctttcggatgctatataagctggccaatcgcgcctctacacaaacacaagtgtgcatcagtgcatgtgttttcagattgactttgtgagcctggatgtgaagaatatcgctcaaccacattgtaaagctttacatacagactgcagagctactcgccgctgaatttct

SEQ ID NO: 25283 - DNA, 944 bp, Zea mays
  Clone ID: LIB3732-037-C9_FLI
caagcagacgtcccaccgtccccatggccaccatggcttccaccgccaccgctgctgcttctctccgcctcgccttccctctcctctccgcgccggcttcctcctcgtcgtactccaatacccttcgcttccctctccgccgccgcagctcctgccgccccctcgccgtcgccgccttcaagaagctctccgaggcgtcccccgtgcccatccctcaggagcccacccaacccctcctggtcgacgaagacgccctgcctcctaaggccggggtctacggcgtctacgacgccgccggcgagctgcagttcgtcgggatttcgcgcaacgtgagggccagcgtcgagggccaccgccggaaggtccccgccaacctctgcgcctccgtcaaggtcgcagtatcagatgaggaggcaccagatcgatctgcccttaacaatgcctggaaatcatggatggaagaacacatagcggccacggcaaggcgccaccagggaacgttgcaggaaaccacacctgggttggtgccccccagcggcccccggacctgcgtctgacgcctggacgccacgtccagctgacggttccgctggagcagctgatagaccggctggtgaaggagaacagggtggtggccttcatcaaaggatcaaggagcgctccccagtgcgggttctcgcagagggtggtgggtatcctggaagcgcacgccgcggatttcgtgaccgtggatgtgctcgacgaggagcacaaccacgggctgagagaaaccctcaaggcttacagcagctggccgacgttccctcaggtcttcgtcggaggggagctcgtgggaggctgcgatatcatttcgtccatggctgagagaggggagcttgccgccctattgattcagaaatgaagacttgatttagtacagcgacttggaataaatgtttgcttcc

SEQ ID NO: 25284 - DNA, 1150 bp, Zea mays
  Clone ID: LIB3732-037-D9_FLI
cgctcgtcgccacgcaccctcgcctccccagcgtaacaagtgtccttcctccatcttcctcctccactccactcccaagtccccaccacccccaaccccgtctctccactgcggcgcaggcttcgcttcggctccgctcggctcgagcagaagaaaatgcaacgggcagtgcaggccgtcaggtcacacggcaatgttcttaaatatgctgttctacaacacatcagcgctcccaagccagcaatgcttcctgctgccttttctcgtttcatgtcagtttcatctgctcgcctagaggatcgtggatttgaaactgccactgtagcagatgtcttgaagtctaaagggaagagtgctgatggatcttggctctggtgcaccacagaggatagcgtctatgacgctgtcaaatctatgactcagcacaacgtgggagctttggtggttgtcaaacctggacagaataaatcaatcgctggcattgtcactgagagagattatctccggaaaatcatagtgcagggaaggtcttccaagtcaactaaggttggcgacatcatgactgaagagaacaaactgatcacagtgaatcccgacaccaaggtcctgcaggcaatgcagctcatgacagaaaaccgcgtcagacacatcccggtgatcgacggcacggggatgctggggatggtctccatcggcgacgtcgtgcgcgcggtggtggccgagcacagggaggagctgaaccggctcaatgactacatccagggaggctactaggacggcgtgtgcagcgacgaccccctccgatcccgccagtcagtgaagtccgcctttgaaatccaataactcggaacaatgatgatgacgaaataggccgtgttttcttggacaatgatgttaagttcggcaaggttttcctttctctttttttattctactgcgtggtctatgtgtatattgccaaaggcatgcgtgagccatgcgcccggtgctggggcgcagagaccatctgatggtggaaacaccggaaataagagcgtgccgctgtgtgtttcctttgaaggaataaaaatggtgttcgtgttgtgcattgcttattgttgatgttcgctttggattaaggccttgtttatgaacggtacggattcagtgc

SEQ ID NO: 25285 - DNA, 1490 bp, Zea mays
  Clone ID: LIB3732-038-D9_FLI
ctgtctgtcgctctcgctctcagacgactgggccgccgccgtttggtgctgaggctttcgttggtctcttcggcggcgacgagcacccaccagttctgtagaaatggctgatggtgaggacatccagcctcttgtctgcgacaatggcaccggaatggtcaaggctggttttgctggggacgatgcaccaagggcggttttccctagcattgttggccgtcctcgccacactggtgtcatggtagggatgggacagaaggatgcatatgttggcgatgaggcacagtccaagagaggtattctcacgctcaagtacccgattgagcacggtattgtgagcaactgggatgacatggagaaaatctggcatcatactttctacaacgagcttcgtgttgcaccagaggagcaccctgtgttgctcactgaggctcctttgaacccaaaggccaacagggagaagatgacccaaattatgtttgagactttcaatgttcctgccatgtatgttgcaatccaagcagttctatcactctatgctagtgggcgtactactggtattgttcttgactctggtgatggtgtgagccacactgtgcccatttacgaaggatatgcccttcctcatgccattcttcgtttggatcttgctggtcgggacctcacagactccctcatgaaaatcctgactgagaggggttactccttcacaacctctgccgagcgagaaattgtaagggacatcaaggagaagctggcatatatagcccttgactatgagcaagagttggaaactgccaagaacagctcctcagttgaaaagagctatgagctacctgatggccaagtaatcaccattggtgcagagagattcagatgccctgaggtcctcttccagccatccatgattggtatggaggctgccggaatccatgagacaacatacaattcaatcatgaagtgcgacgtggatatcaggaaggacctctacggcaacattgtgctcagtggaggttcgactatgttcccgggaatcgctgatcgtatgagcaaggagatcacttcccttgcaccaagcagcatgaagatcaaggtcgttgcaccgcctgagaggaagtatagtgtctggataggagggtccatcctagcctcgctgagcactttccaacagatgtggatatctaaggaggagtacgatgagtctggcccggcaattgttcacaggaagtgcttctaggcttcgcaagttcctcatcgttgcctagtctcaagttatgtccccttcatttctcaagatacgtgtggcagatttgcatggtacggttcatttatcaaattatgcccaccccctctttgtatgttgtggctccatgtgcgagcacgctgtctgtcgtgacacctggttcgtcagatgttttgtcaaacttgcttggcttgattggttgtacttgtacctgtaagagctgatagttatatgaatggcttggact

SEQ ID NO: 25286 - DNA, 978 bp, Zea mays
  Clone ID: LIB3732-038-H3_FLI
tgagtgaacctagcagaaatcgattaaaataatacgcagcagccgattgcactcgaccaagagaagcaacgactgcatctctggtctcccacgcctataatcccattcccctccttcaaagccctgcggcgatttcgattcttcccttctatctccaggtatacccatcggagcagcactgacaaaaattctccagatatggcaagcaaaaggattcagaaggaactcatggatctccaaaaggacccaccgacatcatgcagtgcagggcctgctggagaggatctattccactggcaggccacaatcatgggtcctagtgacagcccctatgcaggcggggttttctttattaatatccattttcctcctgactacccctttaagcctccaaaagtgaacttccaaacaaaagtttatcacccaaacatcaactctaatgggagcatttgccttgatatcctcaaggagcaatggagccctgcactgaccatatcaaaggtcctcctctccatcagctcgctcctcaccgaccccaacccggacgacccccttgtccctgagatcgcccacatgtacaaaaaccagaggcagcgctacgaggaaactgcacgggcctggacccagaagtacgcaatgggctgattctgtcccactggacagtacttcccctgcaaagatcgtcacggtgttgtaagaatcaagttgcaccgttttcctgtcgtgtgatggtattaagagcccagatggctgtgtcaattgtactcgcttctcagaacaaagtctctctgtgtgtacagtgcttttgaagctggatgatctgagttctgtgctaaaaccttggtttgcacttcactttgttccctgaaatgggtttgcgaccactgaatttgcatgtgtaacctttccaagaaaccagtagcagtttgtatgttgtcaagatgttaataattcagatgggtggcctgcatccatctg

SEQ ID NO: 25287 - DNA, 728 bp, Zea mays
  Clone ID: LIB3732-039-A3_FLI
tcctcccttctcccctctcggatcgagtgcttgagctccgaccaaatctcgcagcggctgcaattccgagcccgaagagcggatcaggcgaggacgacgccttcgattctgatctgcggtcggcgcgacccagagagaaccggagatgcagcagggcgacggcacggaggcgcaggtgacgtgggaggaccagcagaacatcaaccgcttcggtcgcctcaacaaccgcctccacgagctccaggaagagatcaagctcgcaaaggagacgaatgagaaccttgatgatgctgggaatgaactcatcttgtccgatgaagacgttgtacgcttccaaattggggaagtgtttgctcacatgccaagggatgacgtcgagactaggctggagcagatgaaagaggatgcggctaagaagctggagaggttagaggaggaaaaggaatccatcctggcccagatggccgagctgaagaagatactgtacgggaagttcaaggatgccatcaacctggaggaagattagcagtactggagtcgtggcgatttgaggtgatgtttctttctagttcaggtgatgtttttttcccttgctctccggctctcccacaaacatcagtcttgtgatgctggcctgcttgtgttagcagttctttcaaaagctttattacccagaagaacccagaaaatagttccattcattccgcgggtgtatatgcattgaagtt

SEQ ID NO: 25288 - DNA, 2120 bp, Zea mays
  Clone ID: LIB3732-039-F9_FLI
cgagcgctcaccgtctctgtctcctcctcccacaaaaagcagctgaattgctccgtcggcgtcatgtgtggcatcttagccgtgctcggatgctccgactgctcccaggccaggagggctcgcatcctcgcctgctccagaaggctgaagcacaggggccccgactggtcgggcctctaccagcacgagggcaacttcctggcgcagcagcggctcgccatcgtctccccgctgtccggcgaccagccgctgttcaacgaggaccgcaccgtcgtggtggtggccaatggagagatctacaaccacaagaacgtccggaagcagttcaccggcgcgcacagcttcagcaccggaagtgactgcgaggtcatcatccccctgtacgagaagtacggcgagaacttcgtggacatgctggacggagtcttcgcgttcgtgctctacgacacgcgagacaggacctacgtggcggcacgcgacgccatcggcgtcaacccgctctacatcggctggggcagcgacggttccgtctggatgtcatccgagatgaaggcgctgaacgaggactgcgtgcgcttcgagatcttcccgccgggccacctctactccagcgccggcggcgggttccgccggtggtacaccccgcactggttccaggagcaggtgccccggacgccgtaccagtcgctcgtccttagagaggccttcgagaaggcggttatcaagaggctcatgaccgacgtcccgttcggggtcctcctctccggcggcctcgactcctccctcgtcgcctccgtcaccaagcgccacctcgtcgagaccgacgccgccgaaaagttcggcacagagctccactccttcgtcgtcggcctcgagggctcccctgacctgaaggccgcacgagaggtcgctgactacctcggaaccacccatcacgagttccatttcaccgtacaggacggcatcgacgcgatcgaggaggtgatctaccacgacgagacgtacgacgtgacgacgatccgggccagcacgcccatgttcctgatggctcgcaagatcaagtcgctgggcgtgaagatggtgctgtccggggagggctccgacgagctcctgggcggctacctctacttccacttcgcccccaacagggaggagctccacagggagacctgccgcaaggtgaaggccctgcaccagtacgactgcctgcgcgccaacaaggcgacgtcggcgtggggcctggaggtccgcgtgccgttcctcgacaaggagttcgtcgacgtcgcgatgggcatggaccccgaatggaaaatgtacgacaagaacctgggtcgcatcgagaagtgggtcctgaggaaggcgttcgacgacgaggagcacccttacctgcccgagcatattctgtacaggcagaaagaacagttcagtgacggagtgggctacaactggatcgatggactcaaatccttcaccgaacagcaggtgacggatgagatgatgaacagcgccgcccagatgttcccgtacaacacgcccgtcaacaaggaggcctactactaccggatgatattcgagaggctcttccctcaggactcggcgagggagacggtgccgtggggcccgagcatcgcctgcagcacgcccgcggccatcgagtgggtggagcagtggaaggcctccaacgacccctccggccgcttcatctcctcccacgactccgccgccaccgaccgcaccggcgacaagctggcggtggccaacggcggcgggcacggcgcggcgaacggcacggtcaacggcaacgacgtcgctgtcgcgatcgcggtgtaatagtaatgaactggaggataaggacgaacgaacgactggtaggtgtggcgtgcctgcagctatagttgcccaccggccggccatatatatcccggcccggcgtggcagcacgtgctattgttacgttgtcaccagcgtacgtgtctgtgtagtgcctcgatcgtatctgtacgtctttaggaaaaggtgtgtccgtgtgtattgtatgtgtgtgagcaagcgtgcgtgacgcgctctgcctgtgtgacaaagcagagcagtacaagctcaggcattttctgtccgagcgc

SEQ ID NO: 25289 - DNA, 596 bp, Zea mays
  Clone ID: LIB3732-040-B4_FLI
cttttccacctacagatcgcactggagcatttcaaaggctggaagatcccagaaaacctaaccaatgtccatgcctacaccaaggctcttttcagccgtgaatcttttgtcaagactaagccatccgaggagcacgtgattgcgggatgggcgcccaaggtgaatgcataagagccttgtgctttggtgctacctggtggactccatccatttatcttatcagtctttgtcagtggtgtggataggtgtcaagtctgtagcctagatgcatgattcagttggaattatgcagtgccgtgtctcgagtactcagttctggctgttgcggttgtgcatcttaccttctgttgctggttttgtttgaggccatgggcatctcttggtcctatgctgtgagagcgctgtaatgtgggtaccaaataatggagctgcttttatgcttgtggtgtggattctgttgtgccttgctttcatgattctgttttcctgtggtgaattggtgatagcctgagcagcaggttatcttctcctatatatcacatatttcggacctggtttttttcaagcacatgttaaatgaaaatgtttggtgcagt

SEQ ID NO: 25290 - DNA, 836 bp, Zea mays
  Clone ID: LIB3732-040-B6_FLI
ggtcactcggcacgcaggctagcagcacagcagcagccagagccatcccctctcctcgctacgcttcgcttcctcggcgccgattcctcctcctcctcctccaccctcgtccgtccccttccggcgcacgagctcgcccgagatggcgaacgcgagatcgggtgtcgctgtgaacgatgagtgcatgctgaagtttggcgagctgcagtcgaagaggctgcaccgcttcataactttcaagatggacgacaagttcaaggagatagttgtggaccaggtcggggatcgcgctaccagctacgatgacttcacaaacagcctccctgagaatgactgccgatacgcgatctatgatttcgactttgttactgcagaggatgtccagaagagcaggatcttctatatcctatggtccccatcctccgccaaggtgaagagcaagatgctttacgcaagctcaaaccagaaattcaagagtggcctcaatggcattcaggttgaactccaggccacagatgcgagtgaaatcagcctcgatgagatcaaggatcgggcacgctaggcgcaccgccatcgcgagtttcatgatcacgcatcatggactcgcctactactgtggatttgtatgccattatagacttggtgctgcgaaagactgctttggtgatttgtgggtttgttgctgtgtaaaaagatcctcatggcttccagaagaccatgaaggtttggatctatcatgtaattccttgttatctgccaattatgtatggactatggacatgtgttgcgctgttcaactcactacaaataagtaatcgatatattccctacccatg

SEQ ID NO: 25291 - DNA, 592 bp, Zea mays
  Clone ID: LIB3732-040-C12_FLI
tgcactcaaccgatatgatgcaacagcttacaacaccatcctcaggaatgcaagacctcaaggcatcaacaagaatggccctccagaacacaagttgcacggattcacctacctccgagtatctgatgaactgttccaggaacagaactacaccactttcaaaacttttgtcaggagaatgcatgctaacctggattataatccaaatgtcgatccagttgcaccattggaaagatcaaaggcagagataccaattgaagaaatcctagaagtagcacagccaaaattggagccatttcccttcgacaaggacaccgacctaccagtttaaacactccaatgatgcaaactacaggaagaatcacgagacacttaaaaaatcaagacaaatagtaagcctattgtcgagcagtagtctattaactaaataaaatgctgtgtggagcatattataatcgcatattgccctaataatattgtgttgttaaacctgaggcttgatggttatctgatgagttgtaataatagccttggtcttcctgttgtatgtatgtatttgagctaaggaataaaaattgtggctttgtgggtt

SEQ ID NO: 25292 - DNA, 1049 bp, Zea mays
  Clone ID: LIB3732-041-B7_FLI
gccttgcctgcctgccttccttctcgtagaagataagcaaagcaaggcaaccgttgtcgttgtctctgttcctccgcttcctgctctcttggcttgctgcttgccctcggagcagtgccttccgccgccgccgccgccgcctgttgtgagaaggagaggccggggctgggaggagatgagcgtgaccaagttcatcaagtgcgtcacggtgggggacggcgcggtgggcaagacctgcatgctcatctgctacaccagcaacaagttccccacggattacatccccacggtgttcgacaacttcagcgccaacgtctccgtggacggcagcatcgtcaacctgggcctctgggacactgcaggacaagaggactacagcagattgcggccactgagctacaggggcgcggacgtgttcgtgctggccttctccttgatcagcagggcgagctatgagaacgtccttaagaagtgggtgccagagcttcgcagattcgcgcccgacgtcccggtcgttcttgtcgggaccaagttagatctccgtgaccacagggcctaccttgctgaccatcctggagcgtcgacgatcacgacggcacagggcgaagaactgaggaggcagatcggcgctgcggcttacatcgagtgcagttcgaaaacgcagcagaatgtcaagtcggtcttcgacacagccatcaaagtggtccttcagcccccgcggaggagggaggcgacgcctgccaggaggaagaacaggtgtggctcggggtgctctatcatgaacctcatgtgtggcagcatgtgcgctgcttaggagtctagaacactgatctggaaggaggtgaaggtgaaggcatgatgtgtatgtgctatggcgactggcaagtaaatggggccgcatggatgactgctgctcttgttttctttagctcgtctgccgtatgctttgtttttttaggcttcaaggactgacaattgcaagaatgcagtgtttatgtaagaggttgtttgctgaaataggattgctgtaactgtaatgttgttctccg

SEQ ID NO: 25293 - DNA, 1108 bp, Zea mays
  Clone ID: LIB3732-041-D3_FLI
cgcgggcgagctgggggagacgaacccgtcataactccctcgcttaatcgcgtctcgtgctcctgcctcctgcgtatataaacgcggcaatcgggacgcccggggaggcgttcgttctccttctccatcccacgcgcgcgcaggccaaggccggatcggcggcctctcagatctcgccggccgccgtgagacagagaccgaagggggggttgaccggtgctcgggaggaagatgtttagcgggacgcagcagaagtgcaaggtgtgcaccaagacggtgtacccgatggaccagctctccaccgacggcgtcgtcttccaccgctcctgcttcaagtgccagcactgcaagtctaccctctcactgagcaactattcctcgttcgaaggagtgccgtactgcaagacccatttcgagcagctgttcaaggagaccgggagttacaacaagagcttccaatcacagtcacctgcaaagattactccggaaaagttggcccctgagctgaccagatcaccaagcaaagctgcaaggatgttttcaggaacacaagacaagtgtgcgacttgtggtaaaactgcgtatcctcttgagaaggtaacagtcgaagagaagtcctaccataagtcatgcttcaaatgctcccacgggggctgcgcgattacaccttccaactatgcagccttggagggcatcctctactgcaaacaccatttctcccaacttttcaaggagaagggaagctacaaccacttgatcaagtgcgcgtccgtcaagcgcgctgctgaagcacagccagaacaaccggcctctgattcctcctcctgaccacgccatttaaacagtgggggtttggaggcgagagagttgggaagcctcctgtttctacttaaaaccgcgtgatgtatgttattccatctatgccccgaggatactagactactactctattttggtatcctctgctgtgctagctggatcatatcagcgaaccatggaattgctgtcattttcaatgaaactgttgtgcatcaagtagtgaaatcttcactgaaatcgggtatcttgcctttattgatcaatatattatctatgttgttttgttgtc

SEQ ID NO: 25294 - DNA, 495 bp, Zea mays
  Clone ID: LIB3732-042-A1_FLI
gcaggtggaggagttctacgtcatcacgtggacgtcccccaaggagcaggtgttcgagatgcccaccggcggcgccgccatcatgcgggagggccccaacctcttgaagctggcgcgcaaggagcagtgcctggcgctcggcaccaggttgcgctccaagtacaagatcacctaccagttctaccgcgtcttccccaacggcgaggtgcagtacctccaccccaaggacggcgtctacccggagaaggtcaaccccggcagggagggcgtcggccagaacttccgcagcatcggcaagaacgtcaaccccatcgacgtcaagttcaccggcaaggccaccttcgactaatcacacttcacgtacgccgcacgccccagccgggatccaaattaaagaacttcttcttctattaattacagtatattgtaatttggctgctggtacggtggtggcatgatttgagatgtgcatgatgatccttgtgtaattttatt

SEQ ID NO: 25295 - DNA, 758 bp, Zea mays
  Clone ID: LIB3732-042-B1_FLI
accgaggccacaggccaccaccattccttccttgttccttccccagctccgcaggctgctcatcgccctccctccgcgcccccgatccagatccagatccaggggcttgtcatggcatccaaacgtatcctcaaggaattaaaggacttgcaaaaggaccctccaacatcatgcagtgcaggtcctgctggtgaggatatgttccactggcaggcaaccatcatgggtcctcctgatagtccatatgctggaggtgttttcttggtgaacattcatttcccgccagactaccccttcaagcctccaaaggtatcttttaagacgaaggtcttccatccaaacatcaatagtaatggaagcatatgtcttgacattcttaaggagcagtggagccctgctttgacaatctctaaggttttgctttctatctgctccctgcttactgatcccaacccagacgaccctcttgtccctgagattgctcacatgtacaagacggatcggcctaagtacgaggcgacagcccgcagctggacccagaagtacgccatgggatgaaatgttcggcgttactggctaaatgcagacgattgtggtgttgcccatgaaactgttatcggggacgtatgttcttctgttccttgtgcattctccgatccatctctaggatccgagttctagtccaacattaacctaccattgccttgggtaatgagatgacttgtgcttgctgtggtaactatgctagtgttgatgtt

SEQ ID NO: 25296 - DNA, 762 bp, Zea mays
  Clone ID: LIB3732-042-B10_FLI
ggagatggcacaagccatggcgtccatgaccggcctctcgcagggcgttctgcccagcaggcgcgccgccaacagggccaggacggccgccgtcgtcagggcgtccgccgaggcgcaggcgcaggcgggccgccgcgccgtgctcgggctggtgggcactggcatcgtcggcggcgccttgtcgcaggcggtgcacgccgagaccgtcaagaccatcaagatcggagccccgccgccgccctccggtggactccccgggactctgaactctgaccaggcgagggacttcgacctccccttgaaggagcggttctacctgcagccgctgccgccggcggaggcggtggcgagggtgaagacgtcggcgcaggacatcatcaacctcaagccgctcatcgacaagaaggcgtggccgtacgtccagaacgacctccgcctccgggcctcctacctgcgctacgacctcaagaccgtcatcgcttccaagcccaaggaggagaagcagagcctcaaggagctcaccggcaagctcttcagcaccatcgacgatcttgaccatgccgcaaagatcaagagcaccccggaggccgagaaatacttcgcagcaaccaaagatgcgctcggcgacgtcctcgccaagctagcctagatggaagctaatagatgggttaacgatggccacgtaatttcggacttgtgtttgttcatatggagccggcaaatgtaccgtttcctgttcatattatatcacgagttcttgac

SEQ ID NO: 25297 - DNA, 642 bp, Zea mays
  Clone ID: LIB3732-042-C12_FLI
caccactccgcgctagctgaggacggtacagcggcacagaggtgcgacgtacgacgacgacgacgcaggcgccacacatggcatcccagctctccgccgccgtgccccggttccacggcctccggggctacgccgcgcccaggtccgcggtggcagcgctgccgtccgtgagggtgggcaggaagaggtcgtcgtcgcagggcatccgctgcgactacatcggctccgccaccaacctgatcatggtgacgacgacgacgctgatgctgttcgcgggggcggttcgggctggcgccgtcggcgaaccgcaaggcgacggcggggctgaagctggaggcgcgcgactccggcctgcagacgggtgaccccgccgggttcaccctcgccgacacgctggcctgcggcgccgtcggccacatcctcggcgtcggcatcgtgctcgggctcaagaacaccggcgccctcgaccagatcatcggctagatccctacgtcgtcgttgttaagatcagactcagcagcctcgatcgcgccgccggccggcaggtgcctgcaggtggtgactttgtaacgtgtgtgcgtgcgtacgtgtacattgcatccatcttggttccaatggacatatagctcctgttgctcctct

SEQ ID NO: 25298 - DNA, 1991 bp, Zea mays
  Clone ID: LIB3732-043-G4_FLI
tctcccttcccagagccgtagcgggctagtggcgactgactggggtcggggtcggggtcgggcgaggcattcctccctctgcgcttcgccggcaacgacgacgaatagggttctgtagggactgagattctggatacctcactcccttgattcagaatgactccactgagtcattgctccgttggcaatgtcagcctgtttcacattggaagctacaggaccacccgagaaatccagataagaaggttccagggctcggcgaggtattcgagagtagcatcgccatcgcctcggagactgctgcagccgcaaacagcgttccacctgatcagtctctacaagagaagaagctggtcctctccccagaggccaagaaccttgtccgcggcgaccgtggggactgatgtcactgtggaggatctgaatccgtctccctcggaggaagcctccgatgggaactctgaggctgcacctgacgccattgatgcgagcgagcaggccgaggctagcacgggacaagcctcttctgctcgcaaattgggacgcaacatacggaagagcgagatgcctcctctgaatgaggaggatctagtgcctggcgcatcttttactgggaaggtgatgtctatcaagccattcggagttttcgttgacattggggcattcacagaaggccttgtccatatctccagagtaagtgatgggttcgtgaaagatatatcttccctcttcactgttggacaagaggtgtcagtgagattgcttgaagcaaataaggaaacaaagcgtatctctctgacgatgagggaaggcgatgactatgtcaagcctcaaaaagaaacgccgaaggctgcaaacggtgggcggagtgccaccgcaactcctaaaagctcgccaaggcaaacaagggaaaggcaggaactcaaggagacacttgagtcaaaatatgtaccagggcaatctctgaatggcactgtgaaaagtacaacgagagcagggacatttgtgacgttgcctgatgggagtgaaggattccttcccagagaagaggaagcattagcattatttacccttatcggacaatctgcaatggaaattggtaaacagataagggttaaagtactgaatgtggcacagggtcaggccactttgacgatgaaaggggtggaagatgatgaagacgatctgaagacgctaaatatggagcttaagcgggactggtccagagggactaatgcgttcgagttggctttccgtaggaacaaagagatctctgcattcttggatcagagggaaaggaccaaagtgccggctgatacttcagtttctgctccagaagctgaaagctatcaggaggaagctgctccagaagatgagggaagtagtgaagaattgagctctgtgtcagaagtagcaactgatgtttctcctcctgtatctgatgcctcctctcaggtgggaattcaggattctacttctgtggcaaatgctgctgaggaccaaactgtaggatctgaaagttcacctacaattagtgttgaactgtcctccaacgggaccccagatagctctattgtgtcttcagtttcagaaactgcagataaacctactgaacctgaagaatcttcagcggtagaagaggttcttgtaactgcaagcagcgaggcggggaaagaaccagctgctgacactgaggctgtaccagccttgactgagaaaactggtgccgaggttgctgctgctgctggagttgcacaagcaagcaccacgacaggtctgtagtaattttatcagtgagtcagcgatggtgtcccctaaaagctttcacatgcgataatctgataagccatgacttatctgcaaaagcctcttgaagaagcaactctgcctaattagaatagaatagggggtgctataaatagattgcaagaaacctgttacaagctactgttttttcccagttatttttattcgaattttttgttacatgg

SEQ ID NO: 25299 - DNA, 1366 bp, Zea mays
  Clone ID: LIB3732-045-A11_FLI
cgcaaaccgcagccaagcaagcgttcccctccctgtgatcgcgatggggtccaccgagaagcaggagccggaggcgtcgccggagatcatcttccggtcgaagctcccggacatcgccatcaccaacaccctcccgctgcaccgctactgcttcgagcggctccccgaggtgggcgagaggccctgcctcatcgacggcggcacgggcgccgtgctcacgtacgccgaggtggaccgcctgacccggcgcctggccgcggcgctccggcgcgcgccgctggggctcgggcgcggctcggtggccatgaacctcatgctgaactcggcggagttcgtgctctccttcttcgccgcgtcgcgcgtgggcgccgcggtcaccaccgccaacccgatgtcgacgccgcacgagatcgccgggcagatcgcggcctccggcgccaccgttgtgttcaccgagtccatggccgcggacaagctccccgccatgggcgacaagctcacggtcgtcctcatcgacgcgcgccgcgacgggtgcctccacttctgggatgacgtcatggccagcgtccccgacgaggaggccggcggcggcgagcaagacttggacttcgaccccgacgacgtggtggcgctgccctactcgtccggcacgacggggctgcccaagggcgtgatgctgacgcaccgcagtctgagcacgagcgtggcgcagcaggtggacggcgacaaccccaacatcggcctgaccgccgccgacgtggtcctgtgctcgctccccatgttccacatctactcgctcaacaccatcctgatgtgcgggctgcgcgtgggcgccgccatcgtggtggtgcgccgcttcgacctgcgcaggatgatggagctggtggagcgccaccggatcaccgtcgccccgctggtgccgcccatcgtggtcgccgtggccaagagcgacgaggcggcggcgcacgacctgtcgtccgtccggatggtgctctccggcgccgcgcccatggggaaggacatcgaggacgcgttcgtggccaagctccccggcgccgtgctcggacaggtcattttcagaggtacgtactggttcagattctggagacttctacagaaggaggaatcacatcaacaaatcctcgatgtctgtcaagcgttggaagtggtggcgatggaagtctttgcaaatcatggatggcgctcaaatgcaagaattgaggatgcctagagttacctacattctagtgattttgcttctttaagttagtttcattatctatgcaacgtttctcggatgtaataattgtcttgtgtgggctgtacgcattaccatgctaaagccggaactcttgtttccataatc

SEQ ID NO: 25300 - DNA, 1999 bp, Zea mays
  Clone ID: LIB3732-045-C1_FLI
gaagaaaccagcataaaaacactagatctgtgaaggatttgaggaagaaaccaaaccgaaaccctagtgacgatgctagagttcggacctcgctctgagtcgaaacgaccagagaccgctgccttccctccccattttcctttcccatgaaccaagcagcgtatgagctttccatccctcctcatttacctatcccacctctcatatcccgttatccaaacggcacctcagggtactgcaatccagaagcaggggccctggcctcagcgcacctggatggcagggctggaggagttgaagaagaagctacaacccttgctgttcgatgacctggacagagttggcgccagtaccagggtgcccttaccagaagatacttgcgattcctacgcagtttctgatggtgggactgttaatttacttagtagatccttgggtgagtataaaatcaatgagcatggctttcataaacgaagtgctgggccagacgagttagattctgatgagaaggcttaccgttgtgcctctcatgagatgcatatatttggtcccatcggtaatggtgcaagcagtgtagtggagagagctatatttattccagttcatcgaatcttggccttgaagaagataaacatattcgagaaggagaagaggcaacaaattctgaatgagatgagaacattatgtgaagcatgttgttatcctggtttagttgaattccagggtgcattttacatgcctgattctggacaaataagtatcgctcttgaatacatggatggtggttccttggcagatgttataagggtcaagaagtctataccagaaccagttctttcacatatgctacagaaagtattgcttggtctgcgatacttgcatgaagtaaggcatctagtgcatagagatataaagccagcaaatttactggtaaatcttaagggcgaggcgaagattacagattttggtgtgagtgctggtttggacaatacaatggctatgtgtgctacctttgtaggcacagtcacatatatgtcacctgagagaattcgtaatgagaactattcttatgctgctgatatttggagtcttggactaacaatattggaatgtgctactggaaaattcccatatgacgtaaatgagggccctgcaaatctaatgttgcagatacttgatgatccatcaccaacaccaccagtagatacttgttcattagaattctgctcattcatcaatgattgcttgcagaaagatgctgatgcaaggcccacatgtgagcagcttctgtcacacccattcatcaagaggtatgcaggaactgaagtggacttggcagcatatgtcaaaagtgtagttgacccaacagaaaggctaaagcaaatagctgagatgcttgctatacattactacctcttgtttaatggacctgatgggatttggcatcatatgaagacattctacatggaacaatctactttcagtttctcagagaacgtgtatgttggccagaatgaaatttttgatattttgtcaaatataaggaaaaagctaaaaggtgataggcctcgagagaaaattgttcatgttgtcgagaagctacattgtcgtgcaaatggtgaaactggggttgcaattcgtgtgtctggatctttcattgtgggaaaccaatttcttgtatgtggcgaggggataaaagctgaagggatgcctagcttggatgagctctctattgacattccaagcaaacgcgtaggccagttcagagagcagtttatcatgcaaccgggaaacttaatgtcatgctattacatatcaaagcaagatctgtacattatccaatcctgattgaacatattatttgtaagattattctctgaagcacatgtatagaggatttagaagaattcctttcggacctggttttgaatcttatttactttgtggaactgaaattttgggccaaacctctgacaagaattgaaaagtttaagtcttc

SEQ ID NO: 25301 - DNA, 1098 bp, Zea mays
  Clone ID: LIB3732-045-C10_FLI
gaccgggcacaccccccgagctcagcttagctccactccagctccaatcacagtcgtgaccagagcgcgagagctagctagagggccgtgaaaatgccgatcaataggatcgccctggggagccaccaggaggtgtaccacccgggcgccctcaaggcggcgttcgctgagttcatctccaccctcatcttcgtcttcgccggccagggctccggcatggccttcagcaagctgaccggcggcggcccgacgaccccggcgggcctgatcgcggcggcggtggcgcacgcgttcgcgctgttcgtggcggtgtcggtgggcgcgaacatctccggcgggcacgtgaacccggccgtgaccttcggcgccttcgtgggcggcaacatcaccctgttccgagggctcctgtactgggtggcgcagctgctggggtccaccgtggcgtgcttcctgctccgcttctcgacgggcgggcaggccacgggcaccttcgggctgacgggcgtgtcggtgtgggaggcgctggtgctggagatcgtgatgaccttcgggctggtgtacacggtgtacgcgacggcggtggacccgaagaagggcagcctgggcaccatcgcccccattgccatcggcttcatcgtgggggccaacatcctggtgggcggcgccttcgacggcgcgtccatgaaccccgccgtgtccttcggccccgccctcgtcagctgggagtggggctaccagtgggtgtactgggtcggccccctcatcggcggcggcctcgccggcgtcatctacgagctgctcttcatctcccacacccacgagcagctcccctccaccgactactaaaagccgaagccgaccgacccaggggtgcgcagcgcagcgcagctagcatccagcgctctctccccgctcgccgccgtttagtttctctcgtgcacgtgcatgcatcgtagactgtctcaggccgccgctgcgccggcgccgctcgcatcgtttgcttccttggaccagcagtcgtcgccgtcaggctgaactgcttgtaaccgtgaattccggacccgtttgcttctgtaagatttgtgcatttgcctgagt

SEQ ID NO: 25302 - DNA, 1617 bp, Zea mays
  Clone ID: LIB3732-045-D1_FLI
ttctacgcttggcttggctgcgctgcgcacaccgaacccctcgccgtcgcggctcgcctcggctccgccccgaccgaccgatcgatccggccggcggtgggcgccatggcctcccccaaccccgaggccgcggggctgcaggccgtggctgtggcgggggcaggggagggcggctcgtcctcgtcgctcagcgccgttgcgggagcggctgcgttgtccggggagctggtgcccaggagggcgttggcgctgcgcaaggagcgcgtgtgcacggccaaggagcgcatcagccgcatgcctccctgtgcggcggggaagcggagctccatctaccgcggggtcacccggcataggtggacaggtcgatatgaggctcacctttgggacaaaagcacgtggaatcagaatcagaacaaaaagggaaaacaggtatatctaggtgcatatgatgatgaagaggctgcagcaagggcctatgaccttgctgcattaaaatattggggagctggaacacaaataaatttcccagtatctgactatgcaagagaccttgaagagatgcagatgatatccaaggaggattatctcgtgtctcttaggagaaagagcagtgccttctacagggggttaccaaaatatcgtgggcttcttaggcaacttcataattccagatgggatacatctttgggactcggtaatgactacatgagccttagttgtggcaaggatatcatgttggatgggaaatttgcaggaagctttggtctagagaggaaaattgatcttacaaattacatccggtggtggctaccaaagaagacaaggcagtcagatacatctaaaacagaagaaattgctgatgaaattcgagctattgaaagttcaatgcaacagactgaaccctataagttgccttctcttggcttcagttctccatcaaagccctcttcaatgggcttatcagcatgcagcatattatctcagtctgatgcctttaaaagcttcttggagaagtctacaaaattatctgaagaatgtagtcttagcaaagaaattgttgaaggaaagactgttgcctcggtacctgctactggatatgatacaggggcaattaatattaacatgaatgagttgctagtacaaagatctacttactcaatgacccctgttatgcctacaccaacgaagagtacctggagccctgctgatccttccgtggatccacttttttggagcaactttgttttgccatcgagtcaacctgttacaatggcgacaataacaacaacaacaacgtttgcaaagaatgaggtaagttcaagtgatccattccagagccaagagtgactgcacgagcttattgaagcaggatattttagattgttaataaagctttggacatttcaatcaatgaacaacaggtcaaaggcagcatcccgtgcgtcaactagattctttttgtccagcttttgatgtcgcaacttgtgagcaatactccttgtttatccatacttcataggacatgaatagaaggtatgacaagtgcaagcatagttatgtaatatacagtggctagttgccagaaaatgagatttagttgtgtagagctgtttgtac

SEQ ID NO: 25303 - DNA, 785 bp, Zea mays
  Clone ID: LIB3732-045-G1_FLI
gcctcctctgccacacacacacctcgccagcaccacagccatcgccacagtcacagtcagcgagagagagagagcatggacctgctgaaccccgagcagatctccgagttccgggaggcgttcgcgttcttcgacaaggacggcgacgggtgcatcacggtggaggagctggcgacggtgatggggtcgctgcaggggcagcggcccagcgcggaggagctgcgcgagatgatccgcgacgccgacgccgacggcaacggcgccatcgacttcgccgagttcctgggcctcatggcacgcaagaccgcggggggcggcgccggcggcggcgccgaccccgacgaggagctgcgcgaggcgttcaaggtgttcgacaaggaccagaacgggtacatctccgccaccgagctccgccacgtcatgatcaacctcggcgagaagctcacggacgaggaggtggagcagatgatccgcgaggccgacctcgacggcgacggccaggtcaactacgacgagttcgtcaggatgatgatgctctccgacggcgccggcgccggcgccgcagccacgggccaccaccaatgaacccatctccacctttcatcagcctagcgcttcccatcacgtcccttgccgatggagtggcggatcactccatccgtctctgcttcccttttctttttcaccccctcaaaaaaaaaaaaaagatcagcgtccgtctctctaatgtaacgtacgtaatgtaatgtaactgatcaaatattcaacaagaaatttaattaccg

SEQ ID NO: 25304 - DNA, 1547 bp, Zea mays
  Clone ID: LIB3732-046-H9_FLI
caaccccacccatctcctccttcacgaaccttctagaaccccgtccagaaccctacccaaccatggcggcctccctcctctcccgcgccgccgctgccgccgcggcgctgcgcggcgcggcccggccgaaccacctcctcgctcgggcctccctccccaagggtcgggtcgggtgggcggcgcgcgcggcggagggcgccggtgggccccggtgcggcccgtcgccactgctgggcgcgttcgggatcgcggcgcggtgcaacgccacgtcgtcttcgtccgcggtgtccgaggccaccggcgtccacacagtgcccccgacggagcccgtggtgtcggccgagtggctccacgccaacctcaaggaccccgacgtcaaggtacttgatgcctcttggtatatgcctgcagaacaaaggaatccattacaagagtaccaggtggcccatatccctggtgctttgttctttgatgttgatggaatatccgacagaacatctagtttaccacacatgctgccatctgaaaaggcattttcagctgctgtatctgctcttggcatctacaacaaagacgggatagtagtttatgatggaaaggggctgttcagtgctgctcgtgtttggtggatgttccgtgtatttggacatgataaagtttgggtgttggatggaggtttgccccaatggcgcgcttctgggtatgatgttgaatcaagtgcctctagtgatgccatcctaaaggccagtgcagctggtgaagcaattgagaaagtttaccagggtcaattggttggtccaaccacatttgaagcaaagttgcagcctcatcttctttggagtcttgatcaggtgaaagagaacatcaacacccagacacatcaacttatagatgctcgatcaaaacctagatttgatggtgcagttcccgagccacgaaaggggattagaagtgggcatgtgcctgggagcaaatgtgttccgtttcctcaggttcttgacagctcacaaaagctattgccttcagatgagctccgtaaacggtttgagcaagaaggaatatcacttgatcagcctcttgttacctcttgtggcactggtgtgacagcatgtgtattagccttgggccttcatcgacttggcaaaaccgatgtcgcaatttatgacggatcgtggaccgaatggggcgcccatcctgacactccagttgcaactgctgtttagtctcttcataataggacgcccgtgctcttcatagaggacctcttgattgtatttgccccgtgctgtgattctatggaggttggttggatgcttggatgtaaggctggggaagcgaagccttttggccttcactgtaaaagctgcaacagaaaaactgtcacatgcactgaattataagataactccccttgatctctcgtcttggttgattaataatgctaaagtttgtctgctgtatgtgagctaactatacttatatgcacataaatgtacatatctacagacattcaaaatcctcgggtgcagaagcaccgatctgtggtc

SEQ ID NO: 25305 - DNA, 1060 bp, Zea mays
  Clone ID: LIB3732-047-E2_FLI
cgccttttccatttccaccccgatcgcattttaccctactccccgccgcctgtccctgcgctagtcgacactcgacaggctcggtttccgccctcctctcccaccgccgcgcaccgagaagatggggaagcggtggatcccgctggaggccaacccggacgtcctgaaccagttcatatgggggctgggagtccacgaggaggatgtgcagttctgcgacgtctacggccttgacgatgagctgctcgctatggtgccccagcccgttctcgccgtcctcttcctctacccgctcacctccctggacgaggagaaagaagaatcaagtgtttctgctgccacatcgacctcagcgggcaaggaattgagcaagaaagtatactttacgaagcagactgttggtaatgcttgtggaacagttggtgttattcatgcaataggaaatgcaacatctcaaatcaagctagttgaggggtcctattttgagaagttctataagcaaacggctgatatggatccagctcagcgtgctgcctttctcgaggaagatgatgagatggaagatgcacattctgttgctgcatctgctggtgacactgatgctaatgttgatgttaatgaacattttgtatgtttctcctgtgttgatggtgaactttatgagcttgatggacgaaaatcacaacccacatcccatggcccttcatcacctgaaaccttgttgcaggatgctgcaaaagtcatcaaagctagaattgcagagaaccctaactcgatgaacttcaacgtcatggctctttcaaagaagtgaagtgtactgtgatggatggattttctttggcagaatacgggcctcttttcctttcgcttccgctgggctgcaccgagtggaaggtttgcatgggcaaacatagggggaaaaaactttatatgacctgagatgtttggttgatgactcgatgtattctcgtgccttcatggagagagaaatgactgttcacgatttcaactttttccggtgtattagtagtcgaatggagacttgcattggaagagtttc

SEQ ID NO: 25306 - DNA, 2244 bp, Homo sapiens
  Clone ID: LIB3791-002-D9_FLI
ttttgagcacaccatccatgttggctttgatgctgttactggagaattcactggcatgccagaacagtgggctcgattactacagacctccaatatcaccaaactagagcaaaagaagaatcctcaggctgtgctggatgtcctaaagttctacgactccaacacagtgaagcagaaatatctgagctttactcctcctgagaaagatggctttccttctggaacaccagcactgaatgccaagggaacagaagcacccgcagtagtgacagaggaggaggatgatgatgaagagactgctcctcccgttattgccccgcgaccggatcatacgaaatcaatttacacacggtctgtaattgaccctgttcctgcaccagttggtgattcacatgttgatggtgctgccaagtctttagacaaacagaaaaagaagactaagatgacagatgaagagattatggagaaattaagaactatcgtgagcataggtgaccctaagaaaaaaatatacaagatatgaaaaaattggacaaggggcttctggtacagttttcactgctactgacgttgcactgggacaggaggttgctatcaaacaaattaatttacagaaacagccaaagaaggaactgatcattaacgagattctggtgatgaaagaattgaaaaatcccaacatcgttaactttttggacagttacctggtaggagatgaattgtttgtggtcatggaataccttgctggggggtcactcactgatgtggtaacagaaacgtgcatggatgaagcacagattgctgctgtatgcagagagtgtttacaggcattggagtttttacatgctaatcaagtgatccacagagacatcaaaagtgacaatgtacttttgggaatggaaggatctgttaagctcactgactttggtttctgtgcccagatcacccctgagcagagcaaacgcagtaccatggtcggaacgccatactggatggcaccagaggtggttacacggaaagcttatggccctaaagtcgacatatggtctctgggtatcatggctattgagattgtagaaggagagcctccatacctcaatgaaaatcccttgagggccttgtacctaatagcaactaatggaaccccagaacttcagaatccagagaaactttccccaatatttcgggatttcttaaatcgatgtttggaaatggatgtggaaaaaaggggttcagccaaaccgttatctagcttgacaccactgatcatggcagctaaagaagcaatgaagagtaaccgttaacatcactgctgtggcctcatactcttttttccattttctacaagaagccttttagtatatgaaaattattactctttttggggtttaaagaaatggtctgcataacctgaatgaaagaagcaaatgactattctctgaagacaaccaagagaaaattgcaaaaagacaagtatgacttttatatgaaccccttctttagggtccagaaggaattgtggactgaatcactagccttaggtctttcagcaaacagcctatcagggccatttatcatgtgtgagatttgcattttactttgctgactttgttgtaatagatcccattcattgtcccctttggggtatttccaatacttgaatggcagattggagtttttcagagtatgtgtttcatctgctagtctttctctccttcatagcttttcttttcctggacttgctccttttgagttgcttttgcgtttctcatgcctaggcaagtgtaatagaaattatgtagctccttatgttggcaaaggagctctatatagtttcactttgtataaaagttaggaccagctgttgttacatgtaatattttagttcagaacttgacctgaaggaagggaagaaaagtatgtgatttttaccttttttaacaaatgtgaaaaagtcagttttagaaatttcgtggtagtaagttcggcatttgttacatgtatagagagaagactaataatctctatttataactaaatcattgagatagaaaaagattcccattgactgtagacttcttcccattttgtcttcccttctgcctgtttccccttcaggcttggctctaggaaccaaagtgatttgttgttgttccaacctgggctttgtgactttggttagtgccactaccttcttccctcctttcccccttcaatttggaaataaatttctgtatatgttgc

SEQ ID NO: 25307 - DNA, 1716 bp, Zea mays
  Clone ID: LIB3898-004-E8_FLI
gtcgcatcccatcccactaccacccatctcgtcgtccgccgattcgatccggttcttccaacccagggtgagtctccggatccgtcgccgtctggtatccgtgtgctctcgtcgccgtcgccgtcgccgccgtctgactgcccccctcgcctcccgcggcgtcgggtctctggtgctgctgctgctgctgctgctgctgcgtgcagggcagtgatggcgacgaagaggagcgtgggcaccctcggcgaggcggatctgaaggggaagaaggtgttcgtgcgcgccgacctcaacgtcccgctcgacgatgcccagaagatcaccgacgacacccgcatccgcgcctccgtccccaccatcaagttcctcctcgagaagggcgccaaggtcatcctcgccagccacctgggtcgtccaaaaggtgtcaccccaaagtacagcttgaagcctcttgttccacgcttgtctgagctccttggagttgaagtcgtgatggccaatgattgcattggtgaagaagttgagaagttggctgccgctttgccagaaggtggagttctgctcctagagaatgttagattctacaaggaggaagagaagaacgaacctgagtttgctaagaagctagcatctgttgctgacctttatgtcaatgatgcttttggcacggcacacagagctcatgcttcaaccgaaggagttaccaagtatttgaagcctgctgttgccggcttcctcatgcagaaggaacttgactaccttgttggagctgttgccaacccaaagaagccatttgccgctattgttggtggatccaaggtctcaagtaagattggtgtcattgagtccttgctggcgaaggtcgatatcctcatccttggtggtggtatgatctacacattttacaaggcacaaggatattctgttggaaaatctctcgtggaagaggataaacttgagctcgcaacttctcttattgagaaggcgaaggcaaagggggtttctcttttgcttcccactgatattgtagtagcggacaagtttgcagctgatgctgagagcaagattgtccctgccactgctatccctgatgactggatgggtcttgatgttggccctgatgccaccaaaacattcaacgaagcattggacaccaccaagactgttatttggaacggccccatgggagtgtttgagttcgagaagtttgcagctggcactgaggcgattgccaagaagctagctgagcttacaaccacgaagggtgtcactaccatcatcggcggcggcgactctgttgctgctgtcgagaaggctgggctggccgacaagatgagccacatttcgaccggcggcggtgcgagcttggaactcttggaaggcaagactctacctggtgtccttgccctcgatgacgcctagatccgctgctgctgctgctactcaggttctgccagctttgcgtgtcatcttgtttcggaccttggtgtagcactgcaaggctaaggtttactcctccgcacatggacttttggggataggcttgccaccgtgttttgctagatgagtcgtggaataagcttttacttcctcgctgctgtgggtgaagtgactggaattcggaaatttggaactaacaaaaccccccgtggatttgtatgatatgttttgttcgacagtttgcgtcccatctttcactgtggtatctggtatggt

SEQ ID NO: 25308 - DNA, 810 bp, Zea mays
  Clone ID: LIB3898-011-B1_FLI
gcgaattcaagagtccccgagtcgacaggccacaaatcccaattccaaaaccttttctccgtcccatcgccggcgatcttctccttcgccgccaatggatctctccgctgtccaggctgccctctccgacaagtcctactccaccctcgcctccctctgcgacgaacttctcctccaggccgcgtcccagggattcaccaccgacgaatggccctactctgtccacctgcttgcccacctctacatcaatgacctgaacagcgcgcggttcttctggaagtcgttgccgcaggaggtcaaggacacgcggccggagctcgccgctgtctggaggattggtcagtgcctctggaaaagagattatgctggcgtcaacacggctgcacaggggttcgagtggggtcctgacctcgctgacttcatcactgccttcctagagagctacagacagaggatattcaagctgttgacttctgcatattccacaattagagttgctgatgtggctcatttcatggggatgagtgaggaggatgcgacaaactatgctgcgcaaaacggttggagtttggatgcagcggccaagatgcttactgtcaaaaagccaaagtctcagaccaaccagaagcttgatgctagcaaactgcagcgtttgactgagtgtgttttccaccttgagaactgatgttcactgtcaatcgtgttgtgtccctgtttcttctctgctccacattgtaagaagcatgtttaccatgtgacagctatatgcctgagcgacttggcccctttcggccgaaaaggggtgatctc

SEQ ID NO: 25309 - DNA, 908 bp, Zea mays
  Clone ID: LIB3898-012-F8_FLI
ccagatccagctcctgggcgtccgtcatccttccatatcccgccctccctcgtcggagcacgagcaccaaaggtgcccagatcttcgtcggccctgcccctgcttccttcaactccaccaccaggcgatgccctagacttaattgaatgggctctcttctcaccaggactggcgtcctgccatggctccacgccaagattgttgatcccatgctgcaggtcatcagaaggggagcagaacccaagcaactagccttctctgctgcccttggtatcacgattgggatctttccggtatgtgggacaactgttattcttggtgctgttgctgtagcagtgttgggaagtcgttgcaatgttgttactgttatggttttaaatttggccgccactccaattgagctaagcttgatcgtccctttcttgcgtttgggggaaaccatcactggcagtgggcacttccccttgacagccaacgcattgaagaatgttctcactggtcatgcatcaaaggatgtgctgctgagcatcgtcaatgcgatgctgggttggcttattgctgcaccatttgtacttgccgtgctgtacgctgtttcgttcccttgtttcaaggtcctggttaacaggtttggcagcattccttcgagccccaggaccccattcaaggcggtgtaggtagtgtgtagcatgctgaatgctcctgaaattgtgtacaccaaattctttgtgatgccgttgggttgagatgggttccggcgtcatgttgctcggccatcccaggcactggcgaataaatccgacttgagaggcacgtgtcctctataattctgtatgctggcttggtaatcatatagtgagatgtgtatttatgaatttacgaactcttcgtgaataaagccatgtttggat

SEQ ID NO: 25310 - DNA, 292 bp, Zea mays
  Clone ID: LIB3898-014-A11_FLI
cggcccaggtagcgcagcagctgacggcgatgtgcggtctgcagctgcagcagccaggtccctgcccttgcaacgcagctgccggcggtgtctactacttaggaaactatgtactgtagtaataatgtaatggagccgctgactagctacctatagggctatagctagttcactcgtttagcggcgatgagtaacggagtgtcacccatcaccatgggtggcagtgtgagcaatgacctgaatgaaccattgaaatggaaaggaataatatatagggaaaaaggatgtttgg

SEQ ID NO: 25311 - DNA, 405 bp, Zea mays
  Clone ID: LIB3898-014-H4_FLI
gttgatcttgtggtagttcccccaactgtcaccatgcagaacgaggagggtaagactgtggacctctatgtccccaggaagtgctcggccacaaacaggatcatcactgccaaggaccatgcctctgtccagatcaacattggccacttggatgcgaatggcctgtatgatggtcacttcacaacgtttgctctctctgggtttgtccgtgctcagggcgacgcagacagctccttggacaggctgtggcagaagaagaaggctgatatcaagcagtagattttacatctagtttaccaagaattggacactgccttagctatgttttgaattcatgtcactatatgcaatgttgtgatttcagctggtaccttaaatctgaagatttagtatctttgttgggtt

SEQ ID NO: 25312 - DNA, 1311 bp, Zea mays
  Clone ID: LIB3898-015-E12_FLI
cggggtgcgcgcccgcccgtgccgttctccgtcgtcaccgttcgcccgccgccgatccatggggtgggcgctggctctgcacggcggcgccggggacgtgccgcgcacgctgccgcccgagagcagggagccgcgcctcgccacactccgccgctgcctcgacatcggcaccgccgcgctccgggagggccgcaccgcgctcgacgttgtcgagctcgtcgtgagggagctggaggactgcccgcacttcaacgccggccggggctccgtgctcacctccgccggcaccgtcgagatggaggcctgcgtcatggagggcgccaccctgcactgcggcgcggtctccgggctctccaccgttgccaacgccgtctccctcgccagactcgtcatggagaagacgccgcacatctacctcgccttcgacggcgccgaggccttcgccagggaacagggggtggagactaaggatccaagccactttatcacggacaacaatatcgagcgtctgaggcaggccaaagaggccaacagggtgcagatcgactacacccagccagcagcaggccaaagccaaaaggcccaggccgtggtggacgacaactgccagacgggcacggtagggtgcgtggccgtggacgcggcgggcaacctcgcgacggcgacgtccacgggcgggctggtgaacaagatgcccggcaggatcggcgacacgcctctggtgggcgccggaacgtacgccaacgcgctgtgcgcggtgtccgccacgggcaagggcgaggagatcatccgccgcacggtggcgcgcgacgtcgcggcgctgatggagcgcggggacgcgctcccgctgcgcgacgccgcggcgcgcgtcgtggcgggggcggcccgcggcgccgtggggctggtggccgtgtcgcgccagggggaggtctgtatggcgcacaacaccaccgccatgttcagggcgtgcgccaccgaggccggccacaccgaagtcggcatctggacggacgccgccgacgcaggcacgggcgcggacggagagactgtcagcgtcgcgctctagctctaggcatttcatccccgtgtggcgtattctatcgttcgcgtcccattattgccacctgtccgatagacaacttgttctcgatccggtaatttcaccgtgcttcagctgcgtgtgtttggaaaaattgattcggtttcgggtattgttaagagatcgatgggagaagtgaaacattgttgggcgttcagtatgcttttgtaataccttttgttttcttaaataaagtcctaaggagtgttggg

SEQ ID NO: 25313 - DNA, 945 bp, Zea mays
  Clone ID: LIB3900-004-F1_FLI
gatcggcaaggccaatccgaaatctcgagctttcgcgccggcgaccacagcaaagaggaggccacagcacgacagcgccccagggttcctactctcgtcgcagcggcagcagtgaggggaagatgtcgtcggtgttcagcggcgatgagaccgcccccttcttcggcttccttggcgccgccgccgctctcgttttctcatgcatgggggcggcgtacgggacggccaagagtggcgtcggcgtggcgtccatgggtgtcatgcgcccagagctcgtcatgaagtccatcgtgcccgtggtcatggctggtgtgctcggtatctacggcctcatcatcgccgtcatcatcagcactgggatcaaccccaaggccaagccatactacctctttgacggctatgcccacctgtcgtccggccttgcctgtggtcttgctgggcttgctgcaggcatggccattggcatcgttggtgatgctggtgtcagggcgaacgcccagcagccaaagctgtttgtgggcatgatcctcatcctgattttcgccgaagcgctcgccctatacggtctcatcgtcggcatcatcctttcatcccgcgccggccagtctcgtgcggactaggcacgttccacatgtctccgccacctggtcgtaaccggggtcgtgttttgtatccgtgatgagccgacaagctggagcacttaatttttttatgctgtctagttttttgaacttgcgttgagtcgagaaaacaaaatagaacttgtgtagccgaggggtgacctttttcccttgtgccattcttttccctgtcgtggtgggtggtgggctgtggctgatgcttctttctgcacacttttttttttgcttgggctgggggcgttggtgtaatctggtgaataagcgagtgcgtccagtgcaatgggagctcaggactcctttgttc

SEQ ID NO: 25314 - DNA, 2182 bp, Zea mays
  Clone ID: LIB3912-003-H10_FLI
cccctcccgttctccgccaccgccaatcccctcccgtcctccgccacctctgctgagagcgagaagagatggccggcaagggtgatgggccggcaatcggcatcgatctcggcacgacctactcttgcgtcggtgtgtggcagcacgaccgtgtcgagatcatcgccaacgaccagggtaaccgcaccacaccctcgtacgtcgccttcaccgactccgagcgcctcatcggagatgcggccaagaaccaggtcgccatgaaccccatcaacaccgtctttgatgccaagcgtctcattggcaggaggtttagtgatgcctctgtccagagtgatattaagctgtggcccttcaaggtcattcctgggcccggtgagaagccaatgatagttgttcagcacaagggggaggagaaacagtttgcagccgaagagatctcctccatggttctcatcaagatgcgtgagatcgctgaagcttaccttggcagcacgatcaagaatgctgttgtcacggtccctgcctacttcaacgactcacagaggcaggccacgaaggatgctggggtgattgctggcctcaatgtgctgcgtatcatcaatgagccaaccgctgctgctattgcctatggtcttgacaagaaggcaaccagcgtcggtgagaagaatgtcctcatctttgaccttggaggtggtaccttcgatgtctccctccttactattgaggaaggtatctttgaggtcaaggccacagctggcgacacccatcttgggggtgaggactttgacaacaggatggtcaaccactttgtccaggagttcaagaggaagaacaagaaggatatcactggcaacccgagggctctccggaggctgaggacctcttgtgagagggccaagagaactctgtcttccactgcccagaccaccattgagattgactcgctgtacgagggcattgacttctactccaccatcacccgtgccaggtttgaggagctcaacatggacctgttcaggaagtgcatggagcctgttgagaaatgcctgagggatgccaagatggacaagagcagcgtccatgatgttgtccttgttggtggctccactaggatccccagggtgcagcagctgctccaggacttcttcaacggcaaggagctgtgcaagaacatcaatcctgatgaggccgttgcctatggtgctgctgtccaggctgctatcctcagtggtgagggcaacgagaaggtgcaggacctgcttctgcttgacgtcactcctctctctctgggtctggagactgccggaggagtgatgaccgtccttatcccgaggaacaccaccatccccaccaagaaggagcaggtgttctccacctactcggacaaccagcctggtgtgttgatccaggtgtacgagggcgagaggacccggacccgcgacaacaacctgcttgggaagttcgagctctccggcatcccaccggctccccgtggtgtcccccagatcacggtctgcttcgacatcgacgccaacggcatcctgaacgtgtctgccgaggacaagacgacggggcagaagaacaagattaccatcaccaacgacaagggccgtctgtccaaggaggagatcgagaagatggtgcaggacgcggagaagtacaagtccgaggacgaggagcacaagaagaaggtggagtccaagaactcgctggagaactacgcctacaacatgcgcaacacgatcaaggacgagaagatcgcgtccaagctggctgccgacgacaagaagaagatcgaggacgccatcgacgcggccatcagctggctggacgccaaccagctcgccgaggcggacgagttcgatgacaagatgaaggagctggagagcctttgcaaccccatcatcgccaagatgtaccagggcgcgggtgccgacatgggaggctccggcggcatggacgaggacgctccggctggaagcggtggccctggccccaagatcgaggaggtggactaagcggtttgtgtcagtctcgtgtgtctgctgcagtggctggctggcccagtcgctgctcgatttatcgtcgtcgtcgcggtgtatccgcgttagaaccttttgttggtgaacaatattatcgtggcacgcgttttaagtaatacggtattctggttcggtttcgt

SEQ ID NO: 25315 - DNA, 2170 bp, Zea mays
  Clone ID: LIB3912-011-C4_FLI
cccgctcccccgctcacaccgaaatttgaaatcctcctcccagtctcgtccttcgaacgaagcaacagccgccgcgccatggagaagatctccgtcgccgtccgcttccgccctcccaacctggtggccgctaacacctccccagccagttccggcggaggcggcgaccgcgagtggcgtatcgatgacacccgcgtttccctcctccaccgcgccgccggccccatcaccggtgcctccttcgccttcgaccacgtcttcgacggtgcggcgaacaacgagcggatctatggcacggtcgtccgggaactcattggcgccgtcgtcggcggattcaacggcaccgccttcgcctacggccagaccagcagcgggaagacattcaccatgaacggctccgacgccgacccgggcatcattccccgcgcggtccgcgacgtcttcgacaccgtgcgccaggctgacgaccgcgagttcctcatccgggtgtcctacatggagatctacaacgaggaaatcaacgacctcttgacacttgaaggccagaagctgaagattcatgagagcttagatcgtggagtgtacgtgtctggtttgcgggaggagatcgtgaacagcgcagagcaagtgtttgagctcctccagcttggagaagcgaacaggcattttggagagaccaacatgaacatgcggagcagtcggtcacacactattttcagaatggtaattgagagcagtggtaaggaccagacagacggtggagatgctatccgcgtatctgttttgaatttggtggatcttgctgggtcagaaagaatcatcaagacgggggcagaaggggtacgtttgaatgaggggaagtatattaacaagagcttaatgattcttgggaatgtcatcaataagttgagcgagaacggaaaacaaagagggcacattccgtatcgtgatagtaagttgacacgcattctccaacctgcacttggaggcaatgcaaagacatctatcatctgtactgctgctcctgaagagattcacattgaggaaactagaggtactcttcagttcgcaagtagagcaaaatgtgtaagcaattgtgcccaagtaaatgagattctaactgatgctgctttgctgaagaggcaaaaactggaaattgaagaacttcgtaaaaaactgcagggttcccattctgaagggttggagcaggttgtactaaaactacggaacgacatgcacaagtctgaacttgagcgtgatcgattggccatggaacttgaagacgaaagaaagttacggatgactctagagcaacatttgactgagcaacagaagctagaggccatatcgtcagaccactttacagattcaatccagctggatcttctgaaaactccagattcgaagtctgtaccagatggctttgttgcctgtcgctcacgttactcacaagatgttgagttcagcccaatacctgaaaatttggataatattgctgaagaagatctatggacacgtctgaacaaaggctgtgttaccgatcttgatatgcttgagatgacacctaatctcaaacgcgagtcatcctttctacaagaaaaatcatcagctgcgccattggaggaacctaccaacgccatatgccagaggttagcaaaggagtgcatctatgatcagcaacagcttgaggaatcaaaggcgagatgcgccaatctcgagaaagattgcgacgtgctgagggacgagaacttgtccctgcaacaggagctctccgagtccaagctagaggcggacagcctcgtagccgagaagcaggcacagctggatgatttgaggatgaggtgcgtggccctcgagagggatctctccagctccaggcaggaggcccaccgccttgccaccgagaagcaggagctggccgggcagctgggcacagagaggcagaagatggatgagctgaagcaggatatccgggtgatctgcggcgacttgctccagcgggaagggcagctcacgtcgatttacaccaagtccaaggccatcatagagagctgcaaggcctcccaggtagctactctgctttgatggtttcaatgaccgctgttggcttgtgcattttttatacataaaaacagaaggacagcatttttatgttgagattatatccttc

SEQ ID NO: 25316 - DNA, 403 bp, Zea mays
  Clone ID: LIB3732-045-H1_FLI
cgtgacggaaggaagaggaggagcaaggagcacgacgcgatgggccactccaacgtgtggaactcgcaccctaagaactacggccctggctcccgcgtctgccgggtctgcgcgaaccctcacggtctgatcaggaagtacgggctcatgtgctgcaggcagtgcttccgcagcaacgccaaggacattggtttcatcaagtaccgttgaagaggccactgtgctgctgtggagaacttcctacatcaaagaaatgggtccttcattagaaggcctaatttatgcgctttagctttttgttcagaacttgagactcatgtgttaaactcgacttgttaaagttttgatggctactttgtgcttgttggaccagctataatcagaagattgaaattttctcact

SEQ ID NO: 25317 - DNA, 812 bp, Zea mays
  Clone ID: LIB3732-046-G10_FLI
tcatggcttccatcacgagtcgtcatggctgtgtggtgtgctagcccaggctggctttgcagtgcctgccccctaattcgctgcactcctgcacgctatctggtctactcatcccaacctcaccccgcccggcaccccaccacctcgcaaaagtcgaggatagcaatgaaatctggctgccgatttctttaattagcatctcggtgaagtgccggtataaccatctcccatacaactatacaagatgcatgcgtggagtgggggctgctgctgcccatttccccccctttaatttgcttgctgagcaagatcaagttgcattgaccgggagcacgccattgtgtggtatgctgcattcgctccagcgacagcgaggtgtaaagggggtggagattacatcgctggagaatcgggaatccagacgcctttcttttctagtgaaaaccgatgcatggctttacaaaatgttgggcggcatatactactacccaatactgctactctccctgtagtcttttttagactttgacccgtcgactgtcaaccgctggaggaatagatgcctgattccgcggcatggaaggctttgtgctgatgcagcttttgcttctctagctcgtcccccatatccgatcgattcgtttcagagtagtagaattcgttacattcgttcgttgtttcaatattgactcccaagtcccaatatatatgtaccggatctcctagctagactcttatttttcaattggagcctttcctctttttcattatgtgataatcatatatcattaggttgctttttcaaataagcc

SEQ ID NO: 25318 - DNA, 1112 bp, Zea mays
  Clone ID: LIB3732-047-G6_FLI
caggattccccttgcgactgcaccacgccccacccaaacccacctaccgcctccgctcccctctccagcgagtcgggggcacggacgggaccagacgaccaggccatggggaagtacatgcgcaagggcaaggtgtccggggaggtcgccgtcatggaggtacccggcggcgcgctgctcggcgtccgcacccgctcccgcacgctcgcgctgcagcgcgcgcagaggccgctcgacaagggcgacgcggaggacgccgccgcggagtacctcgagctcaggagccggaggctcgagaagccgcacaaggagcatccgtcgccgcccgcgaccgcgaccaagaggggcgccgggaggaaggccgccgccgccgccgcggtgcagcacgtgctgatgcaggacgaggtcgaggtcgaggtctcgttcggggacaacgtgcttgacttggacaccatggaaaggagtaccagagagacaacaccgtgcagcctgattaggaacccagagatgataagcaccccaggatccacaactaaaagcaaaaccagcagcaactcgacgacttcccgccgcagaacggaggaaaccccgagctgccggttcataccgagctcgctcgagatggaggagttcttctcggcggccgagcaacaggagcagcatagcttcagggagaagtacaacttctgtcccgtgaacgactgtcctctccctggccggtacgaatgggcgaggctagactgctagattccccacccagcacaagagcaccattgatctgattgatatgtgtctaccacaccacaatgtgactagctccgccgccgccgccgtggaccgtggaggaggcgcaaccaactgtggatctcgatcgcattagctttgttgtctgttgtaaaaattagagtagttagctttgtagccggatgaatgatcttgtgtaaccaacaggcgtggttcacccctggtcacacaacctcactgtaacctgttaactgctcaagctgctgtaaccgaaccaatctcatgtagcgtaggcctagcgcagtcttctcatctgttcgtagctctcgaaattgattgaatggaattagagttaaaatttgcatggc

SEQ ID NO: 25319 - DNA, 178 bp, Zea mays
  Clone ID: LIB3732-048-G9_FLI
aggaagatggggctcgcgttcgggaagctcttcagccggctcttcgccaagaaggagatgcggatcctcatggttggcctcgacgccgccggtaaaaccaccatcctctacaagctcaagctcggcgagatcgtcaccaccatccccaccatcggtttcaatgttgaaactgttgagt

SEQ ID NO: 25320 - DNA, 1016 bp, Zea mays
  Clone ID: LIB3732-049-A8_FLI
cggaagacttgttcctaggtgccgaatcattaatcaatcaaccccccgcccctgaaccacagcgaccatgctgatcgcctataaattaccagctccctccatgctgtagccatatcgtcccttgaagaacagctcttggagcttaattacaaaccaagtcgagctagctagccatggctatccgtcgtctattcctgtttatttctatgctgttggctatggcatgctcttgtgccatcgcttcagacccgagccttctccaagacttctgtgttgcagacaagacgtctcaagttcgcgtgaatggatttgcctgcaaagatgcgaaggacgtggtggccgaggacttcttcctctcgggccttcacaaggccggcaacaccagcaaccggcagggctccgccgtgaccgcagccaacgtggcgcagatcccggggctgaacacgatggggatctccatggtccgcatcgactacgctcccaagggactcaacccgcctcacacgcacccccgcgccaccgagatgctggccgtgctcgagggatcgctctacgttggcttcgtcacctccaatccgaacaacacgctcgtctccaaggttctcagcaagggcgatgtgttcgttttccccaagggccttgtccacttccagtacaactatggcacggacagtgctgcggctcttgccgccttgagcagccagaaccctggggtgatcactgttgccaacacagtatttggttccggtccattgatatcagatgatgtccttgccaaggcctttcaggtcgatcagaaggcagttaactggattcaagctcagttctaaaattttttttctctggtcgggtgtgcatgtttgattcgatctcgtcttattatatgaactatttttttcctctacttcccctttgtaatgtatctttaagctgttgtaagttcatttacctgcttgtcagatgtgttgagaaatgtatcccttgtttgcaaaatgaatgtaatttacttcatggtc

SEQ ID NO: 25321 - DNA, 516 bp, Zea mays
  Clone ID: LIB3732-049-B5_FLI
agcagcgaaggtagccacaacatccactcgactgactactcgagagctaagaaactgttcaacaggtgatccagaacaagatgtgtccaaccaagaaggagatgagtgccgagtcgtcgggctcggcgagcagctggacttcggcctcgacctcgacctcgccggagcaccagaccgtgtggacgtcgccgccgaagcggcccgcggggcggaccaagttccgcgagacgcggcaccccgtgttccgtggcgtccggcgccgcggcagcgccgggcggtgggtgtgcgaggtgcgcgtgcccgggaggcgcgggtgcaggctctggctcggcacgttcgacgccgccgaggccgccgcgcgcgcgcacgacgccgccatgctcgccatcgccggcgcgagcgcgtgcctcaacttcgccgactccgcgtggctgctcgcggtccccgcctcgtacgccagccttgccgaggtccgccgtgcggtcgccgaggccgtggaggactttcagcgccgcg

SEQ ID NO: 25322 - DNA, 1466 bp, Zea mays
  Clone ID: LIB3732-050-A8_FLI
gtgaccgggatccccatccgttccagccccccagaacccagagctccaaacctaggccggagccgcggtgcaagcagctacgtggattggacttggacgtctggctctggaggtcccaagttcccaacgcttgctggagttgagatctggtgggcttccggaggagacgccgacggtttgcgaggtttgctggctccgtggcgtcgcggaaggtcatggagcaccgcgccttcgactgcagcgggagtgatgatgatctccctccaacatatcaaattagagtaccgagaatgcatttcagtgggaacagaaggccattagcaggcgcattttctcagccaagaccacacaacaagttggatagcgatatacatcagattgagcaacaggcatatactggtgttcttagagcattcaaaatgcaatcggatgccctgacatgggaaaaagaaagtctaattactgaactaagaagagagttgaaagtctctgatgtggaacacaggatgctattaaacatggtcaatgaagaggaggctatccatacaataaggcagtcaaggcagggatgtggaatgcaatctagcttgccttataatagcgtagttgatcacaaccttggacctatcaagcggcagaagaaatcacatcccatctattcactccctgtggatccccattcacccagcatgcctttgaaagcattggtgggcaacaagacatatacactggcacctgaaacataagacggggatctgcctatcaaacccttccacatcaggttggttggctggcatctgatggtgctacgaaaggtatggatgggagaagcggaaggtatcacacgaacgagtattatgcttcacataatgacatggggcttttgaacttcaatcgtactgacatacctgatactgaaactcttgtgaaaaaggtggagagggtattatcccggccagatgtgtatgcaattgaaagggcaaaggaactgcttataggccaagagcagtcattgcttgatgcaattgccaaacttgatgaagcatctgaccatgaaagcgatgatatgctagttgggagccggatacacgccaccattgggtgacgcgggcagcacgcctctgacacggggcgatgctttggagttcagacctctggcagcaggcggagaggcaacgatatgtgaaatagtgctgtgtattgtaaaacgctacctgttgttagtccggtagtagcctagtaggttaggttcttttggcagcctggcaaatctgtgcatgcgccatgcagtgtgatgggaatatatgtcttgagcaccatcacatgtgatgtgatgctgtctcgtttcatcttcaacctgagtaagcccgactcctcgaaatatgggtcgggtcactagttgtagtattgtagattgattgcccttccccaagttgcacaacttggaaacatgggtcggttttact

SEQ ID NO: 25323 - DNA, 748 bp, Zea mays
  Clone ID: LIB3732-050-G2_FLI
gcgggaaccggatgaacgtcgggacggcgcggggcggcgccatggccttcaagctggacactctgctcaagctcgccgacgtcaagggcaccgacgggaagaccacgctgctgcacttcgtggtccaggagatggttcgctcccagaagccacccgcgcgcgctgcggaggggccggacatcgtgacggggctcgccgccgagctcaacaacgtcaggaagacggcgaccgtcgacctggacgtgctcaccacctcggtgtcgagcctctcgagcggcctgtcccggatcaaggcgctagtggggacggaccagctgctggcaggcgacgagaggggccagcgcttcgtcgccttcatggccccgttcgtcagccaggccgaggaggtgatccgggagctggaggatgacgagcgccgggtcctggcgcacgtcagggacatcaccgagtactaccacggcgacgtcggcaaggaggaggccagcccgcttcggatcttcgtcatcgttagggacttcttggcgatgctggatagggtgtccaaggaggtgaggggagccaggggttgccacggatcaaaccaaactctgccctgaacagcttgtgaccgatactgcagaaacggtgagagaacaacactgtaattcttggacttgggaagttagacatgtattcgttgtagttcagaaacatctctcacgtcttcgttttcacctttcattcgtcaatagcgtaccttaacgaccac

SEQ ID NO: 25324 - DNA, 2020 bp, Zea mays
  Clone ID: LIB3732-050-H2_FLI
gaagccactcgacggggataccacaatcccaaaaggctcgccaaaaccccctcggcggttacccttctctcccgatggcaaccgccgccgccgccgccgtggcggcacccgagcagccgcgtcgccggaagccggcgccggggcgtgggggcgtggccctccctgcgggactctcggaagaggaggccagggtgcgggccatcgccgagatcgtctcggcgatgggggagctctcgcggcgcggggaggatgtggaccttaactcgctcaagtctgccgcgtgccggagatacggtctggcgcgggcgcccaagctagtggagatgatcgccgccgtgcccgaggccgaccgtgccacgctgcttccgcggttgcgcgctaagcccgtgcgcacggcgtcgggtatcgccgtcgtcgccgtcatgtcgaagccgcaccgttgcccacacatcgccaccaccgggaacatctgtgtctactgccccggcggtcccgattccgacttcgagtacagcacgcaatcctacacgggatacgagcccaccagcatgcgtgccattcgggcaaggtataatccatatgtgcaagccaggagcaggatagatcagctcaagaggctagggcatagcgtggataaggtcgaattcatcttgatgggtgggactttcatgtccttaccagctgaatatcgtgattatttcatcagaaatcttcatgatgctttatcgggtcacacttctgcaaatgttgaggaggctatttgttattcggaacatagtgctgtcaaatgtattggtatgacgattgagacgagacctgattattgcttggggcctcatctgcgccagatgctatcttatggttgtacccgcttggaaattggtgtccagggtacatatgaggatgttgcccgtgacacaaacagaggacacacagtggctgctgttgctgattgcttctgtttggcaaaagatgctgggtttaaggtggttgcccacatgatgccagatttacctaatgttggagttgaaagagatttggaaagtttcagagaattttttggaagtccagcgttccgggctgatggtctgaagatttatccaacacttgtgattcgtggaactggtctttatgagctctggaaaactggcagatatagaaattatccacctgagctgttggtggatattgtggcaagaattctgtctttggtaccaccttggacacgagtgtatcgggtccagagagatattcctatgcctcttgttacttctggtgtcgagaaaggtaaccttcgcgagcttgctttggctcgaatggaagatctgggcttaaaatgccgggacgtcagaacccgtgaggcagggattcaggatatccatcacaagatccggccagatgaagtagagcttgtcagacgtgactatgctgcaaatgagggttgggaaacattcctctcttatgaggatacacgacaggatatcctgatcgggctgttgcgcttgcgtaaatgtggccgtaatgttacatgccctgaacttgtagggaggtgttcaattgtgcgtgagcttcatgtctatggaactgcagtccctgtgcatggccgtgatgtggacaaactgcagcaccagggatacggaactctattaatggaagaagcagaaaggattgctcgaaaggagcaccgatcgaagaaattagctgtcatttcgggggttggtactcgccactactaccgcaagttgggttatgagctagaagggccttacatggttaaatgtttggcgtaatgctatttcattttccgtatcatatagagcagactagtgtttgtaatgtaatatgggtagtcttttttaaaaaaaatgatcgttataccattgttttctaatattgagtagtccagaactccagatgaaaatggagacaactttctatgtatactgaacgatagctaatttgtcgcttatcctcaactttgtgccgtgcagcaactgtgatatgtagtcaggttactcct

SEQ ID NO: 25325 - DNA, 1585 bp, Zea mays
  Clone ID: LIB3732-051-A10_FLI
gatttcatgaaacactagctgaatagatttttccatttgccataagtagcacatgcactgaattgccacattatttgtccatcttattcaatgcctttgctttatgaattacttcgccttactactattaagagcttatgaaaatctttatttttctgaccaaccttcagaacttgtgtgagggagtgtcaaactacagggattattggggagaacgtgatcagccattgtcagttcaaagaggacaacacttctgttggaggctcttggtataaccaggagcaaatttatatccagtggaaagaactgaactgtatgacagactgtcgctacttttgcatgacgcggagagaaggggaacggcaggcacttggtctgagccccgttaaatatcatggaaagtggccgttcttacgcgtttctgtgttccaggaacccctttcagctgcactttctgctgtcaacctactgatgcacttcactggctggctttcattttttcttctagtgaattaccaattgcctcttagaccccaggccaagagaacttactatgaatatactagcttgtggcatatctatgcaatcttatcaatgaacgcatggttctggagctctattttccatactcgagacattgacttgactgagaaattggactattcttcagctgtggccctgcttggctactcgttgatcctttcgttgctaagggctttcaatgtcaaggatgaggctagcagggtgatgtttgcagcccctattttggcattcgttacgacgcacatcttgtatcttaacttctatgagcttgactatgggtggaacatgaaagtttgtgtggtgatggccgcggttcaacttctgacgtgggcagtctgggctggtgtaagccggcatccgtcgcggctgaaggtctggacagttgttttcggaggagcactcgccatgctacttgaactctacgacttccctccatacatgggttacgccgacgcccattcgctgtggcacgcaagcaccattccgctcacctgtctcttgtggagcttcatcaaggacgatgccaagttccgcacggcaacactcgtcaagaaggcaaagtaattaagcaaagggccacactgttaagatatagggtctgggacccatcgtgtacacgaggagcggtttggggcacacgtgttataccggacatcatgaaacctccagtatatttgctcccccccccccccatgatgctcctgtgtcctgtcctgtctcccctccactcacgaattttgtccacaaactcagcgtattctttagggcgcatgttctgccattacgatccgccttcttacctgaatgtgtaaaactcagggaattttagaatgtgttggtgggctttgctagattttgtcatcgccgaatcagttttgcattgtggaatcagacaggacaatggacatcatcggtgtgtttgagtgtttcctgtgacgtgtggacttgtggaaattcctgaagcccatttttgtaggacatttgagttccaacgttacgaaagttactgaacaatacaatgaacacgtgctaggtttgaaac

SEQ ID NO: 25326 - DNA, 874 bp, Zea mays
  Clone ID: LIB3732-051-B1_FLI
cgccggccagccaaggcctgcagctgaagctgaaagacgaccgccgccgcgcgccaccaaccggagtccggagaagcatgcttgctttctttcatgagctttcgttcttgaatctacagtctacaaccgacctcagaccccctgctacctgcacctctgtaaaataacgccgtcgccgtcgtcgccatctccctttctggtgtgcgtgtgacgcagcgatctctgtcgcagctcttgacgtctgaaccgtagctcctcccgctttgagccggcgccgggcgcgggcctcacgttccagctgccgcattgcacgtgttcagagaaagcgaacagaacagaacagaacagaacccgacccagaccctgaagagtctgaatgagtggcccatggccagtgagacgcgctgttgctggcaactcagaggaggtgcagtgtaggcatcgggggaaaaaaagtcttgggctcgtgctgcggcttcgtgcctgtcaatcgtcttcctactgttaatgtggactgtactgtgttttccgagctgtggagagcgcctgagacgccacatcgcacgacgcggcacacatgagtacgtgacacatgggtctcggagctcagcgtagccaatccggcagcacgaaacgactggttggtgtgccagcgatgggactacgacatgacgagcgagcgcgccatcgatgcgccgtgtcgtacgctgctggcttccaggttccaatccagcccggggatgtggccggtttccgcggagaggcgcgtccgtttctggcgacctgaaatcggccgtctcatcagggagataaatcgtgtcccgtactccttccgtagcatagcataatcacataattgattgttcattgaatc

SEQ ID NO: 25327 - DNA, 1312 bp, Zea mays
  Clone ID: LIB3732-051-C4_FLI
gccgctccgcgtctccagagggctctgctcctcctcttcaatcccactcccgccccgatggccacctcctccgtgctcccgctccacctcctgtcctgcgcgcgccgggccagcaccagcaccagcaccgccgcgcgcgcctccgcggccccggcggtggcggcgacgaccgcgcagtccctggaggagtcgttcgggcggaagggcctgcggttcgtggccgacccggccggcgggcccctcgccgcggagctcagcgtgcggaacggcagctcgctgcatctccgcctcggcgacggcctcgtcacgtcctaccggcccaaggtgtactggaaggacgacgggtgccgggaggtgctgcacaccgtggcgggcaagggcggcgtcggcctcgtcctcaacgacgcgacgtcctcgtccgcccagccgtcgctggtcgacggcgccgagtgggccgtcagggacgccgactccgacttctacgacgccgtgcaggtggagctcgggtgcaccatagggaagctggacatctcgtacgtggtgacgctgtactcgctgagcatggcgacggcggtgatcgtccggaacacgggcagcaagccggtggcgctgacaggcgcggtgctgagccacatcaagttcgacaagcgaggcggcacggccgtggagggcctccgtggctgcccctactgctcctacccgccgccggccgcagccttcagcctcctgtccccggccgaggccatgaagcgggaggaccctggctggttcggcggcgccgaggagctgcgccagggcgtctggaccgtcgaggaggacctctacaccacgctcaagaagaaggtgagccgggtgtacgccgcgccgccagaggagaggaagaagcgcgtctacagcaccgcgccgtccaagttcaccaccatcgatcagtatagcgggctcgggttcaggttggtgaggatggggttcgacgacatgtacctctgcagcccgggaggcatgtacgacaagttcggcaaggactactttctgtgcacggggatggcgtccatgttggtgcccgtcgtcgtcaaccccggcgaggagtggaaggcggcgcaggtcatcgagcatgacaacttgtaacttcttcttcttcttttggtcaacggaattacagaatcgaatggcgcgcggctccattctcgaatacatgtcgatggtccgatctccagtgagatatatacatcaatacagatagttctttccatgggaagtgttaaacattgaatgtaaaatgagaaagtgaatgagaaaactatcatttttattg

SEQ ID NO: 25328 - DNA, 1216 bp, Zea mays
  Clone ID: LIB3732-051-F3_FLI
ccaagacactgagctggtctgtttagttggaaagccatctgtactgtacgtttttcgccgatcatggaggatgagaggaacacccagcagcaccagggcggtgagcaggcccaggaccaggagaacgaggtgaaggacaggggactcctggacagccttctcggcaggaacaagcacgacgaccaggagaagaagaaccagcaggaggaggaggagctcgcgaccggcatggagaaggtcacggtggctgagcccgaccacaaggaggagggacacgaggccgccgagaagaaggacagccttctcgccaagctgcaccgcaccagctccagttccagctcgtcgagcgacgacgaggaagaggaggtgatcgatgagaacggcgaaattgtcaagaggaagaagaagggccttaaggagaaggtcaaggagaagctggcggcccacaaggcccacgatgagggcgaccaccaccagccgggcgtacctgccccggcgcccgcaccgcccgtggcggtggacacgcatgctcaccaccaggagggagagcacaagccgcacttcccggcgccggcgcctcccccgcacgtggagacgcaccaccccgtcgtcgtccacaagatcgaggacgacgacacgaagactcagaccccaccacaggcaccggaggaggagaagaaaggcctgctggacaagatcaaggagaagctacccggtggccacaagaagccggaagacgctgctgccgccgccgccgcgccggccgtccacgcgccaccgccgccggcgccccacgccgaggtcgacgtcagcagcccggatggcaagaagggcttgctgggcaagatcatggacaagatacccggctaccacaagagctcgggtgaagaagaccgcaaggacgccgccggcgagcacaagaccagctcctaaggtcgcagcgtgtgcgtgtccgtcgtacgttctggccggccgggccttgggcgcgcgatcagaagcgttgcgttggcgtgtgtgtgcttctggtttgctttaattttaccaagtttgtttcaaggtggatcgcgtggtcaaggtccgtgtgctttaaagacccaccggcactggcagtgagtgttgctgcttgtgtaggctttggtacgtatgggctttatttgcttctggatgttgtgtactacttgggtttgttgaattattatgagcagttgcgtattgt

SEQ ID NO: 25329 - DNA, 1163 bp, Zea mays
  Clone ID: LIB3732-052-F9_FLI
tgcaaccccaaatctctccttcctcacacacgcgaagctgagagaccaaagaagaagaagaaggaggagctgctagcgtggaagtgcccaaggcgagagagagacaagctagctaggacggccgcgacaggctagccagccagctgctagctcctgcggacgaggcgatggctggcgccgacgtcgacgtcgggacggagctccggctcggcctgccgggaggaggcgccgcggcggccaagaaggacaccatcgacctcaagctgaagctgcctaccgctggcatggaggaggctgctgccgccgccaggccggagccggcagccgagaaggccaagaggcccgccgaggcgccggccgccgatgccgagaagccacctgcacccaaggcacaggccgtgggctggccaccagtccgatcgtaccgcaggaacgccatgacgaccgtcgtccaggccgtgaggagcaagaaggaagaggaacctgagaagcagcaacagcccgctgccgccaacgccttcgtgaaggtcagcatggacggcgcgccctacctgcgcaaggtggacctgaagacgtacagcagctacaaggacctctccgctgcactcaagaagatgttcggcaccttcaccgcatctgggaacagcatgaacgaggggagattggttgatccggccggcgatgctgatgatgtggtcactacttacgaagacaaggatggtgactggatgctggtcggcgacgtcccgtgggagatgtttgtcgagtcatgcaagcgtctgaggatcatgaagagttctgaagccataggtcttgcaccaagaacgaaggacaagtgcaagaacaagagctgaagaagatgcagtgttaaagatgttgcacattgtatcaaaagaatggtccccttgcagtgcgctgccgttttttttcctactagaaatataacgcgttttaattactactagttggagggagacctgtcttgttcaactcgttcatggaccagaagcaataatctatccgtgtgtagctggattggtgttatgtcatgtcccctaccgtgtctcccagaatctacttggtgattttattccagtgttgttaatcaagtttatgtgattgttaagtaaagggcatcaatgagactattattatttattatt

SEQ ID NO: 25330 - DNA, 2264 bp, Zea mays
  Clone ID: LIB3732-052-H7_FLI
cgcgtactatttccacaattccaccgacccgtcgtcgcgccactccgtcttgctcaacaccagtcaccactgctctccaagcctccaccagcgtccagccgaaccatcgccaccgcaggatggcctcccgcctcctcctccacctccacctgcgccgccgcgggcgcgggatcccgggctgccccgtgcccgcgctacccctccacgccgcgcggctcctctcctcctccccaccaaccgcagctgcggcctcgtcgtcggcggcgggcggcgggggcatcgagaaggtgctggtggcgaaccggggcgagatcgcgtgccgggtcatgcgcaccgcgcgccgcctcggggtcgccaccgtggccgtgtacagcgacgccgaccgcggggcgctgcacgtgcgcgccgccgacgaggccgtcaggatcggcccgccgcccgcgcgggagagctacctcaacgccagggccatcatcgaggccgccctccgcaccggcgcccaggctatccacccgggatacggtttcctttcagagagtgctgatttcgcgcagctctgtgaagccgaggggctcaaattcattggaccaccagcatctgcaatccgagacatgggcgataagagtgcatccaagaggatcatgggtgctgctggcgtgccgctggttccagggtaccatggggctgaccaggacgttgagctgttgaaactcgaagcggataaaatcggttatcctgttttaatcaaacccacccatggtggagggggcaaggggatgagaatagtcgaaaggcctgatgaatttgtggattctgtactgagcgctcaacgggaagctgcagcatcgtttggtgtaaacacactattgattgagaagtatattactcaaccaagacacgtagaagtccaggtatttggcgaccaacatggaaatgcgatatacctttatgagagagactgcagtctacagagaaggcatcagaagatcatcgaggaagctccagctccaaatgtgccagctgagtttcggtctcatattggtggagctgctgtatctgcagcaaaggtgaatgtttctgaacattagtatatgcttaggagacaaatttgttgctctcagttcactattgttagttaagatcttttcattatctacctgccaattttttcgcaccaatatagaatgacaaatgtgcaagcaatttgcttcacatgactgccagttcaaagttatatgtattatctaatggatcattttagtagactttttttctaataatactcaacagttggcaagctacctatcatttttcatgctatctgtcataaaacaagtggttctttctttgttttctctgttgatatgtttttagcagttattctgtttaatccttctgtttcacatatagggtcatttattggattgtttgtgttgaaggcagttggttactacaatgctggaacagtggagtttattgtggacactctttctggagagttctacttcatggagatgaatactcgactccaggttgaacacccagtgacagagatgattgttggtcaagatcttgtggagtggcaaatacgtgttgcgaatggagaacgactaccattatctcaggagcaggttccattaaatggacatgcatttgaagcacggatatatgctgaaaatgttccaagagggtttctccctgcaacaggaaccttacatcactaccgaccagtcccttctgacccaactgagttgaaactggagtcgaagaaggagataccgtcagcatgcattatgatccaatgatagccaaacttgtagtatggggtgaaagtcgcacggctgcactagtcaagctaaagaagtgtttatcaacctttcaggtttgccaaccaatgttgatttcctccaagaactcgcaagccacagtgcctttgaaaaaggcctagttgacactcacttcattgaacgttataaagatgaccttttgagtatttctacaaagtcctcaaaagaatctcatggtgtagctgagcttggtgcaattttggctgctgcatgcatttgcaagaaggaacacattacatctaaagaatcactacgagccaacaattccattgcgcagtgtacacgaacatggaactgtaccacgctgagcaagaggaattcttgtttgatttgtgcagtgaaataagttgatttcatcaccgttccatttctcatatgttaataattagtaataataatgaataattagtataatat

SEQ ID NO: 25331 - DNA, 788 bp, Zea mays
  Clone ID: LIB3732-053-B9_FLI
ccaaagtccaaagtcgcgtctcccagcctccctccactgtcccacaccccaacactgttccagtccagcggctagcactagcagacagagcccctcctccccctagctcttgctcttccacaggcacagcgcaacgcttccagctagtctcgagacgaccggcagagatgatgaggcgttgcagcatcgccgccctcgccatcttcctcctcctcctcgtgtgctcctcatcctcctccaactgcgcggcagccgctcgcctcctgcctggcgccggacatctccggcctctccgccatgccgccgtgggcgccagtggcgacgagctttccgcgggctccgaggtgacaacccaagacacgatggaggcgtgcgaggaggggaacggcaaggacgagtgcgtgcagaggcggctgctcctcgacgcgcacctcgactacatctacacgcagcacaagggcaagccgtgaccgcgagggaggatgccatgccgcagctgcagtggagcgaggagctcgcagatgcaggccaccgtctcggctcggctgctagtgctacggccccccctacggaaaaagttggtttgtggagtgaatattttataatcacttgctagaatgctacgtagatgaacgctgctagctgcggctaattaattaacatccggacggacgttgtcatccgtctactagtactagtagtctagtactagctagtatatatatggctgtgtacgtctccaagtcttatctaatatatgcatgcacatggtggtggacaaattaaat

SEQ ID NO: 25332 - DNA, 1062 bp, Zea mays
  Clone ID: LIB3732-054-E1_FLI
gcgtcaacgtgtcttccttcccgcggtctctccgccgcctcccagatccggcggccatggcaaggaacccgggctgcaccgtcttcataggtaacttggatgacaaggttcctgagagggttctgtatgaaattcttattcaggtaggtcgtgttgtagacctacacatacctcgtgacaaggaaactagccgaccaaaaggctatgcttttgctgagtatgaaacagaggagattgcccaatatgctgttaagctattttctggtcttgttcgacttcataataaaacgcttagatttgcgatctctgggcaagacaaaccctcattaaatggcaatatccctgtaactcctaggttaaactctgtaccacagccaaagcctcatcaacctatgaggtctagtgatactcctttgccacagcatacagcagtgaatggcaggagtgccgggtatggtatcccaccaaatcattcatacgacacgcacactcaagcactgtcgagtgggttaccgaatagaggactaagcaacggtacgtatgaatatagtaggcgtgtatttggttctgttctgaatgatgttagccgtcgagctaccagggaaccaatcccgtacccgtcctactagcatgttgagccctggtgactgtgactctatgtgctgacagaaaatatttctgaagatgttgtctgttgtgtcagccacctgtaatatctctgtactcaccatttcatgcctgtaaatatgggttatggtggtaggacatatgcttgtttttttggttctgttcttcgcattgtagtgagacttttccctgcttgttaggtccttctcatcccctagtgtgaaggccatgcctccactagtatggctgcactaggaaataccattcctagttacatgaatgggtggcaatatgctggcaattgtgttttaacattagtgccattagctatttcaatgttacagcagggcgtgtttgtgtttgagatattagtatttggtggattttgtgcttctcatcatggatctgggacatctgaaggagaaacattgtttt

SEQ ID NO: 25333 - DNA, 1082 bp, Zea mays
  Clone ID: LIB3732-054-G10_FLI
ctgtcactcacgctaccgccgtgaccgatcatctctcactctctcgtcagatcctctcggctagctagctagctaggacagaggagggaggggaaggcgctggctatggcgactgcggcggcggcggcggcggcggccatggaggagccggacgtcgtcaacggccgcgacgtggtgagctgggtggcgtccggggtggtgctgtggtcgaccgccttcttgctggtgcgggcgctgttccccaagcgctcctacgacttctgcaaccgcgccgtctccaccatgcacgccgtcgccgccgtgtgcctcgcctgcctctccgtcgacgactggtcgtgccccgtctgcccgctcgccgccgcatcctcccgtcgccagatgaaggcgctggcggttacgctggcgtacatggtgtacgacgcggcgtgctgccacctcaacggcgacacgcggctggacaacgccgtgcaccacctggtcagcatcgtcggcatcggcgcggggctcgcctaccagaggtgcgggacggagatggtggccagcatgctcgtgacggagatgtccagcccgctgctgcacctgcgggagatgctcaaggagctgggcgtgcgggacacggagctgaacctcctcgtcgacgtgctcttcgccgccaccttctccgccgcccggatgggcgtcgggccgtacctcacctacgtcaccgtgacggccgacaaccccatcctcatcaaggcgatggcgacggggctgcagctggtgagcgcctactggttcctgcggatcctccggatggtcaggtacaagctcgccggcaagaagaagccgacgccggccaagctcgccgccgccgccgccaactgacgtaataagcgccggcgacgaccttcacgagctacgcacatttatgataccgggagttggattcgacagaggccgtgctgtacatatagtacaaatacacacacacgcccgcctctgaagcaatgcaatgcaatgcaatttctccactgccaaggatgtgtctgtcatctctcatcaaccaagtgtcggtgcgtaccaactgtacgcgcgttgaaaag

SEQ ID NO: 25334 - DNA, 733 bp, Zea mays
  Clone ID: LIB3732-055-F11_FLI
caccgttgccgagccctcgcctcaccctcacagtcgtctcaggatgatgccccaggccagcgctagcctcgacctcggcctcagcctgggcctcaccctcacctcccagggcagcctctcctcctccaccaccaccgccggctcctcctccccctgggcagccgcgctcagctccgtcgtggccgacgtcgccagggcgcggggtgacgcgtacgcgcagcaccacgctggcgccgcgatgacgatgcgcgcgtccacgtcgcccgacagcggcgacaccaccaccgccaagagggagagggagggggagctcgagcgcaccggctccggaggcgtccgcagcgacgaggaggacggcgcggacggcggcgccggcgggcgcaagaagctcaggctctccaaggaccaggccgccgtcctcgaggagtgcttcaagacgcacagcacgctcaaccccaagcagaaggtgcagctggccaaccgcctgggcctccggccgcggcaggtggaggtgtggttccagaaccgccgcgcgcggaccaagctgaagcagacggaggtggactgcgagtacctcaagcgctggtgcgaccgcctcgccgacgagaacaagcgcctcgagaaggagctcgccgacctcagggcgctcaaggccgcgccgccgtcgtcggccgccgcgcagcccgcctcggccgccgccaccctcacaatgtgcccgtcctgccgccgcgtc

SEQ ID NO: 25335 - DNA, 852 bp, Zea mays
  Clone ID: LIB3732-055-F12_FLI
gaatcctccccctcctccacgcagacgcagctcgctctcctctcagcccccacccatcgagcccctagcgccggcgcccagcggcggtatggaggctggtggcgaggagttcgcgatcggcgtggtgctctccgccaagaccaccctgggggaggagttcgagggccagatcgtcgccttcgatcgaccctccaacctcctcgttatccaggagggcgtggggagggcggagagcggggagcggcggaacgtgagggtgctgaaggcgaactacatccgggagttctctgtgctcagcaagggagacgatcctctcgatcctgccggttgcatgctggaccttaactccatttatgcccgggaggatgctgcactcaggcaagcagagattgaagctgagagaattggtgttggtgtcaccccagaagctcaaaatatattcgatgcgctgtccaagacgcttccggtgcagtgggacaagactgacattgttgtaatgaaggaggttcgtgtacgcagcccgtacctgcccgaaaatgttagtggaggaacagctgcagcaaacgaacgtgttaagaaagtgattgactttgaaaggaaaagattacattcacgtgcacctggccaattctcttaacctaaaaggattgatttttttttttacattagcatgtgtttctgatactgcggcccgttttattattctcatcggtggggttttccataaaatatttcagcaaaaatgtggtaataatcacatcaactagcttgtttatgaactgtttgatagatgacatgttgtaattgaattgattataagccctctgtatttaggactgttagattgataat

SEQ ID NO: 25336 - DNA, 1307 bp, Zea mays
  Clone ID: LIB3732-055-H1_FLI
aattcattttgatacatataatcccaagctcctctatcatagggatatatggatataagacgtgatttccatatggccgaaggggaaggagaatggagctactctccaagaattgtaggcgccagcaagtagctgtccgcgagaccaggccaatggtcgagactgccgtcaagcaggtgtacgcagctctcttccccagaaccatggtcgtcgccgacctcggatgctctgcagggccgaacacgctgctcttcatctctagcgtcctgagcagcatcgctgctgcggctggtgctgaacggtgcaagccgccgagcggcggcggagacgatgacgaccatcacgtggagcttcagttcgtcctgaacgacctccccggcaacgacttcaaccacctgtttcggtcagtcgaggaggagttcagaagggcagcaggttgtgaaaggggtcctcctcctcctccctactatgtcatggggctaccggagtcctattacaacaggctgtttcctcgtcagagtgtgcatctgttccactcctcctactgcctccaatggcgctcccaggaacctgagggactagaggcgtggagaaagccttgcctgaacgaggacaacatttacatcgcaaggaccacgacaccttctgtggcgaaactgttccaggagcagttccagaaggacttctccctcttcctcaatctgcgccatgaagaactcgtgcatggaggacggatggtccttatatttcttggcaggaagaacgaggatgtgtacagtggcgacctcaaccagctcttcgcactggtcgcaacagcgttgcagtctcttgttttgaagggccttgtggagaaggaaaagctagagtctttcaacctaccggtgtacgggccgtcggtgggagaagtggaggagctggtgacgcgtagcggcctgcagttcagcatggatctgatcaagcagttcgagatgaactgggacccgttcgacgactcagagggtgacaacgacgtcgtcgtcgtcgaggacagcgctcgcagtagcgtgaatgtcgctaagctcatcagatccgtgctgaaggctctggttgtccgccattttggagaagccgtgctcgacgcgtgcttcgccgagttcaggcgcctcgtcgctgagcaccttgggaaggagaagaccaagttcaccaccatcgccatgtgcttgaagaaagagtgatatatatacgtatgtgtattgtatttcgtacggtagttaatagcctaatactcatatgtgttatcatgtgtatttcatgggacgacgtacaat

SEQ ID NO: 25337 - DNA, 1389 bp, Zea mays
  Clone ID: LIB3732-056-A5_FLI
caccgatcccgatggatatgggcagcggctcgtcacctgtcatcaccgatccgatatcgataagcccaccgctgctgggaggcttgacgtcgaacctgatgccgttctcggtcatgtccggaggctgctcctccagtcctagcatgagcaacagcagcaggcgtaaaatcgaggaggtccttgtcaatggcctgctagacgcgatgaaatcgtcgtcgcctcgcaagaagcacaacctcgccttcggacaggataattcgcccgacgaagatcctgcttacactgcatggctgtcaaaatgcccttctgcgctggcctccttcaagcacatagtagccaacgcaaaaggcaggaggatcgctgtgttcttggattacgacggcaccctgtcgccgatcgtcgacgatcccgacaaagcgttcatgtcccctgtgatgagagctgctgttagaaatgtcgcgaagtacttccctaccgcgattgtcagcggaaggtcccgtaagaaggtgtttgaatttgtaaaactgacggaactgtactacgctggtagtcacgggatggacatagtgacatctgcagcagcacatgctactgaaaagtgcaaagaagccaatctcttccaacctgcttgcgagtttctccctatgattaatgaggtttccaagtgcctcatggaggtcacgagttcaattgaaggtgcaagggtggagaacaacaagttctgtgtatctgtacattaccgcaacgtagcagagaaggactggaaagtggtcgcaggactcgtgaaacaagtcttggaggccttccctcgtctcaaagtaaccaacgggcgaatggttttagaggttcgcccggtgatcgactgggacaagggaaaggctgtcgagttcctgcttcggtcgctcggcctaagcgactccgaagatgtggttcctatctacatcggagacgatcgaacagacgaagacgccttcaaggtactgcgagagcgaagctgtggatacggaatcctagtctcgcaggtgcccaaggacactgaagccttctactcgctgagagacccgtctgaagtgatggggttcctcaattccttggtgagatggaagaagcacccgctgtgacggaactgaaaacacgacgactgattcagaagccgtaaagcgactgtacttcgtgcggcggcaattttgtagagtttctggctcaccgggtggctcattctttcatgcgtttttattttttatttttttaactgtcccagtccttcgtcactgagaaataacaagtggttgtcccacaccctcttgcaactgtaatctgtaagcaagaggccctccctgttaggtctatatatattgaataaaaccgggacgcttttgccttgccctg

SEQ ID NO: 25338 - DNA, 864 bp, Zea mays
  Clone ID: LIB3732-057-C7_FLI
ttaccaggtcatgaagagtcatacaatccttctgttgaatacattcctacacaagaggaaatagattcataccagcttatgtatgaggaggatcgcccaaagttcattccgaaacgatttgagtgccttcgaagtgtacctgcatatgagaaggcgttgagggaaggttttgatcggtgtctagatctttatctatgccctagaacccgcaaaaagcgtataaatattgatcctgagtcactcaagccctttttacttggtaacttgggccaacctccagcccggaatcgagagcaatggcgctcgccaaggccaaggagatcgttgcctccgctcccctcgtcgtcttcagcaaaacttcctgccctttctgcgtccgtgtgaagcagttgttcgagaagctcggagcaagctacaaggccattgagttggataaggaaagtgatggagctgagctccagaatgccctgaaggagtggactggacagaggactgtcccaaatgtcttcatcaatgggaagcatattggcggctgtgatgatactatggcactgaacaatgatgggaagctggtgcctctgctgactgaggctggagccatcgccggttctgcctcgaagacaaccatcactgcttgacatgtgtgttaccattcccgtgcttaaaaataatgatgctttgcaagtgctgaacttgcagatgctatgtgggagtgactgttcgttccctgtgtaaaactccctagacatcagtcgagtcgtgttgctgtggtggttgtgaaatctacaataatcattgctacaataatgtcgtgttccctagacatcagatgagaaagatgagaagaaataacattataatctt

SEQ ID NO: 25339 - DNA, 696 bp, Zea mays
  Clone ID: LIB3732-058-E12_FLI
gaagagagccgagagctagctacctagcgcgcgatggcgatgtccgcttccaagatgatggcggtcgccgccgctgccctgctagccctggtcctggccgcgtcgaccgcggaggcgaggaacatcaagacgacgacgacgacgacggagaagaaggacgatgcggtggtgcagccgcagaccttcccgcccttcgaccgcctcggcggcggcgcgtccccggcgtccggtggcctccccggcacctcgtcgggcggcagcagcattccagcgttcagcatgccgggcagcggcagcagcctccccggcgggtcgttcttgcccggcagcagcggcagcatcggcagcatgcccctcttcagcggcggctccccggccttcagcggcttcggcggcatgcccgggtcccccgccgccggctccgtctccgtcgtccccgtgcacggcagcaagccctgaaaatccgtccgtcgccggagcccggaagtctgtcgggccaacttgtgccctagtactcctttgcctgcattgtattggagagttggtatcgcgtttcgtttggtgtttgctttgttattataggccgcctatctaccgagacatgtgatgtttgttgcggtaaattaaaatcggttgtattcatgctgctgctgttgtctttaatttgttaagaacggttcacattattgatttgtc

SEQ ID NO: 25340 - DNA, 732 bp, Zea mays
  Clone ID: LIB3732-058-E8_FLI
ggcttgctgtgaataccgtggatttctttaaccaagttaatatgctgtatggcacgctcacagaattctgcacacctgagagctgcccaacaatgacagctggcccaaagtttatgcaggtatgagtacagatgggctgatggtgtgcagataaagaaacccatagaggtatcagcaccaaaatatatggagtatctgatggattggattgaaggccagcttgacgatgaatccatatttcctcaaaaacttggcacaccattcccaccaaacttcaaggaagtagtgaagacgatattcaagcgcttgtttcgtgtttatgcccacatataccactcgcatttccagaagattgttagccttaaagaggaggcccatctcaatacctgtttcaagcacttcattctgtttacaaatgagtttggcctgattgacaagaaggagctggctccactccaggagctcattgaatccatcatcgttccttactgagactacggtgtagtaaacgtggatatagagctctcagtgcagatggctgtgaagtgtccatccgtgacagaacttcactgcatagagctatatgtgcatgtacctgtgtgtttctaaatgatcatgtattggccatgtaagtgtgcctgttatcagttatagaagggtgatgatgatcatgtactgcaaaaagagaaagcacaagaatgtgttggattgatgtatgcagtgtttattttc

SEQ ID NO: 25341 - DNA, 1038 bp, Zea mays
  Clone ID: LIB3732-058-F4_FLI
gtttcctactaccgcgctgccgcacgtgggatgacctgaccctccgcctgcccccaagatgaatgtgggacatgctgcccacctgtccgggcagacagcgcacatgaatcaagttcctggctccggtgttggcattggtgttggcggctcagacgggctaccgcagcaccagccaatgcaggagatggcggcgctctcaggaatggaccagcagtttgtcatgcttcggaccgctatgcgcgacaagatatctgactatataggaagaaaacagtcaccgggtgattggcggaaacggttgcctgaactggcaaaacggcttgaggagatcttgtacagaaaattcccaaacaagcatgagtactacaatatgatgaagggaccagttgagccacaattgcaatttgctatcaagaccttgagtgctcagaaccaacacaatcaacaaaacccacaaatgacaaggcaaatatcatcgtcctctagctatggtgctatgattcctacccctggtatgacgcaaggcaccagtgcaggttctaggactccttatgtcacggagaccaatgctctttcatcgtctggtgcatgcatggttcctcagaatgctaacatgggtacctcaatgcaaggtccaatgtctaacgggtaccagcatttaaataccaacatttcacaaaattctaccacaaataatgtcgaatctacaatgggttcagttggcgttcagcgacaactatctcatatgatcccaactccaggattcagtaatcaacagaatgtaccttcaaatcctgactattcaaatggaactggatacttcaacggtgagtcagctgtggcgccacatatgcagcaccagaaacaatttcctagcaaccacaatagcaatcaaattcaacatattgggggacacaataattctgggatacattcaagcttgctggacaactcatctgcctatggtttatcagatggccacatgaatggtggcataggagtgcatgggtcaaatatgcagctaacaaacaggactac

SEQ ID NO: 25342 - DNA, 979 bp, Zea mays
  Clone ID: LIB3732-058-H7_FLI
caccgcgtgcgaaccaagcagaccccagcagaagaagcgaagtcgtcgccggagcaggaggaagagcgaggagcaacatgtcgtggcaggcgtacgtcgatgaccacctgctgtgcgacatcgaaggccagcacctcagcgccgccgccatcgtcggccacgacggcagcgtctgggcacagtccgagaacttccccgagttaaagcctgaggaggttgctgggatgataaaggacttcgatgaacctggaactcttgcaccaactggtctttttgttggaggtacgaagtacatggtgatccaaggtgaacctggagttgtcatccgaggaaagaagggcactggaggcattactatcaagaaaactggcatgtccttgattatcggtatctatgatgagccaatgactccagggcaatgcaatatggtggtggagaggctcggcgattacctgatcgaacagggcttctaagggggtgtttggtttgaggaatcactccatccaaaatgtggtggtgcatcatggatccattcctcaaatttggtgggatgaccccattcctcatattagtactaactaactaactataaggaatgaggtgatgatggatcaactcattccattccacaaaccaaacaaaaaaagtgaggagtgagaagatgattgactagctcattcctcaaaccaaacagtctataagtttgtcataatgctattttggtcattgggcacttaagtttgcacctcatttggttctgtaatatgtgggcttgtgcatgtgcttggcgtattgcatgcagtgaataatttatcttcgcgttgggttgctgacaatgttgggaacggatttgaattggggtttatgcttgccatctcctcatatctcgaactcagctgctgtttcactgagtaatgtacatttccctggtaatggtacttgcactctgctgctttatggaaaagagtgcattttactg

SEQ ID NO: 25343 - DNA, 1507 bp, Zea mays
  Clone ID: LIB3732-059-F11_FLI
ccgaaacccacaacaaaagcatcgccaaggtacgtagaacgtagccatggtgtcgtccggaactggaagcattgccaagaggtggcgcgagctccagggcgagaagtcgtggaagggcctcctggagccgctggacatggacctccgcaagtccatcatctcctacggcgagctcgtggcggccaccggcgacggcttcaacaacgagccgcactcgccgcacgttggcctctgcaagtacggccacgacgacctgctgaccaagtcgggagtggccgccgccagccactacaaggtgaccaagttcgtgtacgcgtgggaggattcgaagctcacctggatagggtacgtcgcggtggccacggacggcgagggcgtggcagctctagggaggcgcgacatcgtcgtggcgtggcgcgggtcgatgacaggcgcggaatggtggaaggacgtcgaggttctgccgacgtgtccctggccgacgctgggcctggaggaccactccgtcgggcacgggcacccgtgcgcccgcgtgcacagtggcttcctgtccttgtacacggagccacccaagccgcccaaagacaccaactccgacatggcgttctttgtcaacggcagcgccagagaccaggttctggcggaggtgaggaggctgatggagctccacagggatgaagacaccagcatcaccgtcgtcggccacagcctcggatcggcgctggccatcctgaacgccatcgacctcgtcggcaacggcgtgaactcctccggcctcctcggcgggcggcctccgtgcccggtgacggccatcgtgttcgcgtgcccacacgtcgggaacgacagtttcagagatgccttcacctcgttcaagtacctcaaggtcctccacgtcaagaaccagcaagattgggtgccgtttctcatgggctggctacatgacctgggcgtcacactgcacatcgacacggccctgtcgcactacctcaagaagcccaaccttgtcacggcccacagccttgagagctacatgcacgccgtcgccggcgaggtgggaagcgacggcaagttcaggctgctggtggaccgcgacgtggcgctggtgaacaagagcgccgacgcgctcaaggacgagtaccatgtgccggcgagctggtgggtgccgcacaacaagaacatggtcaagaacgatcaaggcaagtgggagctcaaggattttgagcaattctgacctgaacgtctatataataataataataataataataataataataataataataataataataataataataataataataataataataataataataataataataataataataataataataatctctctattttaaattataagtcgttttgatttttcaaaatatatcgtttttattatacacatagacgtactatataataaaaactatgtatttagaaaaatcaaaatatcttgtaattaattagaaagaccgacgagagtatatat

SEQ ID NO: 25344 - DNA, 911 bp, Zea mays
  Clone ID: LIB3732-059-F8_FLI
ctcgcacacactcccctgccgctgtgccgcacccgcacccctccagcgcgcgcgggcacgagcacgagtacgaggctccatcgccggacgaccaggtagttgcactgccgccaccgtcgacgacgaccgaaggcgacgatggccaggccgcagcaacggtaccgcggcgtgcggcagcgccactggggctcctgggtctccgagatccgccaccctctcctctgaccgcgcccggctggggctgttgatttgcatgcaggaaggcgcggatatggctgggcaccttcgagacggcggaggacgcggcgcgcgcctacgacgaggcggcgcggatcatgtgcgggccccgcgcgcgcaccaacttccccgccgacgccaacggcccgccgccgtcgttcctctccgcggcgctcgtcgacaagctgcaccggttcaacctggcgtccgtgcaggccgcgcagcggcagagagaggcggcggcggcggcggcggcagcagcagcaacctccgcgcccgcgacgcctccgacgccgccggccacgcagtggggcggcggcggtaggtccctggaggagcagcacgtggagcagatgatcgaggaactgctggactccgacttctccatggagatttgctgctagtgctaggctagccgcgacgcgacctgcctagcgactggctagcgcccccggccggcccgtcaccgccgcgctccgctccacctctcctctgttcttgttcttgcacttgcaccatgcgtcgcgctcgcgctcttctttgtactcgtgccgacgtgcgtagtatcgctcagccgctgcagcgtgcgtaggagcctgatttgtgtacgccacgtgtatagctgtagctgtacgtataagtatatatatgtaatcgagcattctcattcttgc

SEQ ID NO: 25345 - DNA, 2119 bp, Zea mays
  Clone ID: LIB3732-060-B8_FLI
cacgaaagggagggagttacagtgattttggtgattatgatgacggaaggagaaggacgtccgatcttttgcagagaacagggagaggaagcgatttagatgacgatgaagatgatgatgctggtccagttgggtttgagggttccagtgtaaggcagcaaggtggcaggagaggcaaaatggcgaagagtgttggaccacatcgggttgggaggggcagcgatacggactttggtcaccgacagccaaggggtctgaaaaaaattgactttggcttgtcagaggatgatgatgaggtgggggaagttgatgaggaagatgagccatcggggttcgaagatgatctttttgaagacgagggtgataaggaggatgtgggacatataataggtaataagtctggctcatctatgttacccgaagatgagccagctaaaaatgaaagtgtacagggcagaagtgctgggggtggtgattcttatctgagccagaagaggtttgatgaatgcccgttatctcccttgtcactgaaaggtgttaaggctgctgggtatgaacagatgactgctgttcaggaggctactcttcctattatacttcaagggaaggatgtactagccaaagcaaagacaggaactggaaaaactgtagctttcttgctaccagcaattgaagttatttcgaaattgccacctgttgatcgtgatctaaagaaacctcccatcagtgttgtagtagtgtgccctacacgtgagcttgctgatcaggctgctgcagaagctaacaagcttcttaaatttcatccatcaattggagtacagcttgtaataggcggcactagaatggcacttgaacagaagcgcatgcacactaacccttgccagattctagtagctactcctggaaggcttagggatcacatggagaacactccagggtttgctacaaggttgttgggtgtcaaagttctaattcttgatgaagctgaccgcttgttagatatgggattccgatcagatattgaaaaaattgtggctgcactaccaaaacagcgtcaaacacttctattttctgcgacagttccagatgaggttcgtcaagtatgtcatattgccatgaaaagagatcttgaattcgtcaacactgttcaagaaggaagtgaggaaacacactctcaggtgaagcaaatgcatttaattgcaccactggacaaacaattctccaacctatatggtcttctaactgatcatatttctgaaaatgttgactacaaggtgattgtattctgtacaacagcaaaagtaacaagccttgttgctgagcttctgtctgagttaaagttgaatgtacgtgagatccactccagaaaacctcaaagctacagaactaggatatcgaaagaatttaaggagtcaaagggtctcattcttgttagctctgatgtatctgccaggggtgttgattatcccaatgtcacactagttgtgcagttgggggtgccaactgacagagagcaatatattcatcgacttggtagaactggtcgcagaggcaatgaggggacaggagtcttactattggcaccatgggaagaatatttccttaggagcatcaatgacttgcctattacagaggcaacacaaccattaattgatctggatactaagaaaaaggtcgataaggctcttgcacatgtggaggttaaagacaaggaatccgcttatcaggcgtggcttggttactacaattcaaataaggtcattgggcgcgacaaataccagcttgtatcacttgccaatgagttcagcagaagcatgggtctcaacaaccctcctgcagtgtctaagcttgccctcaggaagatggggctgaacaacattccaggtctgagatcaaagtaaccaattgccatgtatactgtatacatgtcttgaagtcttttttgcacatgatctgacatctgagcactctattccatactgatcgagttgagttagtttctggtaataaatttattgtacgttttatgcttgcagaagtgcacgaatattcataatatgttctcattcgtttgttctgttactgagataacaaatgataaagatgaacgtgttttgct

SEQ ID NO: 25346 - DNA, 750 bp, Zea mays
  Clone ID: LIB3732-060-D3_FLI
gctaagcctgagcctgcctggactagctatactacatatatatacatataacaagcctgatttcctaattaagccttggacggatccaatattttagctagctagcaagcaaagcaagccttgaacttttgagcggcggctagcgcaatgggaggcgtggcgtcggagctggtgggagccagcagggagaggcagagcaggaagaggaagcagttccacacggtggagctcaaggtcaggatggactgcgacggctgcgagctcaaggtcaggaacacccttgcccgcatgagaggggtggagtcggtggagatcaaccggaagcagcagaaggtgacggtgaaggggttcgtggaggcgcagcgggtgctgaggcgcgcccagtccacggggaagcgcgtcgagctgtggccctacgtgccctacaccaacctctacgtcgcgccgccggtgtacgacaagagggcgccgccgggccacgtccgcagggtcgacgcactcatcgcgcccgccgccggccaggaagagcacctcgccacgctcttcagcgacgataaccccaacgcctgctcccttatgtgattcctcatgctagagccgcccgcctgctccccggccttattatgcgatgctagctgcttgcttcatccacgctgtacctctactagcgatgtcatgctccgtagttacgcagtaatataataatctgtatcttttaattaattaaacaacagtacgtaaatgactttc

SEQ ID NO: 25347 - DNA, 1615 bp, Zea mays
  Clone ID: LIB3732-060-E12_FLI
tccccatcttctctttctccgtcccctccccaacacgcgttccccaaattctcccaccctactagaaatccccatatccgcggcggcgccggccttcggattcgatcctcctagcgagtcgactccatctgatcggcggagccggggcaccagccaccatgtgggcggcatcgtgcctggcgtcgtgctgcgcggcgtgcgcgtgcgaggcgtgccggacggcggtcggcagcatcggccgccgctccgcccgcatcgcctactgcggcctcttcgcgctctccctcttcgcatcctgggcgctccgcgaggtcgccgcgcccctcctccagtcgatcccatggattaaccacttccacaagacccccgaccgcgagtggttcgagaccgacgcggtgctcagggtcagcctcggcaacttcctcttcttcaccatcctcgccgtcatcatggccgggataaaggaccagaaggacccccgtgacaaggtccaccacggcggatggatggccaagatcttctgctgggtcgtcattgtcttcctcatgttcttcgtgcccaacggcgtcgtcagcttctatgaatctatatccaagtttggctctgggctgttccttctcgttcaggttgttctgctgttggattttgtgcacggatggaatgagaactgggtcgccaaggatgagcagttctggtacatggctctgttggttgtctcggttgtctgttacattgccacgttctgtttctcgggtctcctatttcactggttcactccatctggacatgactgcggactcaacctgtttttcattgtcttcacgttgattcttgtttttgggtttgctattgttgctctgcacccaaagatcaatggaagcttgttgcctgcatcagttattggtatgtactgtacatatctgtgctacagtggactctccagtgagccaagggattacgaatgcaatgggcttcacaatcactcaaaagctgtgtcaactggtagccttacattgggactccttaccacggtcctctctgtggtctattctgctgtccgcgctggctcctctgcaactgtgctctcgccaccagactcaccacgtgggaccgacaagccattgcttcccttcagcaaggcagacgaacaagaagataagaaggatgtgccgaggccggtgacatactcctactctttctttcacctcatcttctccctggccagcatgtactcggcaatgctcttgactggctggtcaacttcggttggtgagagcggaaagcttgtggatgttgggtggccatctgtctgggtcaggattgcaacccagtgggcgacggcaggtctgttcatatggtcgcttgttgcacccatcctctttcccgacagggaattctaagttcaaccacggtaagcctggagcatcaaacgtgtctactgtggtagctaatatatcctatcaagtatgttgcctttaaaacatgctccgagcgtggatggcaaaaagtcggtgtttgtccactgttatcaagtttgtctacttaataacgtgtgctgcttgtattgtgtatatactggagaattttaaggatgcatcatgcgagcgtgttgtgt

SEQ ID NO: 25348 - DNA, 693 bp, Zea mays
  Clone ID: LIB3732-060-E3_FLI
gctcctcccaccagtgagatcgatcgagcttccacctcctgtcatcctcctcctcttcctcctcttgcaggtcgcagctgagcagcaacaaggccggaaaggatgtcgtggcagacctacgtcgacgagcacctcatgtgcgaggtcgagggccaccaccacctcacctccgccgccatcatcggccacgacggcaccgtctgggcccagagcgccgcattcccgctgttcaagcctgaggagatggccaacgtcatgaaggacttcgacgagcccgggttcctggctccgaccggcctcttcctcggccccaccaagtacatggtcatccagggcgagcccggcgccgtcatccgcgggaagaaggtcttccttctttttacggttaatttccagggatctggaggcataaccgtgaagaagaccggggaggcgctggtggtcggcatctacgacgagcccatgacccccgggcagtgcaacatggtggtcgagaggctcggcgactacctcgtagagcaaggcctgtaaacggaattgcttcagtccaatcggaattgtttataatttgttgttgtcgttccggcaaataattttgtgtggtttcacctaaaagtttggttgtcgtatgatttgtaaaccccgaacagtatctatatgtgattgaactgcgcctacctattcttttattat

SEQ ID NO: 25349 - DNA, 782 bp, Zea mays
  Clone ID: LIB3732-061-F1_FLI
acggattgttggggatgccaaggagaagaataggaagttcactgagactgtggaacttcagattggtctgaagaattatgatccacagaaggacaagcgtttcagtggctctgttaagttgccccatatccctcgtcccaagatgaaggtgtgcatgcttggtgatgcccagcatgttgaggaggccgagaagatgggacttgactacatggatgttgaggctctcaagaaaatgaacaagaacaagaagcttgttaagaggcttgccaagaagtaccatgctttcttggcatcagaggccatcatcaagcagattccccgtctccttggtcctggtctcaacaaggcaggcaagttcccgaccctggttactcaccaggaatccctcgagtccaaggtgaacgagactaaggcaaccgtcaagttccagctcaagaaggttctttgcatgggtgttgccgttggcaacttggcgatggaggagaagcagatccagcagaacatccagatgagcgtcaacttccttgtttcccttctgaagaagaactggcagaatgtgagatgcctctacgtcaagagcaccatggggaagccatacagggtgttctaagtatgctcttttgtgaagtctgctaggttctggcaccgaggttttattgaattaaacttttgttaagagtatgtttttggacgatcctatatttcgtcctggcgctactatgtttcagaatggtggtactactataagtatcctggcgctttaagtattgcttgaaaggatc

SEQ ID NO: 25350 - DNA, 916 bp, Zea mays
  Clone ID: LIB3732-061-F2_FLI
cacggggcgactctgttccacgagagcatggggagcctcgacgcagatttccacgacatggcgagcgaggccttggacgcccacgacaacttcggcatcgagatagctatgcgggagttcagggacttgttcgaggggatccagtccatgacctactgctgcggtaacttcggtgatgacaagggtgccagggccattgtcaaagccttcccacacataaaatgcactgtgctggcccctcccaagatcattgccaccaaaccggccgatggagcgaagataaactatgtcgaaggtgacatgttcagtttcattccacctgctcaaactgtcgtgctaaagcttgtgctgcaccacctgaccgatgaggagtgcgtcaagctcctggctcaatgccggaaggcgattcctccacggaaggacggcgggaaagttataatcggtgatattatgattgaccactctgggcttatgctggaaactcacctcctgatggacatcggcatgatgaccatgacaaaaggacggcagagagatgaaaaagaatggagcgagctcttcaccaaagcagggttcagcgaatacaagatcctgaaggaatttggagctcgtgttgccttcgaagtctatccgtgagatatatatatatatttacatacatatatgtatgtgtgtgggtgccttgcgtggcttggcgtgatgatgtcataaataaagagggtgggtgtgcttgcggtattcatggatggccatggatctgagcacatgacgttggatgctttcttaaggctctcgtggatcttctatatttggaagaagctgtaaaataatatatcgccatctagtgttggcgctggcttgtatgtactttgtacctgctttattattttgtgcaatatcgagtaacctaatgtat

SEQ ID NO: 25351 - DNA, 564 bp, Cuphea pulcherrima
  Clone ID: LIB3792-034-B11_FLI
tccgcgtgatagccgagattgcacgtgctgtggggtcaacgggcatggctgcgggtcagttctacgaccttgaaggaggccctgatgcattcgagtttgctcaggagaagaagtttggggagatggctgagtgttctgctgtttgcgggggattaattgcaggaggcgatgatgatgagattcaaaggctgaggaggtatgggagagctgtcggggtgttgtatcaggtggtcgatgacatattggaggagaaggcaaaggagagtgtggcaaccgaccgcaaggggaatagagggaagaactatgttcaggtgtacggtgttgagaaggcgctcgaggtagcagaggagctccgggctaaggccaagagggaactggacgggttcgagaagtatggagacagtgttattcctctatacagttttgtagattatgcagctgatcggggcttcagcctcggcggggaggtgagttcataaacacgaaaccatgatcaaaatcaatcactaacctcaataaataaacgcatttcgcgacaaggaatacataaacagttctcaatgg

SEQ ID NO: 25352 - DNA, 2244 bp, Cuphea pulcherrima
  Clone ID: LIB3792-042-H3_FLI
aagagcttctgctagtcggagctcgtcggcctcgtctgatggcgaacaacgcaaaatgactgtttggaaagagaagaacgaatggaagattgatttctcgagccgcaagcctaccacgccgttgctcgacactatcaattacccagctcacatgaagaacctctcaactcaagatctcgagcagctgtcagcggagctgagggcggagatagtgcactcggtttccaaaacaggcggtcatctcagctcgagcctgggagttgtggagctttctgttgcactccaccacgtcttcgacacccctgaagacaagattatatgggacgtcgggcatcaggcttacgcgcataagattttgaccggaagaaggtctaagatgaatactctcaggaagacatccggcctgtctggatttcctaagagagacgaaagcccacacgatgcattcggagctggtcacagttcaaccagcatatcagccggtctcggaatggctgtggctcgagatcttcttgggaagaaaaacaacgtcatctccgtgatcggggatggagcgatgacagccgggcaagcctatgaagctttgaacaatgcaggctatctcgatactaatatgatcgtgatattgaacgacaacaggcaagtatctctgcccacggcgaccttggacgggcctgcgaaccccgttggagctctcagtagcgctctcacccggctccaagctagtgagaacttcaggaaactccgagaagcagcaaaaaacatcacaaagcaaatcggaggacaggcacacgaggttgcagccaaagtggatgagtatgcgaggggtttgatcagtgcttcgggatcaacattcttcgaggagcttggcttatactacataggccccgtggatggccacaatgtcgaagatctcgttaccattttggagaaagttaaggctatgccagctccaggaccggttctgatccacgttgtcaccgagaaagggaaaggctaccaacctgccgaggctgccccggataaaatgcacggtgttgtgaagtttgatccaaaaacaggtcagcagttcaaaccgaagcccgccacactgtcatatacacagtactttgccgagtctctgatcaaggaagccgaggtcgataataagatagtcgccattcatgcggctatgggaggtgggacgggactcaacttcttccagaaaaagttccccgagagatgcttcgatgtcgggatagcagagcagcacgccgtcacatttgcagcaggtttggctactgagggtctcaaaccattctgcgccatatactcctcgtttttacaacgtggatacgatcaggtcgtccatgatgtggacctccagaaattaccggtgcggtttgcgatggacagagccggccttgtcggagcggacgggcctacacactgcggagcattcgacattccattcatggcttgcttgccgaatatggtagtcatggctccttcggatgaggctgaactcatgcatatggttgctactgctgcagccatcgatgacagaccgagttgcttcaggttcccaaggggcaacggagtcggtgcaactctcccacctaacaacaaaggaagcccgctcgagatcgggaaggggcggatattggtggagggaacgagagtagcccttctcgggtacggttcagttgttcagcagtgtgttgaatcagcgagtatgctcagatcaagaggcgttcccataacagttgctgatgcgagattctgcaaaccactggacactgagctcatccgacaactcgccaatcaccatgaaatacttataactgtggaagagggttccattggcgggttcgggtcacatgttgcacactttctaagcttgtccggcattctcgatggccccctcaagttgagacctatggtgctgcctgatagatacatcgagcacggatcacccaaggatcagctcgaagaagccggattgacatcaaagcacatatcagccactgtcctatctctcttgggccgtgccaaggaagcattccaattcgaaagatgatctccaacagcgagttttttcttttgcttctgtgatcatcacatcacacctatccccggaaacctcaagacccggaattcttcttctgggcacacaaagatcattacaactggtgtatgagtgtatcctaaatgaaaagtcctatgcatattcaaataagttaagccatgataaactatgcatac

SEQ ID NO: 25353 - DNA, 1298 bp, Cuphea pulcherrima
  Clone ID: LIB3793-019-B1_FLI
aacgaaccattcagattgcttaccaagccaggaaacaatttcccggggagaaattatggctcaccaatgagattatccacaatcctactgttagtaagaacttcgaggatatgaaggtcgagattttacctctcgtggaaggggagaaacaatttgatatggttggagatggtgatgttgttgtattgcctgcttttggagcttcagtccaagagatgcaaactctgagcgagaaaaatgtacaaattgtcgatacatcttgcccttgggtgactaaggtctggaatgttgctaacaaacacaataaaggagaatacacttcaataattcatggtaaatattctcatgaggaaactgtagctactgcatcgtttgctcaaaagtatgtcatcgtgaagaatatgaaagaggcaatgtatgtatgtgactacattctcggtggtcaacttgatggatcaagctctaccaaagaggcattcctagagaaatttaagaatgcagtttccaaggggttcgatcctgacaaggatttaacaagagttggcattgcaaatcagaccacaatgcttaagagcgagactgaagagattgggaaattaatagagaaaacgatgatgagccagtttggagtggaaaatgtcaatgagcactttatgagctttaacactatttgcgatgcaactcaggagagacaagatgctatgtttgaattggtggaacaacatgtggatatgattttggtcattggagggcttaactcgagcaacacgtctcacctgcaagagattgcagaagaccgtgggatcccatcctattggattgacaatgaaaagagaataggtgaaggaaacaaaatcacccataaactgatgcacggggagctgctcgagactgaaaactggcttcctaagggtcctatcacaatcggcgtgacttctggagcctccacgcccgataaggccgtcggagatgtgttggcaaaaattttcgacttaaaaagtaaagaggctttactggtggcttaaatcatggatttgcatgcccggtgattcattggcagctcttcggtaatgctgatggccattatgtacaacaaacatatcaacaaataaggcctcggaaactatagtagcaggctcgtatatttagatggaaagtcacaaactttatgtattataatgtgttgtatctgaattgttgagtcatggctatgctattgtacgattgacattcttatgaaatcagctgctgccatctttgattgcgatgcaaagcgcatccaatcgtgttttaaggtt

SEQ ID NO: 25354 - DNA, 578 bp, Zea mays
  Clone ID: LIB3801-004-F2_FLI
acacagacaggcggctgcagctgtggtcaacaacaaagccatgagcagcaacatcatccacaacaacatcatccacaaaaacaacaacatcaaccaccaccacaacatcaccagcagcagcaacaccaacaacaacaattccagggtcatgacaagcagcaacaaccacaacagcctcagcaatatcagcagggccaggaaaaatcacaacagcaacaatgtcattgccaggagcagcaacagactacaaggtgcagctataactactatagcagtagctcaaatctaaaaaattgtcatgaattcctaaggcagcagtgcagccctttggtaatgccttttctccaatcacgtttgatacaaccaagtagctgccaggtattgcagcaacaatgttgtcatgatcttaggcagattgagccacaatacattcaccaagcaatctacaacatggttcaatccataatccaggaggagcaacaacaacaaccatgtgagttatgtggatctcaacaagctactcaaagtgcggtggcaatcttgacagcagcacaatacctaccatcaatgtgtggctt

SEQ ID NO: 25355 - DNA, 814 bp, Zea mays
  Clone ID: LIB3801-009-H4_FLI
cgtcttcgtactcgcctacctccgcggctcaaacctttcccccttctcccaattccctccgtcggccgccgctccatcccgtacgacgacaccatgagggagtgcatttcgatccacatcggccaggccggtatccaggtcggaaacgcgtgctgggagctgtactgccttgagcatggcattcaggctgacggtcagatgcccggtgacaagaccattgggggaggtgatgatgctttcaacaccttcttcagtgagactggtgctgggaagcacgtgccccgtgctgtttttgttgaccttgaacccactgtcatcgatgaggtgaggactggcacctaccgccagctcttccaccctgagcagctcatcagtgggaaggaggatgcagccaactccaccagtgttgtggaggtgttctcccgcatcgaccacaagttcgacctcatgtacgccaagcgtgccttcgtgcactggtacgtcggtgagggtatggaggaaggtgagttctctgaggcccgtgaggacctggcggcgctcgagaaggactacgaggaggtcggcgctgagttcgatgagggcgaggatggcgacgagggtgacgagtactagagaagtttgctgatgacgcagcatcaggccagtgtgctgcccttatcccgtgatctgccgtgagttgctcctgctatcgtgttatgtgtgtctgttctgaagtattgtgtggtttacaacacctgatgttgtaagagttgttaattcccctgcattgctaccgggttattgagaataattatggctgtttacgttgttgctt

SEQ ID NO: 25356 - DNA, 940 bp, Zea mays
  Clone ID: LIB3801-010-F10_FLI
ttatactcaaggcaaggaattaggagcagaccggagacttgggggcttcacctgctgtatctcattaccatctgcatctggttgcccgttgattgagaaggaggagctgagggccatggcgaccgagaagcccatcctgtacaacgcctggatcagctcctgctcccaccgtgttcgcatcgcactcaacctcaaaggtgtggattacgagtacaagtcggtaaaccctaggacagatccagattatgaaaaaatcaatccaatcaaatatattccagcattagtagatggggacatagtcgtttctgattctcttgccatctcattgtatttggaagataagtatcctgagcatccactcctgcctaaagatctcaagaggaaagctcttaatcttcagattgcaaacattgtttgttcaagcattcaacctcttcaaggctatgctgttattggtctgcacgagggtaggatgagcccagatgagggccttcatattgttcaaagttatattgacaagggattcagagcgatcgaaaagctgttggaaggatgtgagagtaaatatgctactggagatgatgtccaattggcagatgtgttccttgaaccacagatacatgccggcataaatcgcttccaaatcgatatgtcgatgtacccaatcttggagaggctccatgatgcatacatgcaaattcccgcattccaagccgcgcttcctaaaaatcaaccagacgcaccttcatcataatcatcaagattatctcaataatttgcatgtcattttgtaataatttggatagggagccactgcttcctccatcccgttgtggatcaaaagggtgaacgattggcacttacctgcatggtccaatacctattatatttcttaaacagatactatttacggctattgtaatttaagcccaatacctgc

SEQ ID NO: 25357 - DNA, 180 bp, Zea mays
  Clone ID: LIB3802-001-A6_FLI
ggtcaacgtccatctcctgcggctgctgctgtggctgctgctggtccgccatggctcctgctccttcactgagatcagatcgatgaagcactaacaacaaccatttatatcaaggaacaattcgtagacgacagtataaaaatcgaaactttcatacatgcacaaacgcttcgttctcgg

SEQ ID NO: 25358 - DNA, 553 bp, Zea mays
  Clone ID: LIB3802-013-B5_FLI
aaaccatcaaggcacagcagctgcagcaactcgtgctacctgtgatcaaccaagtagctctggcaaacctttctccctactatcagcaacaacaatttcttccattcaaccaactatctacactgaaccctgctgcttatttgcagcaacaactattaccattcagccagctagctactgcctactctcatcaacaacaacttcttccatttaaccaattggccgcactgaaccccgctgcttatttgcagcagcaaatattactaccatttagccagctagctgcagcaagccgtgcttccttcttgacacagcaacagttgctgcctttctaccagcagtttgcggctaaccccgcaaccctcttacaactacaacaattgttgccctttgtccaacttgctttgacaaacccagcagcctcctaccaacaacacatcattggtggtgccctcttttagattgcttattagttgtaattcaataataaagttttttggatgatgtatgtggccaaccagaaataagaagttacatttccagattctaaaag

SEQ ID NO: 25359 - DNA, 832 bp, Allium porrum
  Clone ID: LIB3803-007-D1_FLI
gcacgagctcggtctcctccgtttgtccctccttcacccaatccaaacccaggtcccttttttctgtttcgcagtttctacctcctcaacctggccgtccatcccgcaccactctttccgttcgcccaatctcagctgtcaatttagaagcactaacagtagaaaatccatccaaatcaaaacctgctccttctcttccgtttagagttggccatggattcgatttacaccgtctagagcctggattgcctcttattattggtggcattgacattcctcatgatcgtggctgcgaggctcattctgatggagacgtgttactccattgcgttgtggatgcaatactgggggcattagggcttcctgacattggccagctttttccggattctgatccaagatggaaaggagctgcttcttctgtattcatgagagaagctgtgagactgatgcatgatgcaggctatgaacttggaaatatagatgcaactttgatacttcaaaaaccaaaactgagtccacataaagaaaaaataagagccagtttatgcgatcttttaggagcagattcatcagttgtgaatatcaaagcaaaaacccatgaaaaagtcgatagtctcggtgagaataggagtattgcagcgcatactgtagttcttcttatgcgaaaatgagcatactaccagacttcgtgtatactgcatttgatggattgtattattcattttctcagttaaaccatacacccacttttgtaatctagaaaacaaactcatgtataactcagttgtgataaatattacagaaaaagtaataaaagacggttggatct

SEQ ID NO: 25360 - DNA, 885 bp, Allium porrum
  Clone ID: LIB3803-009-F4_FLI
tgccgcacacttccagtcgcccgtccgctctccaaccgcctttcccgcaggagctccgctgtcctctacccaatccgtgcctcagcccctaagcgtgaagccgaccccaagaaacgggttgtgattacaggaatggggttggtatcggtcttcggaaatgccgtggatgcctactacgataagcttctagaaggggaaagcggaatcgatttcattgaccgcttcgatgcttccaaattcccgactagatttgcagggcagattcgtgattttagcagcgaaggatatattgatgggaagcatgatcgcaggttggatgattgtttgaggtattgtatcgttagtgggaagaaagcgctagagagcgctggcgttggcgttgggaccaaagagctggcaaagattgacaagctgcgagctggtgttttagttgggacatgcatgggtggactcacagtgttttctgacggtgttcaaactctaatggagaaaggtttaagaaaagtcaatccattctgtatcccatatgtcataacaaatatgggatctgctttgcttgccatggatattggattcatgggtgcaaactattcgatctcgacagcttgtgctacctccaactgctgtctttatgctgctgctagccatatccgtagaggtgaggctgatattatgattgctggtgggactgaagcggctgttattcccattggaattggaggttttgttgcctgtagagctttatctcgaaggaatgacgatccaaaaactgcgtctaggccttgggatcaaggccgagatgggtttgtcatgggcgagggtgctggaactttggtattagagagcctggagcatgcattaaaacgtggagctcgtgccgaattc

SEQ ID NO: 25361 - DNA, 1278 bp, Allium porrum
  Clone ID: LIB3803-022-H7_FLI
gcacggctttttcctctctttctttaacgttcttttcgcacttcttcccctccacatcagatctgctttcgctgcgcctggttttcctgagtgtttcttcacgcaacctactttcaattctcagatcttcttttcactttcgcccgcgacttcagctctgatgatctgctagagaatgttgcttgcgcggaggcatggatttagctagagcacgattctttccctgtatgtcttccagatgtccctcaaatcgagactgattttcagctggccgaggttatttctggtcgatgttggtgggattgctggtttattttcattgctgtctgtgatttcgccttctagtatttttgcgtctcctgtagttttgggtttctttggtgaattgtagttctgttcttttctggttgtgtgaagtatgcttttcagattttggctggttgtatgcttttcttttttattggtcatgtgggtgattggagctagtactgatggtttgttctctggattatctactcggcctcgctctgctccacaggtgaagcgttgctctcaacggagcgagctatttcaggtcactaaagcctccttgccaacgtgtgctagtttttatcgcttgtatgctatcatttcatcaaactatgcctatgcaagtatggtcatggaaaactgctttagcactttgtgctattgcgtttctgtcttggtacgatcgcctggttccaacaatgtcacatctcgtgttgaagccttggtccttttcacgtatgcaatgtccctacatgtgaactatttgtgctgctcattactaggagctcaagtatgtcctttgcagtaacgtcttacttcttccaatgctttgctactgctcaatgttatctcagtatggctgtttctatgggatggtcccaatgcaaagtggacttatggctgatgtcatactgtccttgtacttttgtaattgtaattgtctgttaccctggatttcaaaatatataacttgtagtaacagtatatgaaacatcactccctgcgtggagtattttgatatatgttctgttctcaccctgcgtggtgagcttgaaaattgttatgtaacaattgcctctctgcgtggagtgctagggaaatacatagtggacggcccactataactgccgttagcggtggacggaccaccttaaaaaccgacaatagttgatatgtaaattgcatatcacctgaagtcatatgtattttttattttgtaataaataaaagagtgttacggaacactat

SEQ ID NO: 25362 - DNA, 1312 bp, Allium porrum
  Clone ID: LIB3803-032-B12_FLI
gcacgagccgagatccaaggcaaacgtgccatggacctcaaaatgggcaccataaacaacgaccaaatccacgacaactacaaccagtactggtccttcttccgccgccccaaggaaaccgtcgagaaaaacgtccccgccttcgtcgacaccttctacaacctggtcaccgacatctacgagtggggctggggccagtctttccacttctctccttccttccccaacacctctcacaaagatcaaactcgcctgcacgaagagcgggtggtcgattacatccacgcgaaacccggtcagaagatcctcgacgtcggatgcggcgtcggcggtccgatgagggccatagcagcaaaaagccgatccaacatcgttggaatcaccatcaacgagtatcaggtgggccgggccagggcccacaacaagaaggctgggtttgattcgatctgcgaggtcgtctgtggtaacttcctccagatgccgttccagaactgtagttttgatggggcttatgcaatcgaggcgacttgtcacgcccccaaattggaagatgtttattcggaggtgtttagggttttgaaacccgggtggtttgtttgtatcatacgagtgggtgactacagagttgtacaatgcgaaggatgaagagcatgtggagtgcattcaagggattgaaagaggggatgcactacctgggcttagagcgtacaatgagatcagggagattgctaagaaagtagggtttgaggtgttgcaggaagaggatttagcaaaaccgccagcatggccgtggtggacgaggttgaagatggggaagatagcgtattggaggaatcacttgcttgtgacagtgatgactttcttgaggattgcaccgaaaggagtggttgaagttcatgagatgttgtatgagaccgccaaacatttgagtaagggtggagatactggaattttcagcccaatgcatatgattttgtgcagaaagccaatgggtgatgcggagaagtgagactcagggtttgtttgagccgctgccttgtttacttgtagaattgtaagtgttttttttttttccaagactttttgatgacattggtgtttgttttttattttaagttaattcgttggcgttttagatggctgtgaagctgaaatactccattgattgctgcacgatggacattgttccttttgagttaggatggtcatgtactacattccacggaatcatgcttcttgtactctcatgtatctagcaacgtgtaactttttggttttcgggttaagttttaatttcatatgtactttgatt

SEQ ID NO: 25363 - DNA, 2468 bp, Allium porrum
  Clone ID: LIB3803-041-B4_FLI
ggtttttcaaacaacataaccattccattgatcaactaaaataaaacaagaacatcacacaatcatcggcttctcatacatacatcatctcctccctaacatcatatacccttgatcacttcacttattccactcacaaacacttcttaaacaaacctgacataagaatctaaacaatgacctaatccctcttattagcaacattgcactgcttcctaacctcgccctgggtaccagttagggggttgttctctgaaagcaaagcaatggccctggagaactccttgaagaagtagtcctcgttcttcgccatcttgataacatagggcctggtcctggcatcgtaggccagctgatggtcgaccaggagaaggcccttattgtcgaggatgttgcggtagtagttgttgtccagcttcattggcgttcctcggtcgttgcgtacatattggactgctttcgggtcggggatggcatctgggcactttttcatcatgtgcgggacgtggtctgggttcagctctgggtccacttgtgggtatagacggtggacgagttttacacagtgggttcgtcccacactgtgtgcaccaagaagagcaacaactccaggtgtatcaatgcccatggcagcaaatttgtccaaaacaacagagatgctctcattgtggtctggcaaatacttctccaaaacttcagctctgctcctcctcccatctctcctccctgtttttagaggaatgtgtggtcctccaaccaaagcaatgccatctctagcagagaggaccaagatgtcggcacaagagaccacttcagggcattctctctccacagcctcctttattgtgtccaagtacctaaaatttctcagcccaaagcttctatcagtctccttctcagagagagaccttcttgttgaatcaagcagcagtgaagcatcacaagactcaacagcgcagtcgtggaaaaggcctctaagccaagaaaaggcggtgttcttgtgccttttgtacagcaatctaacttgttcttggattatatcttctgcttgtgggcatgaatctttgtaaaagttcatcacaagaccagggccagtttcttcctcatttgaggaagctagggctgcgcccgtccgctctccaaccgcctttcccgcaggagctccgctgtcctctacccaatccgtgcctcagcccctaagcgtgaagccgaccccaagaaacgggttgtgattacaggaatggggttggtatcggtcttcggaaatgccgtggatgcctactacgataagcttctagaaggggaaagcggaatcgatttcattgaccgcttcgatgcttccaaattcccgactagatttgcagggcagattcgtgattttagcagcgaaggatatattgatgggaagcatgatcgcaggttggatgattgtttgaggtattgtatcgttagtgggaagaaagcgctagagagcgctggcgttggcgttgggaccaaagagctggcaaagattgacaagctgcgagctggtgttttagttgggacatgcatgggtggactcacagtgttttctgacggtgttcaaactctaatggagaaaggtttaagaaaagtcaatccattctgtatcccatatgtcataacaaatatgggatctgctttgcttgccatggatattggattcatgggtgcaaactattcgatctcgacagcttgtgctacctccaactgctgtctttatgctgctgctagccatatccgtagaggtgaggctgatattatgattgctggtgggactgaagcggctgttattcccattggaattggaggttttgttgcctgtagagctttatctcgaaggaatgacgatccaaaaactgcgtctaggccttgggatcaaggccgagatgggtttgtcatgggcgagggtgctggaactttggtattagagagcctggagcatgcattaaaacgtggagcgccgattatagctgaatacttgggaggtgccgttagctgtgatgcttaccacatgacagatcctagagctgatggacttggcctttcaacttgtattcagagatgtctagaagatgcaagagtttctcctgaagaggtcaattacataaatgctcatgcagcctcttcacttgttggggatttggctgaagtgaatgctataaggcaagtcttcaaggacccgacgggcatcaagatcaatgctacaaagtctatgattgggcattgcctcggtgctgctggtggtctcgaagcaattgctacaattaaggccataaccactggatggctgcatcctaccattaaccaattgaatccagaacctgctgtcgagttcgatacagtcccaaataagaaacagcaacacgaagttaacgttgcaatttctaatgcatttggatttggtggacataactcggtggtggtctttgctccatataagccatgaa

SEQ ID NO: 25364 - DNA, 1360 bp, Allium porrum
  Clone ID: LIB3804-013-A5_FLI
gaattcggcacgagccgctgtcctctacccaatccgtgcttcagcccctaagcgtgaagccgaccccaagaaacgggttgtgattacaggaatggggttggtatcggtcttcggaaatgccgtggatgcctactacgataagcttctagaaggggaaagcggaatcgatttcattgaccgcttcgatgcttccaaattcccgactagatttgcagggcagattcgtgattttagcagcgaaggatatattgatgggaagcatgatcgcaggttggatgattgtttgaggtattgtatcgttagtgggaagaaagcgcttgagagcgctggcatcggcgttgggactaaagagctggcaaagattgacaagctgcgagctggtgttttagttgggacatgcatgggtggactcacagtgttttctgacggtgttcaaactctaatggagaaaggtttaagaaaagtcaatccattctgtatcccatatgtcataacaaatatgggatctgctatgcttgccatggatattggattcatgggtgcaaactattcgatctcgacagcttgtgctacctccaactgctgtctttatgctgctgctagtcatatccgtagaggtgaggctgatattatgattgctggtgggactgaagcggcggttattcccatggaattggaggttttgttgcctgcagagctttatctcgaaggaatgacaatccaaaaactgcgtccaggccttgggatcaaggccgagatgggtttgtcatgggcgagggtgctggaactttggtattggagagcctggagcatgcattaaaacgtggagcgccgattatagcagaatacttgggaggtgccattagctgtgatgcttaccacatgacagatcctagagctgatggacttggcctttcaacttgtattcagagatgtctagaagatgcaagagtttctcctgaagaggtcaattacataaatgctcatgcagcttctacacttgttggggatttggctgaagtgaatgctataaggcaagtcttcaaggacccgacgggcatcaagatcaatgctacaaagtctatgattgggcattgcctcggtgctgctggtggtctcgaagcaattgctacaattaaggccataaccactggatggctgcatcctaccattaaccaattgaatccagaacctgctgtcgagttcgatacagtcccaaacaagaaacagcaacacgaagttaacgttgcaatttctaatgcatttggatttggtggacataattcggtggtggtctttgctccatataagccatgaatctcctaaaatttaaatattgtcaaagaagtgaatacaatac

SEQ ID NO: 25365 - DNA, 1488 bp, Allium porrum
  Clone ID: LIB3804-013-C6_FLI
gcacgagggaaacaatagcatcgagctgggacgagttaaattaccaaagtgggtttggcaaccacttgtcatctgaggccctgcctaatgctttgcctttggggcaaaatagtcctttgctttgcccctacggcctttacgctgagcaaatttccggcacttctttcactgctcctagaaaagttaatcagagaagttggttatatcgggtaaaaccttcagttactcatgaaccattctatgctcgggtaccaagtcataagttcttagtaagcgagttcgatcataaaacaagctctgcaaatcctacacaatttagatggaagccagtcgatgttcctgattcgcctactgatttcattgatggacttcagacggtgtgtggagcagggagttcttcccttcgtcatggatttgcaattcacatgtatgcagctaacaaatctatggatggttgtgctttctgcagtgcagatggggacttcttattagttcctcaaatgggaaaactgtggatcacaactgaatgtggaaaattacaagtaactcctggagaaattgttgttattcctcaaggttttcgcttttcagttgatttgccagatggcccttctcgtggctatgtagctgaaatttttggcacacattttcaacttcctgaccttggtccagttggtgcaaatggcttggcatctccaagagattttcttgctcctacagcttggtttaatcatgatccgcatccagggtatgttattgttcagaaatttagtggagagttgttcactgcaaagcaagatttttctccatttaatgtagttgcttggcatggaaattatgcgccatataagtatgatctcagcaagttttgcccattaaatactgttttggttgaccatgctgatccttcaataaacacagtgctgacagctccatcggataaacctggtgttgcacttcttgattttgtgatattcccaccacgatggctagtttctgaacatacttttcgacctccatactaccatcgtaactgtatgagtgaattcatgggattgatttatggagcatatgaggctaaagcagatgggttccttccaggaggcgcgagtctccatagctgcatgacgccgcatggaccggatactaagagctatgaggcaatgatagctggtggtgaaaatgcagaaccctacagaataagggataccatggcttttatgttcgagtcatgcttgatacctcgtgtatgcccttgggctctggaatctccatatagagattctgactattatcaatgctggattggactcaaatcacacttctatgtggacaatgagaagtctgctaatgtgaatgatgctggagaagtccataatggagaaaatgttaatagttgaaatgggcagagagctagttaggtcttgatcgactgtaataccctgcgctttcagaataattaattacggcacgagggggggcccggta

SEQ ID NO: 25366 - DNA, 691 bp, Allium porrum
  Clone ID: LIB3804-017-A10_FLI
gcacgagctcacacatgcgaaggaacggttgagatgcagaacgactagggaaagaaggcagatctaggacctcgtatagccagagacaggtcagtgggtgctcgtgtgggatatggatcttttgagaaatcagaaaatgttgaaggaacgggcatgggcggcctaacagtgttttctgatggtgttaaagctcttatagaaaaaggcatagaaaaatcacaccattttccattccatacgccataacaaatatgggatctgccttgcaagctatggatggacattggattcatgggtgcaaattattcgacttcaactgcttgtgctacctccagttactgcttcttctatgctgccgctaatcatattcgtagaggtgaggctgatataattattgctggtaggactgaagctgctatcattccaattagaattggaggttttgttgcatgtagagctttatcgcagaggaacgataactgaaaaactgcatccagaccctcggatcaaggttgagatggctttgatatgggagagggtgctggaactttgatgctggagagtttagagcatgcgctgaaacgtggtgcaccaatcattgatgaatacttgggaggtgccgttaattgtgatgcaaagtgttgtagcatgatttcaacttctgtttttcggcacgagggggggcccggta

SEQ ID NO: 25367 - DNA, 763 bp, Allium porrum
  Clone ID: LIB3804-017-E3_FLI
gcacgagatgcattaaaacgtggagcgccgattatagctgaatacttgggaggtgccgttagctgtgatgcttaccacatgacagatcctagagctgatggacttggcctttcaacttgtattcagagatgtctagaagatgcaagagtttctcctgaagaggtcaattacataaatgctcatgcagcctcttcacttgttggggatttggctgaagtgaatgctataaggcaagtcttcaaggacccgacgggcatcaagatcaatgctacaaagtctatgattgggcattgcctcggtgctgctggtggtctcgaagcaattgctacgattaaggccataaccactggatggctgcatcctagcattaaccaattgaatccagaacctgctgtcgagttcgatacagtcccaaacaagaaacagcaacacgaagttaacgttgcaatttctaatgcatttggatttggtggacataactcggtggtggtctttgctccatataagccttggatctcctgagtttagatgtttagccttgaatctcctgagtttagatgtttagattttatatatatatatatgagattgtgattcagggggaatctcacgtgcaatataagaggtgtagccgaaccttcccctatatatatatatatatatatatatatatatatatatatatatatatatatatatatatatatatatatatatataggaggttgcttgggtaaaattatataaaatgggtcttaaattt

SEQ ID NO: 25368 - DNA, 1274 bp, Allium porrum
  Clone ID: LIB3804-021-D7_FLI
taccgggccccccctcgtgccgtttagatcttgcatctggattgggagggaaaattgcgaagaaggaagttcagtctgctgttgaacagtatgagaagtatcatgtgtatcatggtggggacgaggaaactagaaaatccaactacagtgatatggtaaacaaatactatgatcttgcaactagcttctatgaatttggctggggagaatctttccactttgctccaagatggataggagagtctttgcgtgaaagcattaaaagacatgaacactttcttgcattgcagcttggattgaaaaagggaatgaaggtgttggatgtaggatgtggtattggcggtccattaagagagatagctaggttcagctcaacgtccattactggattgaacaacaacgactatcagataacaaggggtcaagaactgaacaaggcaacaggattgggtgaggattgcaattttgttaaggctgacttcatgaagatgccatttgaggagaattcatttgatgctatctacgcaatagaagcaacatgccatgctcctgatgcgcttggttgttacaaggagatatatagagtattaaagcccggtcaatgctttgctgcttatgaatggtgtataactgatcactataaccccaataatgaagagcatcaaaaaattaaggctgaaattgaacttggtaatggccttcctgatgtaaggtccactactcaatgccttgaggcattaaaacaagctggttttgaggtcatatgggataaggaccttgccgtagattctccagtatcttggtatttgccactggacacaagcagattttccattactagttttcgattgacagcgtttgggcgtttcattacaaaatccatggttaaaaccctagaatacatcggtctagcaccagcaggaagtgacagagtgtcttctttcctcgagaaagcagctgaaggacttgtcgaaggtggaaggaaggaaatatttacgccaatgtacttcttcctggttcgaaagcctctctcacaatagtagctgtagaatccagggaaggtttctgtccttctggaagcttgtggtttagtgttgtttttacctactattcattcttgttactgaaatttaattcattgctgttttcggagattcgaggaattgggtttacttcgactttggctggcaaattctttagttttctgaaacagtggaacttgttatatatattactagtactgtattgtagaaaacatgacgttttcctcgtgc

SEQ ID NO: 25369 - DNA, 1248 bp, Allium porrum
  Clone ID: LIB3805-003-F10_FLI
gcacgagggcctatcctcattgaataaaatagttggtatttgggcaccaaatggaggcctgttctttggtttcggttctcctcctcctccgttgacacccaagccttagcttcgtaaaatgcttaatctcccgttgaattcttctacttccatctccgcttcatcagtagcaaaatatcaatacatccgcacgcatgagcactcagtgaatccctgccctaatctctcattcagtcgatctattgttcaagttcgaatagctaacgtggcgaagcgagcagctttgactccgaagaggtttgtccgcacgacgataaatgaagccaaagcgaagagtgatattactgtgaaagagaagagtgtttccgtggttttgttagctggagggaaaggaaaaagaatgggggtaaacatgccaaagcaatatcttccacttataggacaaccaatcgcattatacagtttttttacattctgtaaaatgaaggaagtgaaagaaatagttgtagtatgtgatccgtcatacaaggatgtatttgaagatgccagtgaaggtataagcgtagaacttaaatttgggaaacccggaaaggagagacaagactctgttttcaatggaattcaggaaattgatggatgttctgaacttgtttgcatccatgattctgccagacctctagtttcagcttctgatattgaaaaggtttttaaagatgcttggctttatggtgcagctgttctcggagttcccgcaaaagctaccattaaagaggctaacagtgaatcttttgtagtgaaaactctggacagaaaaacactttgggagatgcaaacacctcaggttatgaagcctgatttgctcagaaaaggctttgagtttgtcaatagaaacaaactggaagtcacggatgatgtctcgatagtggaacatttgaagcatccagtttacataactgaaggttcttatacaaacatcaaggtgacgacaccggatgatttgttattagcagagcggatattgaacatggaagcggaggcttcttcctaaaattaggtaatcttatgtatgtagactggatttatcatattgtactttttgccgttggtggaggaagcttttggagcacttcccattttaaaggaaatgctaagattcatcttgtacttcgtactttatcttggaagcaaagaggggacaaagttatagattcatgcatgtaaacatgagtgcatattatattttatatt

SEQ ID NO: 25370 - DNA, 1248 bp, Allium porrum; identical to SEQ ID NO: 25369
  Clone ID: LIB3805-020-H12_FLI

SEQ ID NO: 25371 - DNA, 1239 bp, Allium porrum
  Clone ID: LIB3805-021-C1_FLI
aatgataagtggatcgggatctaccttgtttgaagagcttggcctttactacataggaccagttgatggtcataacattgatgatcttgtcactattctcaaagaagtaaagagtacaaaaacaacaggtccagttttgattcatgttgtcaccgagaaaggaagagggtatccgtatgctgagagagctgctgacaaatatcatggtgttgtgaaatttgacccagcaacaggaaagcaattcaaaaagagttctcaaactctgtcatataccaattattttgctgatgctttaatagcagaagcagaagtagacaagaatatagtggcaattcatgcagctatgggtggaggaacaggtctgaactacttcatgcgtcgcttcccagaacgatgctttgatgttggaatagccgaacaacatgctgtcacctttgcagcaggattagcttgtgaaggacttaagcctttttgtgcaatttactcttccttcttgcaaagagcttatgatcaggtgatacacgatgtagacttgcagaaacttccagtgaggtttgcaatggaccgagcagggctagttggtgcagatggtccaacgcattgtggagcgtttgatgtaacctacatggcatgcttgccaaatatgatagtcatggctccttcggatgaagcagagttatttcacatggttgctactgcagctgctattgatgaccgaccatcttgtttcagatatccaagaggaaatggtgttggcgtgccattgccaccaggcaataaaggcatcccacttgaggtgggcaaaggaaggatactgatagagggcgagcgggtagcactattgggctacggatcagcagtccaaagctgcatagccgcagcttctctagtcgaaaaatatggattgaggctgacagtagcagatgcaaggttttgcaagccattagaccgtgctctgatacgagctctagcaaaatctcacgatgttctcattactgttgaagaagggtcgataggcggttttggttcacatgtcgcacatttcttagctcttgatggcttacttgacggtgaagtgaagtggagacctttggttttgcccgaccgttacatagaacatggatcgcctgttgatcaaatgattgaagctggattgacaccgtctcatgttgcagctacggttttcagcatacttggacaaactagaaaagctctagaaattatgtcataggctcgtgc

SEQ ID NO: 25372 - DNA, 649 bp, Allium porrum
  Clone ID: LIB3805-040-G10_FLI
taccgggccccccctcgtgccggaaaaatttaagtttgcagtttcttccggtttcgatccagataaagatttaataaaagcaggcgttgcaaatcagacaacaatgcttaaaggggagactgaggaaatcggtaaactggtcgagaagacaatgatgagaaagtatggggtagaaaacataaatgagcatttcattagctttaatacgatatgtgacgctactcaggaaaggcaggatgctatgtataagctagtggaagacaaagtcgacctcatattagttgttggtggatggaattcgagcaatacatcgcatttgcaagagattgctgagcttaaaggaatcccttcatattgggttgataatgagcgaagagttgggccaggtaacaaaatactgtacaggctgaatcatggtgaggttgttgagaaagagaattttttgcctcaaggtcctattacagtgggaataacttcaggtgcttcgactcctgataaggttgtcgagctggttctgacgaagatctttgatattaagaaagaggaggctatgcaggttgcgtagagctcaaaggttgtgtatgttgtactataatactgatatatatacatctatcagtgcatctttatgctgaactgaagctcgtgc

SEQ ID NO: 25373 - DNA, 867 bp, Allium porrum
  Clone ID: LIB3807-005-H8_FLI
taccgggccccccctcgtgccgctcactccacatctcacaaccgtcaaatccacaaatactaccgttacgacccgaccggcaaacttccctacccgcattcacatagatcgatcagctgccaaactttcccttcgcaatcagtggtccttaacggcgtcaatacttccagtaaatcccttagctcaagatgcttgcgccgccgttataacggcaggcgcggcgctaggacttctgaggtttttcgaagaattggcaaaaagacaaacttttgatcagaaattgaaccggaagcttgtacatatattggtaggactggtattcatgttattttggcccatattcagttccgaatggcaagcaccattacttgcagcattggcgcctggaataaatatttttagaatgctattcatgggacttggaataattaaaaacgaagctatggtccagtcaataagcagacatggcgactatagggaacttctaaaagggccactttattatgcttgcactataacattagctacttcagtcttctggcgaacgtctcctgttggcatggctgctgtctgcaacttgtgtgctggagatggacttgctgacataattggaaggagatttggaaaacataagcttacttacaaccctgataaatccatagagggtagtgctgcaatggcacttgcaggctttgtagcatcagttctgtacatgcattacttcgcaatatttgggtttattgaagagagcttgggaatggttgtgcgcttctttctactgtcttttgcttcagcagttgttgagtcgttgcctataagttcagaattggatgacaatttgactgttccattaacttctcctcgtgc

SEQ ID NO: 25374 - DNA, 403 bp, Zea mays
  Clone ID: LIB3824-001-D6_FLI
accccgcggctagatttctgggtgtgaaagagcgccttttttttagaagttcttagctagagagattttgggaagggagagtgctggaataatggagccgagggtcgggaacaagttccggcttgggcgcaagatcgggagcggctctttcggggagatctacctcggcaccaatatccagacgaacgaggaggttgcgattaagctggaaaatgtgaagacaaagcatcctcagttgctctatgaatcaaagatttataggattctacaaggaggaactggaataccgaacgtcagatggtttggtgtagaaggagactacaatgtcttggttatggatttacttggaccaagccttgaggatctatttaatttctgcagcaggaaattatctctgaagact

SEQ ID NO: 25375 - DNA, 450 bp, Zea mays
  Clone ID: LIB3824-001-E2_FLI
accgcacccataagctaggttttagccgcagctttctcctttttcgccgcggcggccgcaagctccaaccttctccccgaagaagccccaagcaagcgacactcttgtcctctccgcgccagatcgttgtttatgagctcgaaggagaagcccactcttggaggcacgcggattaagacccgcaagcggaacattgcagctcctttggaccccgcatcattctctgatgcaattgtccagatttatctggataatggtggagatctggaactcgtcgccaaaagtattgagtcttccgacctcaacttctcacgttacggtgacaccttttttgaggtggtttttgttggaggacgcactcagcctggcactgtaaaacctgaagaaggagaccgccacccttattctatgttagattgtgtggcacagcgtgaaacaattttgcctttc

SEQ ID NO: 25376 - DNA, 416 bp, Zea mays
  Clone ID: LIB3824-002-E6_FLI
acgcggggatctccattctgttctcactctcagacaccagacgcagtcggctgccgcagactggtagtagccggtgcgccgtcaccgtatcctcagatcagcggcgagcagaaaccacaccactctactgacgcccgacgagcagtgtaacattttccttcagccatgggtaaggagaagactcacatcaacattgtggtcattggccatgtcgactctggcaagtcgaccaccactggccacctgatctacaagcttggaggtattgacaagcgagtgattgagaggttcgagaaagaggctgccgagatgaacaagcggtcattcaagtatgcgtgggtgcttgacaagctcaaggctgagcgtgagagaggtattacaattgatattgccctgtggaagttcgagaccaccaa

SEQ ID NO: 25377 - DNA, 1195 bp, Gossypium hirsutum
  Clone ID: LIB3825-003-D1_FLI
gaagctttgtttggcacaagagaaaataatataaaatgatggtgggaaaagaagatctgggtttgagtcttagtttgggttttcctcagaatcaccactccttgcagctgaatctaaggccttctttgcttccttcctccgttgattcttgctcttcggtcccttctgggtttacagcctttcacaaatcgtcgtggaacgatgtttctgctccttcagatcctaacgcagaatctttccgaggcgagactagatcatttcttagaggaatcgacgtgaacagattgccatctacggtcgactgcgaagaagaagctggagtttcatctccgaacagcacgatatcgagtgtgagtgggaaaaggagcgaaagggaaggcactaatggagatgagcttgatattgaaagagcttgttctcgtggcatcagtgacgaggaagatggtgacgcttcgagaaaaaaacttagactttcgaaggatcagtctgctattcttgaagaaagctttaaagaacacaacactctgaacccaaaacaaaagatggctttggctaagcagctgggattgcgacccagacaagttgaagtttggttccaaaacagaagggcgaggaccaagctgaagcaaactgaggttgactgtgagttcctaaagagatgctgtgagaatctgacggaggaaaacaggcggttgcagaaggaagttcaggagctgagagcactgaaactttccccgcagttctacatgcaaatgaccccacctaccaccctcaccatgtgcccatcgtgtgagagagtgggtgcatcatccaccgttgatccaagatcccatcatcagctaccccaaacccaccacagggccatccccatcaacccttgggctccggctgctgccccaatccctcatggaccgttcgatgctcttcggcctcaatcgtaattattcaaccgatgctcaaggtcgtttttgtcaaatgaaaaaaaaaagcatcacaaattgagtacggagaatatctagtgttgtttagagcatcgtaccaatcccatgttctaagatatggtggttagaatgtgattttggtgggacatcatgttttgtattattgggcccacctaaatctaatccctgtttaatgttgacatattcaattagtttattttttttaatgttaatcaatgatgcctaattaaatt

SEQ ID NO: 25378 - DNA, 1067 bp, Gossypium hirsutum
  Clone ID: LIB3825-019-H3_FLI
ctctcccccttatcaaagcccaagtcttttcctttcctttttttctctctgtttctcaccctttttcatacagggaaaagaagaaagaagctttgtttggcaaaagagaaaataatctaaaacgatggtgggaaaagaagatctgggtttgagtctcagtttgggttttcctcagaatcgccactccttgcagctgaatctaaggccttctttgattccttcctccgttgattcttgctcttcggtcccttctgggtttacagccattcacaaatcattatggaacgatgtttctgctccttcagatcctaacgcagaatctttccgaggcgagactagatcatttcttagaggaatcgacgtgaacagattgccatctacggtcgattgcgaagaagcagctggagtttcatctccgaacagcacgatatcgagtgtgagtgggaaaaggagcgaaagggaaggcactaatggagatgagcttgatattgaaagagcttgttctcgtggcatcagtgatgaggaagatggtgacgcttcgagaaaaaaacttaggctttcgaaggatcagtctgctattcttgaagaaagctttaaagaaaacaacactctgaacccaaaacaaaagatggctttggctaagcagctgggattgcgacccagacaagttgaagtttggttccaaaacagaagggcgaggaccaagctgaagcaaactgaggttgactgtgagttcctaaagagatgctgtgagaatctgacggaggaaaacaggcggttgcagaaggaagttcaggagctgagagcactgaaactttctcctcagttctacatgcaaatgaccccacctacgaccctcaccatgtgcccatcgtgtgagagagtaggtgcatcatccaccgttgatccaagatcccatcatcagctaccccagaaccaccacagggccatccccatcaacccttgggctccggctgctgccccaatccctcatggaccgttggatgctcttcggcttcgatcgtaatttttcaaccaatgctcaagggcgtttttgtcaaatgttt

SEQ ID NO: 25379 - DNA, 975 bp, Gossypium hirsutum
  Clone ID: LIB3825-032-G12_FLI
cagccactacaagctctggaggaggaagtaccacgtcgggaagaagacctagaggacgtccagcgggatccaagaacaagccgaaatcacccataatcgttgctcgcgacagtccgaactcgttgagatcccacgtgctcgaaatctcttccggttcagacatagttgactcggtgtcggactacgcacggcggcgcggccgtggcgtttgtgtactcagcgggaccggtgccgtcacgaatgtcacgttaaggcaaccggctgctccacctggaagtgtcgtaacactacacggtcggttcgagattttatctttaaccgggacttctctcccaccgccagcaccgcctggagctggtggattgacggtttatctcgccggcgttcaaggtcaagtagtcggaggaagcgtggtgggaccgttaatggcttcaggtccagtcgtattaatggctgcatcgttcgccaatgcagtttacgataggttacctctcgaagaagaagacccaccaaccgttcacgaacaacaaccagcagcttcacaatcatccggattaaccggcagtggcggcggaaacaacaacaactgtggaacaaccggaaccggcgtaggcggcggcggcggcggggttcctttctataatttgggaccaaacatgggaacttatccatttccaggattatgaacttgatgaacacaaatcaacgaatcatcacaaggtctcaaatttttggtccctccttttgatcgatatttcaagcaaaatcgatgacaaaatttgttgctgcaacttgaagactgaagaatgattcatcagtaagtcacagatttctttttttgtataaaacatagtattttccattttatgttctttttttccctgggattttctcactttccaaacctgcttaatttatatatcaacacactagagattttgttgaaactatatatatatatttggaaccaacaat

SEQ ID NO: 25380 - DNA, 1196 bp, Gossypium hirsutum
  Clone ID: LIB3828-005-G6_FLI
ctcaatctttatctccttcaattgtttgtttttgggttagaaagctctgtttttttattacccttttcatcaaaaagcttcaatctttcaaccatgttgcttaaagcttcccctgctttttctttgttgaagaatccccaagttgaaactcgggttcctctgttttcaagaaacggttctggggttgggtctggggctgttgttgtttgtgctaccaaaggagccaataataagccattaacaggtgtgatttttgagccttttgaggaagttaagaaggaacttaatcttgtcccaactgtgcctcaaatgtccttggctcgtcaaaagtttgctgatgagtgtgaagctgccatcaacgaacaaatcaatgtggagtacaatgtttcatatgtctaccatgctatgtttgcctattttgatagggacaacgttgctctcaagggtcttgccaagttcttcaaggaatcaagcttagaagagagagagcatgctgagaaattgatggaataccagaacaaaagaggtggacaagtgaagctgcaatccataataatgcccctctctgagtttgatcatgcagagaaaggggatgctttatatgcaatggagcttgccttgtctctcgagaaactaacaaacgaaaagctcttgaacttgcacaacgtggctgagcgaaaccatgattcgcagttgaccgatttcatcgaaggcgagttcttagctgagcaggtcgaatccatcaagaaaatatcggaatacgtggctcagctgagaagagttggcaaaggacatggggtgtggcactttgatcaaatgcttctccacgagggagctgttgcatgaaaacttgaccagagaaaccgccgcttgcttctgataccagcgatccttcttttaagttcccgtgttagtagttgttgagagattaagttttgcaagttgtatggctagtttagaaaactttgtgttgatgatataagaagattgagagactcaaaagggataatttgtaagtcctcttgatcatagctatagattttcatggtttttgacttttcgtatcgacatttttcgactgttttttcttcggttaaatgctctgcatagttagcagataaaataatacaagtagggatcattttgaagtttcgattgtgtttctatgaatgaaaaaaacgaagctaatatgggtt

SEQ ID NO: 25381 - DNA, 1250 bp, Gossypium hirsutum
  Clone ID: LIB3829-008-C2_FLI
gcttcccaaggcaaaatagatagacagaaagctgcagaaggaaattaagctagcttttaaatcaagaaaatggagcaagtttttagcatggaacgagggactggagaggaaagctatgccactaactcaaaattacagtctacttgtctatccctgtcaatgccggtgttaaagcaagcagtgttgagtttctgctgcaccgacttaccggaaaccatcaccatcgcggacctcggatgtgcgtcgggaccgaacactttcattgcagtttccgagatcataagcatcatgtataaaaactgctgtgaactcggtcgatcaccactagaatttcgagtgttttttaatgaccttcccggaaatgatttcaacactattttccagtctttgccagcttttcaggagaaattacagcaagagaatggaccaaagttcgggccgtttttcacagcgggtgtccctggctcattttacgggaggcttttcccatccaaaaccttgcatatcgtgcactcatcttcttccattcattggctttctcaggtgcccccggaattggtcgacaaagcaaatccagtaataaacaaagggaagattttcatctcaaggacaagtccagcagccgtgatagattcctacgtgactcaattccgtaaggatttcactttatttctgaagttacgctcagaagaaatagctcccaaagggcgcatggttttgacattaaggggcagaacaacaccagatcccacctcagaccaaagctgtttactttgggactacctaggtcaagcatttcaggatttggttgcaaagggggtggttgaagaggaaatgttagatggctactacaccccgtattacgaaccttgcccggaagagattcaagccgaggtagagaaagaggggtctttcgctgttgatcgtctcgaggtggtagcattaccatgggattatgtcaatggagggatcaactatgacagagcattgacagctaaagaaatggcgaaggctatgagagcagtcaatgagtctatgattgggagtcactttggagcagatatcatggaccgtttgtttcataggtttatggaaatcatggctgcagataccatggaagtggagcatgttagcttggttgtttctttaatcagaaatgcttgattaatatgatattgaagttctcatgagtaggttcttgtactctgatttctggagaatataagatgtggatcttcaacttccattcc

SEQ ID NO: 25382 - DNA, 825 bp, Gossypium hirsutum
  Clone ID: LIB3829-031-F4_FLI
agaatttgtggcgaagttggatctaaagcctggccaaaaggttctagatgttggctgtggcataggtggaggtgacttttatatggcaaaagaatttggagtctatgttgtgggcatcgatctgtccataaatatgatatcttttgctcttgaaagagccaatggactcgattgctctgtggaatttgaagttgctgattgcactacaaagacttatccagataacagctttgatgttatctacagccgtgacacgattctacacattcaagacaagcctgcactatttagatatttctacaaatggttgaagccagggggcaaagttcttataagtgattactgcaaaagcgcaggagcttcatcgcccgaatttgcagagtacatcaagcagagaggctatgatctccatgatgtaaaagcttatggccagatgcttaaggatgctggttttgatcaggtcattgcagaggatcgaaccgatcagttcatacaagttctgcagcgtgaattagacaaagttgagaaggacaaggataccttcatcaccgacttttctcaggaagactacgacgatatcgttgggggatggaaggcaaagctgattaggaccagatttggggagcagagatggggtcttttcattgccaacaaaaactaagtcctgcttcttctctaatgttactttctcatttctctaataaatgattcatagtaataagagtgtacttagcattagatgtttctacttgatgcttgttgcttctgatgttatgaacttaaacatccttttgccttgaataaattacccctttttcgtcagtt

SEQ ID NO: 25383 - DNA, 851 bp, Triticum aestivum
  Clone ID: LIB3833-009-G5_FLI
cacagacaagcaggtgctctcgggagatccagctagctagctggctagttttgctgttgctgctcgacctcatcgccatcctccggctatggcagcccatgtggatccccttgtggttgggagggtgatcggtgacgtggtggacatgttcgtgcccaccatgccggtgaccgtgcgcttcgggacgaaggacctgacgaacggctgcgagatcaagccgtccatcgccgacgcggcgccctcgatccagatagccggccgggccggcgatctcttcaccctggttatgactgatccggacgcaccgagccccagcgagccaaccatgaaggagtggcttcactggctggtggttaacatacctggtggatcagatccttctcaaggggaggaggtggtgccctacatgggtccgaagccgccgttgggcatccaccgctacgtgctggtgctgttccagcagaaggcgcgtgtgctggcgccggctcccggcggcgacacagcagcgtcggccatgcgcgcgcggttcagcacccgtgccttcgcagagcgccatgacctggggctccccgtcgccgccatgtacttcaacgcgcagaaggagccggccaaccgccgccgccgctactagctcgtcgccgccggccgatcaaacccgctgctgcctgctggtgctgcctgctggtccgtctgtgtgtgcgtgcatgcgcgcgggcccaataaattaaccatatcgatcttgtcgttctcatgaacaatctgggcttgtattgtgtggtactctttgtttgttttttcttgcgggtgcgtgtggtactctttggaccatatacatatttaccgctttctct

SEQ ID NO: 25384 - DNA, 524 bp, Zea mays
  Clone ID: LIB3843-020-H12_FLI
tcgagctcggtacccctgtcggcggagggcatcactgtgcagtccttcaacgccgatctgctgtacgagccgtgggaggtcctcgacgacgacggcttccccttcaccatgttcgcgccattctggaacaggtgcctgtgcatgccggaccccgccgcaccactgctgccgcccaagaggatcaattcaggtatccaaatgcatttgcctacagagttctaatggccacactggatgacgtgaaaaatgctgagctccacaggtgacctgtcgaggtgtccgtgggacgagctcatctttgaagacgagtccgagaggggcagcaatgcgctgctcgcgcgagcgtggtcaccagggtggcaaaacgctgacaaggcgctaacggccttcctcgacggtccgctggtcgactactccgcgaaccacaagaaggccgacagcgccagcacgtccctgctgtctccgtacctgcacttcggcgagctcagcgtccgcaaggtcttccaccaggtgcggatgaagca

SEQ ID NO: 25385 - DNA, 866 bp, Triticum aestivum
  Clone ID: LIB3853-006-G10_FLI
gctcatacaacacagacaagcaggtgctctcgggagatccagctagctagctggcaagttttgctgttgctgctcgacctcatcgccgtcctccggccatggcagcccatgtggagccccttgtggttgggagggtgatcggtgacgtggtggacatgttcgtgcccaccatgccggtgaccgtgcgcttcgggacgaacgacctgacgaacggctgcgagatcaagccgtccatcgccgacgcggcgccctcgatccagataaccggccgggccggcgatctcttcaccctggttatgactgatccggacgcaccgagccccagcgagcccaccatgaaggagtggcttcactggctggtggttaacatacctggtggatcagatccttctcaaggggaggaggtggtgccctacatgggtccgaagccgccgttgggcatccaccgctacgtgctggtgctgttccagcagaaggcgcgtgtgctggcgccggctcccggcggagacacagcagcgtcggccatgcgcgcgcggttcagcacccgtgccttcgcagagcgccatgacctggggctccccgtcgccgccatgtacttcaacgcgcagaaggagccggccaaccgccgccgccgctactagctcgtcgccgccggccgatcaaacccgctgctggtccgtctgcgcgtgcgcgcatgcgcgccggcccaataaattagccatccatctcttgtcgttgtcatgaacaatctgggcttgtattgtgtggtactctgttttttcttgcgggtgcgtgtggtactctttggaccatgtatatttaccgttttctctcttcgttgtatttattggttatgtgtgagatcc

SEQ ID NO: 25386 - DNA, 1244 bp, Triticum aestivum
  Clone ID: LIB3853-020-A6_FLI
ctcaaagctctcttgctaagacatagagttggtgccgcagcctgagtgaaagatggcagcatctgcaaagatgatgaccaagtccagcgccgagcctggtaagtcggtcaccttggtgttcgagcaggggaggcttgcggtggaagagaaggagatcaaggtgggccataatgccacaccgccggtcccggtcctgatcgtcgctcctaaggacgcggggacgtatcccgtcgccatgctccttcatgggttttgcctcgagaaccaccactacaaacaccttctccggcacattgcgtcccacggcttcatcatggttgcacccaagatccatcaaacgatcatgcatacaggtcagcacgacatcaacgaagcagccaaggtggctgattggctccccgacggtctcccgtccgtgctcccgaaaggggtcaagccagagctcttgaagctcgccgttgccggccatagcaggggtggccacacagccttctccctggccttggggcatgccaagacccgcctgcgcttctcggcgtttattggcatcgaccctgtcgctggccaagggaaagattcccatcttgaaccaaccatcctcatcgacaacccatcctatttcgacatggcggcaaggccggtcctcgtcattggcaccgggctcggtgaggtgggtaagaccatccataacattcccatacttcccttctcgcactggcctcccggcgcgcccaagggcgtgaaccacgtgcagttctacggcaagtgcaggccaccatgctactactttgtgaccaaggactacgggcatgtggacatgctggacgacgatgccattggcctacacaacttgttttgcaagcgtggggatgggtgcaaggacaagatgaggaggtgcgttgctgggatcatggtggcattcctgaatgctgccttgggtgagaaacatgatggcgatcttgaggccatactgacagacccggctgttgcgccgattatgcttgatccggttaagcaccatcctaccagtcccaagtaagctgtaatatgttttatggtcatccttggctgctgcgtcgacgactcgacgtcgtccggatcagccgcaggttgctccaacattaaaaaagttgtaatatgtactatgtatgctttggtaagcacaattcatattaaataaatcgtaatatatataacgtacgtgctttgctaagcaccactcgttatatagataattaagttgt

SEQ ID NO: 25387 - DNA, 1244 bp, Triticum aestivum; identical to SEQ ID NO: 25386
  Clone ID: LIB3853-020-C8_FLI

SEQ ID NO: 25388 - DNA, 856 bp, Triticum aestivum
  Clone ID: LIB3853-021-D9_FLI
ggttatactacctcattcctctcgtgcttctactagctacctgcaagctgtagatatctgtcatctatcatcaccaacttttcagttcaagctaggtagctagccatggctagggtgctggagcctctcgtcgttggaaaggtcatcggggaggtcatcgacaacttcaaccccacagtgaagatgacggtgacctacagctccaacaagcaggtgttcaacggccacgagttcttcccgtcggcagtcgtgtccaagccacgcattgaggtccagggcggcgacatgagatccttcttcactctggtcatgacggacccagatgtgccagggcctagtgatccataccttagggagcatctccactggatcgtcagtgatattcctggcaccacagatgcttcttttggaagggaggtggtgagctacgagagccccaagcccaacattggcattcacaggttcaccttcgtgctgttccaacagaagaagcggcaggccatgaaccctccctccaccagggactacttcaacacgcgccgcttcgccaacgagaacgaccttggcctcccggtggctgccgtctacttcaacgcgcagcgggagacagcggcacgccgccgctgacggaaacaatcagcccaacccttcttctcttgcatgcatggcgcatgcaacaagcctatggatcaacctatagctactattagctaccatctacatatatctccactcaaataagagtttgcttgtgagcgtcttgtgtgtgctgtttccagtagtctttctactgttcagttttttcttcggtcaatttagttactagttgatctgtgaaccagtgtacgtgcaatct

SEQ ID NO: 25389 - DNA, 730 bp, Triticum aestivum
  Clone ID: LIB3853-024-H4_FLI
caaagctcgagcacagcaagagcactaaagctaactagagcttccagcaatggcgacctccgcggtgctcttcctcctcctcgctgtttttgccgccggtgccagcgcggccaccttcaacatcaagaacaactgcggctccacaatttggccggcgggcatcccggtgggtgggggcttcgagctgggcgcaggccagacgtccagcatcaacgtgcccgcgggcaccaaagccgggaggatatgggctcgcaccgggtgctccttcaatggcggcagcgggagctgccggaccggcgactgcggcggccagctgtcctgctccctctccgggcggccaccagcaacgctggccgagtacaccatcggcggcggcggcacccaggacttctacgacatctcggtgatcgacggcttcaaccttgccatggacttctcgtgcagcaccggcgacgcgctccagtgcagggatcccagctgcccgccgccgcaagcctaccaacaccccaacgaccaagccacacacgcctgcagtggcaataataactaccagatcaccttctgcccatgaaggctgttcacgtcgcaccacgaatcaataaaaggcgtacgtagatatacggccctataaataaaaggcgtgctgcttaatacatcacattatcatattacaaccactgtactactacatgttagcccactactatgaacgtttcattgatatttgagt

SEQ ID NO: 25390 - DNA, 663 bp, Triticum aestivum
  Clone ID: LIB3853-026-B5_FLI
cacaaccaaccagcagcaggtagtgcaacacaagactggcaagatcgatcgaccgaaggtagctagctagtaaggaagagcaggaagaagaagaaagatggcggcaggcggcgtgtgggtgttcaagaacggggtgatggagctggagcaggaggcggcgagccggaaggcgctggtgtacatgccggcgaacgagacgatgcggtcgctggaggcgctggagcggcggctggggtcgctggggtgggagcgctactacgaggaccgcgccatcgtgcagctccacaagcgcggcggcgtcgacctcatctccattccccgggacttctccaggctccgctccatccacatgtatgacgtcgtcgtcaagaaccgcgaccacttcaaggtcgtcgacctctagttagccatcttcatcggtaatattcttcctattcgagccggataagttcctggctccgcgccacaaatatatgtatagacgtcatatacaaataagaacctctgcgtgtacgattatgcatgtgttgtactgtccctgtgtgatgtagtatgtaactgtgtgcctttgtcagaacctgtgtgtacttaacggtgaaaaatatatgtatgccagtaccggggtttaaaaactctgattctgaaacttgaccccgctgaaat

SEQ ID NO: 25391 - DNA, 863 bp, Zea mays
  Clone ID: LIB3898-001-C5_FLI
ctcgtcaggcaccctcaaaccctcgccgcaagaaagaagaggtcaatcaaatcgaaccaaaacctcccgaccccacaaggccaagctcatttccatggtggtgtacacgcaggaacatgtgtaccggcacccgtgggaccgggtgacagcggcggcgtggcgcaagttcacggatccggcctcctgtacggcgctctcccacgtcgcagacgttcacaccctacaccgccgcctcgactccgacacgggccgcctccaggccgcgcgctccatcaccgtgcggtccccgccgctccctttcgtcctgcgccgactcctcccgtccgccgcggcgtccccaaacggcgccgcgctctgccactgcgtcgagacctcgctcgtggacgcccagcgccgcgccatggacgtcgtcgtgcgcaacgtcagcctccggggcctcatcgaggtcgaggagcgcgcctcctacagaccacatccggaccggcccgacgactggacgcagttcaggcaggagaccacgatccggtgccgcccgctcgcggccctcgccgccgtcgctgagaaggtcgagacccggtgcgccgagaggtttctgcagaatagcgccaaggggagggaggtcgtcgagcggatctgccggtacctcgaggccgagtccgccggcgccgcgccctccgtaacctgatctcgtttgcacatctttgcttgatccgaacggatccaagggttcctcgatctgtgctgtgtgcgcccggataaatcgaaccccgcctgctaggcgcttgcttttcttcaatttttgtgtgtgaaatgatgagctgaattcggaatagaataaagcttctggccatacttgtttcttc

SEQ ID NO: 25392 - DNA, 743 bp, Zea mays
  Clone ID: LIB3898-002-G7_FLI
ggtgcttgtgcttgcgctgggggatctgcacatcccgcaccgggtgcccgacctgcccgccaaattcaagtccatgctcgtgcccggcaagatccaacacatcatctgctctggcaacctctgcatcaaggttgttccatggggcgacctggactccctggcgatgctccagcggcagctggacgtggacatcctggtgaccgggcacagccatcagttcaaggcatataagcacgagggaggcgtggtgatcaaccctggctctgccacgggcgcctacagcagcatcacttacgacgtgaacccaagctttgtgctgatggacatcgaaggactccgtgtggtggtatacgtctacgagctgattgacggcgaggtgaaggtggacaagatcgacttcaagaaagcagcgacgatgcaagcctagcactactatccttccacggcgtgattggtttcaagacacgtctaggttctgtttttttctcttcttgattcagagctccctcaacactctttctaccacttgtgctaacctgttcatgtgcaaataacttgtttaatacacattagctgatcagattacgagggcgtgatgttaaatgtcaaacatccagactccaaagttgtaaactctatggagtttttggagccgtggagtacctcttttgctgctctaaaaactctaaaaaaacaacccaatcatggagttttgagttatttacccgccattgttactggtt

SEQ ID NO: 25393 - DNA, 444 bp, Zea mays
  Clone ID: LIB3898-003-G2_FLI
ccccaccccgccgccgccatcgcacgcccgcagccgcatccgctatgggtgcgtacaagtacgtctcggagctatggcggaggaagcagtccgatgtgatgcggttcgtgcagcgcgtgcgctgctgggagtacaggcagcagccggccatcgtccgcctcacaaggcccactcgccctgacaaggcgcgccgcctcggctacaaggccaagcaggtagatctcctccagtgcagatcccattggcgcgcgcgaactttgacggtgatggatttatgggtaggggaaggtcgggggtggtgcagccgcgcagggattgccattgtcatttaggcttgtaatttctcgaggtgatacaataatatgctgtttgtttttaagattcctgcaagccagggcgtgcaggtgtagtttttctggtgattaatgccaatcttcctgggcg

SEQ ID NO: 25394 - DNA, 1367 bp, Zea mays
  Clone ID: LIB3898-004-D1_FLI
gtgcctgccaccacgccgcgccgcgcccgcgatacaacgacttcctgtagtcctgcgctgcgcccctcctttccgcctccacgctgccgacgtccaccacacagcacggtcgagtcacccgatccctccatggcggcggcggtggcggcggtcgcggctgccacgacggcggaggacgaggcgcgcctgctgcgtctggaggagcaggcggagcacggcggcggcggcgcctgggactacctctgcctcgcccgccggctccgcgcccgccgccccgcccacgtcctccgcgtcggcctcgctctcctcaacaacgcctccgctcgctccggtctcgcctcagaacagtggacgctctacgagcaggtggccacggcggccatggattgccagcgtctcgatgtggcaaaggactgtattggagtcctttcaaagcaatttcctggcagcacccgggttgcccggctagaagctcttctgtttgaagcgaaaagtgaatgggctgaagctgaaagagcttacacgcaaatcctggaaatcaatccatttgaccagattgtccacaagaggaaaattgctattgcaaaagcacaaggcaatatgtcgctagcgattggttatctcaataagtatctggaattatttatggcagatcatgatgcctggagagaacttgctgaaacatatgtttccttacaaatgtacaagcaagctgccttttgttatgaggagctaatattatcccaaccaactattccactctatcatatagcctatgctgaggttctgtacactatgggtggcttggaaaatcttcagacagctaagaagtactatgcatcaacaatccaattgactggaggcaagaatacaagagccctctttggtgtatgtctgtgtacttcggcaatcaatcagttgaccaaaggaaggaataaagaggaagatggctcggagctgcagagattggctgcagaagtactgctgaataattacaagcagcaggctccatcaaaggcgccccttatcagcagcttgttgaagaacatgaaactcagctaataccaactagctctacacattcagaatgtcctgattcgatagatagttaagttaaattgatgtggcataatgcttgtttttttttgtggcactggcaccaacattgtgcaatggttaaaaagtaggtgctcccaaggccatgggctgtgtacactacacctgtttgcttgcagagaaatatgcatgacttctttttcattggatgttctattatagatcacaataaaccccggccattgtacttcagcacaaacaaaactttgaatcagtcgctggtgaagttgtacctgttgattttgattggt

SEQ ID NO: 25395 - DNA, 728 bp, Zea mays
  Clone ID: LIB3898-004-E7_FLI
ggcttctcctccccctcttaccaagtcctcctcgggttagggttccttagggttttgtggaggggcgatggcggcggctgatgtggagtaccgttgcttcgtcggcgggcttgcctgggccaccagcaacgagtcgctggagaatgccttcgcctcctacggcgagatcctcgactccaaggtcatcaccgaccgggagacggggaggtctcgcggcttcggcttcgttaccttctcctccgagaactccatgctcgacgctatcgagaacatgaacggcaaggagctcgacggccgtaacatcaccgttaaccaggcccagtcccgtggcggtggcggtggcggcggtggctacggcggcggtcgcggcggcggcggctatggtggcgggcgccgtgacggcggttatggcggcggtggcggctacggcggtcggcgcgagggtggtggcggcggctacggaggcggtggcggctacggcggtcggcgcgagggtggtggtggcggctacggcggcggcggcggcggctggagggactgatgtgtgggcccatcctggcttcggccgagttatcttatctatctatagtatcgtgttaccgttcgcttctgtcaccgtgttagtgtccgttctacctttggattaggtgttggtacccctgttgttccctttgtttgctcccgctatgaaacgagacgagagaagaatgagcaaggtttttgttcgc

SEQ ID NO: 25396 - DNA, 829 bp, Zea mays
  Clone ID: LIB3898-004-F6_FLI
gaagagagagaagacgtctctctcctctcggcgtccccgttccccaacctctcgtctgctgcctgcctgcctgcctgcctgcaaaaaggagtttgtcatggcgtctaagcgcatcctcaaggagctgaaggacctgcagaaggacccccccacatcatgcagtgcaggtcctgctggtgaggacatgtttcattggcaagcaacaattatgggaccacctgacagtccctatgctggtggtgtttttttagtgaacattcatttcccgccagattaccccttcaaacctccaaaggtttctttcaagacaaaggtcttccatcctaatatcaacagcaatggaagtatatgccttgacattctcaaagagcagtggagccctgctttgacaatttctaaggtcctgctctccatctgctccctgctgaccgaccccaacccggacgaccctcttgtcccggagattgcccacatgtacaagacggaccggccgaagtacgagtcgacggcccgcagctggacgcagaagtacgcgatgggctgacgaacgctttcctgctcgtccacccgactggcgtctcaagaaagtcgttcctgggcgccattgttcccttggatttgttgttggtcgtcgtgtgtatccctgatccatctaggatcatcgtattgtattgtagtgtatgtatatcgtcggcctaccatcgttgccattcaccatagtgaggtggttggacatgcttcgcctatatgcacctgtgcttgccgtccttcgggtcggtgctctttggttaatgttcatcgaagacgttgatttcgttgcccctggctc

SEQ ID NO: 25397 - DNA, 1026 bp, Zea mays
  Clone ID: LIB3898-005-H2_FLI
cgctaacaacttctcgaccttggcctcccacggctctgccgcattgccgcgcgccgccggccggcactcgccgtcctgacgcgagaaggaagatgctctaggaagttgggggcctggctagggacagcctgtgtcccgccgtgggatcggtggaagagcgggaggcaggcatgtgtgatctggtggcccgcacgggccggcacctgcagcgctacgagaacggccatcgccttgtggccgggtgcataccattcagatatagggatattaatgatggagcttctgatgatgaacaaaagaaacttgttgaagttctcatgatcagctcccaaagtggaccgggtcttctatttccaaagggaggctgggagaatgatgaaactgttgaagaggcagctgcaagggaagctatcgaagaagctggagtgcgaggagatttagtgcaactgctggggttctacgatttcaagagcaagcagcccgaagcaacgtgcagggccgcaatcttcgccctgcacgtgaaggaagagctagcctcctggccagaacagagcacccggcagaggagctggctcaccgttcccgaggcggcggagcggagccgctacccgtggatgcaggaggccctcgtgacaggcttctccgcctggctcgagaactggagaaacggtggtggcggcggcggcggcggctgcgtggaccgaactgagagatgacaccaccttaaagcatcaggggcccccccggcggagaagccatctgctagctatttcttggcgttgtatcttgcttggactagaattttcttccagaggctgactgcctggcatacatgcatgagggctctctgatgctcggtagcttttgtttactttgtcgctttattacaccgtcgtcttcaggatgacagtctcctcagctgatgatggcccgaggtttgttaaattgtaagcttgctgattctcgcggtcgccagctatatttaactgtcttgtattgagccttgagacaaagcaagctttgtgt

SEQ ID NO: 25398 - DNA, 1187 bp, Zea mays
  Clone ID: LIB3898-006-D12_FLI
gttttctcacctcccgtggcagcagccggccaacacccgcaccgcagtccacagcaagaaccaagccacagcgaagaaaagatccaatggtgatggcgccggcggcggcgcagcagcagcggcgccgcgacgcggaggcggagctgaacctgcccccgggcttccggttccacccgacggacgaggagctggtggcgcactacctctgcgcgcgcgccgcgggtcgccgccccccggtgtccatcatcgccgaggtcgacctctaccgcttcgacccctgggacctgcccgagcgcgccctcttcggccgccgcgagtggtacttcttcacgccgcgggaccgcaagtaccccaatggctcccgccccaaccgcgccgccgggtcggggtactggaaggccacgggagcggacaagcccgtggagcacggtggcaggacggtcggcgtcaagaaggcgctcgtgttctaccacggcaagccgccgcgcggggtcaagacggagtggatcatgcacgagtaccgcctcgccgacgccggcgcccgcgcccgcgccaggaagcccggcaccggcacgctcaggttggatgactgggtgctctgccggctgtacaacaagaagaacgagtgggagaagacgcagcagcagcaggagaagaagcagaatcagaagcaaatggagtcggaggcctcgctctcgcactcccactcagacacgcggacgccggagtcggagatcgacgacgacccgttcccggagctggcctcgctgccggcactcgacgacatgatgggcccagcagcagcagcgcctgccggcgccatcttgcccaaggaggaggtggaagacttgggcggcctcggcggcgacgactggctcgcgggcatcaacctcgacgacctgcagatcccgggcgaggccgacttttatggctccatgctcgtgtcgccgatggccgccaagatggagcaggacgccgccggcttcccgttcttctgagaccttctgcgcaacgcaaactgtgtatagttcagatttcttcaggattcggagaaaaaaacagttctgctgatatctggttgtagtggtttagtgcacaagcagcagtatgccggtcagttaagattgaagtccattgtagttcatcaccacttgagctgtgactgtgataagtgacagcattctttc

SEQ ID NO: 25399 - DNA, 1106 bp, Zea mays
  Clone ID: LIB3898-007-E1_FLI
gtctcctttggacatgtccaaaccatctcaaccgatgttaaatcaatttctcctcaattggtgccaccccgaccctatcctggatatcttcgttttggactctatcccttgtgtgctcacaaaaccaaagtaacatgcgcatctcagttgttgacttgttggacatgttgcctttttgtcggccaacattcagcaccatatagcatcaccggtgcgctagagtgatgaatatatttcttaaatgacttgtattgttatatttcgataataaaccttatttagactaattccaattggatggactactgtgctgagtgcacgggaatggtgaacagtcattttttaggactacagagcttgcctagattttttagataatgttgctgtagatttgcaaaattcattcaatgtattctgttatgttggttaacgctctcgtggatcatatatctgcgtatacacttaagccttgttcggttattcccaatacacatggattggatgggattggaaaaagtttttaagaagtttgacttgtttgggattcaaacccatccaatctcactcaatccacatggattgagagctaaccgaacaagcccttatttggttggcttgcaatttacagggattgccaccatcttctgggacaaagagggagtggaggttgattgatctgtcggcagtctgatggggatgaattatacgaggtcttcaacgctgacacaaagggttaatgaaacaaactcgaatccattgattataggcgctccgcacggaccatatgattcatctctcgttggacatgtagctacaagaatggtgtcagtgggcggttgctgccgcaactaaaagtccattcagtgtggatgtcagttgggctacgctatctaagaataaaaagtttgaggaacaacgagcatgttgccaagtagtttctcaagtataagttactgcgtctagttatattgttcctttcctttcggcaacaatgtgtcatgttgctgtcgcgctagttgcaagttgcaattaaacgtttggaacagtttgtcatgttatttgtgtggcttctatatggctatatgtttgctggaactgtatggacc

SEQ ID NO: 25400 - DNA, 561 bp, Zea mays
  Clone ID: LIB3898-007-F4_FLI
gcgtccactcgcccaccgtttccgctccatccccggcccccacttccccgttcgagagacgaaaaccgaccattcattccttcttccatggcgaggagggcgacggtgatggtgctcgcggcggcgctcgcggtcctcctgctggcgtcgtcgtcgtcgaagacggcccccgtggccagcgccgcccgggacgacccctcggcagcggcggcggcggccgtcacttcttctcgtgacctgcagaaggatggatcggcggcggcggcggaagggaaggggaaggagaaggagtgcgagggcgccaacgacgaggacgagtgcatgatgaggcgcacgctggccgcgcacaccgactacatctacacccagcagcaccacggctgatccaatagaatccgtcctaggttacatgcgttgctctcgtacgtgtgttcgtgtccgtccgtgctcgtgtcgtgtactcgtgtgtgtgtgtgtgtgtgtgtgtgtgaaacgccagcgcgtgctgcttctgctgcgtcgttattacctgcgtgtcaaataaattcttttttttgtccc

SEQ ID NO: 25401 - DNA, 986 bp, Zea mays
  Clone ID: LIB3898-007-H7_FLI
tgagaagagaggaggagaactgaagggatcaaagggaaaggaaacctagacaagcgaggcggcggccccgcgttctccgtctccgtctccgtctccgtccgcccggcgtaaagaaaagcctctctcaccacagccgccacgccatggccgaggagaccgacaccaggcctgcctccgcgggctcccgaggccgccccgcgcccgaggacgacgacagggaggagggcgagatcaccgacctcgcctgcgctccttccccgcccgccacgcacccgctcgagcactcctggaccttctggttcgacaacccgcagagcaagtccaagcaggccgcctgggggagctccatccgccccatacacaccttctccaccgtcgaggaattctgggggctttacaataacattaatcaccctagcaaattgatcgtgggagctgatttccattgcttcaagaacaagatcgagccaaaatgggaagaccctatttgtgcgaatggtggtaaatggaccatcagctgtggaagaggaaaatctgatacattttggctgcacactctgctggctatgattggtgaacaattcgactatggtgatgaaatttgtggcgcagttgtcagtgtgcgtgggaagcaggaaagaattgctatttggacaaaaaatgctgccaatgaagccgctcaggtaagcatcgggaagcagtggaaggaacttctggactacaaggactccattggattcattgttcatgacgatgcaaagaagatggacaaaggcctgaagaaccgttacacggtttgatcctgatgctggaatcccagagagttgtagcagtagctggcccaaatgcatgctgggtggttttatctattgctgatgagttgtttaagcaagatccattcctgtattgtactccataagccacttgggtgttgctttgtattgttcactgctgtgttttttctgtggcaccgcatctacagtact

SEQ ID NO: 25402 - DNA, 848 bp, Zea mays
  Clone ID: LIB3898-008-B11_FLI
caagtctcaactcttgagcaggggaaacgagagatccttggagtcagcaatggagtctaccgcgctaatgaccgcgagactaccactgctgacctctggctcccgttccaaacccctcccctttgcttccttcaccacggcggcttgccgtctcgcctccgccccctgctccggcagcggcagcgtcgtcctgctgtcgcgccggagccgcgattatgctggcgttggttccttggtctccgccgcggcggctcctggggatacggcggacgccggatccgagtccatcctgctcagcgtccaggggatgatgtgcgacgggtgcgccgcgagcgtgaagcggatcctggagagccaacccgaggttacttctgctaccgttgattttaaggaagcaagcgcagtcgtgtggacaacagatgaggccaaggggacacaaggttggcagaagcagtatggagagaagcttgctaaacaccttggcacttgcggatttgagtctcgcctacaagagtaaggtgaagccgaaccgatattgaagttcagatgttcaccttaatgatcaatttgtaccagcatatatgttaaatattttgtctctgtggattgcagttaggagtagtctcggtgctagtctggtggcataatactacatacctacctttcacatgatctttagctaggttgtttcgaataggatgatgtttgtcctaaaattgtaggagtaggccactgttgcgagtgaggagtttgcggctgggctattgttaaatccggtcttcccgttgcttcgaagatataaagtgatactacctctataactcaaaataaatcgattttttaaactc

SEQ ID NO: 25403 - DNA, 338 bp, Zea mays
  Clone ID: LIB3898-009-B5_FLI
gagacaacaacatgccaccaaggtaattgttctagaggtacacaaccacttcttgcgtggccatttctgatgcaaatcatagcttccctcgctgttgtcaatcgagagtaggaccttggtatcaaggtgatgcacgagcggatgcccttgtttagacacttctagccgcacgacgagagattgtagtgatctacaaggttcaagtctggtgtctggcccttgctaaacttgaagacgaaggcgaggatgacgaacttgtagttcctggatacacacatatttaacaggcaccaatggagccaatcttaggcacatgcctagatagggcaagccctgcc

SEQ ID NO: 25404 - DNA, 520 bp, Zea mays
  Clone ID: LIB3898-010-C7_FLI
ctgctcgcgctgctcctcctggtctctgcgaccgccgccgctgccgggacgagcaagggccgcgcgggggtgcggccgtgccaggatctggcgacgcggggccagtgcgcggcgagcggcgggtgccggtggtgccgcagcgaggcgctcgacgacatgtgcttcgaggccatcgaggcgtggcgccttccgcgccaggtgttctcctgcgacccaccctccggtgccgcccacgcccgcttgaactgaagtaatgccgcggccggccgccggcgaagctatgttatgctatcgccttggtcgggatcgctcgatctgatctcgtttgtcgccaggcctccgttgttttctttgctggatctgagatatacaatagcgtgttttatgctgctgcctgtctggtctgcggttctttcattcattgattgtgctgcccatcatactctcgattctcaaagtccaatggcctgtcatttgtattctcaaaattatgttaatgagcacgatcgtaccattccag

SEQ ID NO: 25405 - DNA, 763 bp, Zea mays
  Clone ID: LIB3898-015-H4_FLI
gttaactccaaattgggagataaattctacgagccgaggagagaaggtatacgagtacccccacgatggaagaaccgatgtatgggtactcagattcgagaacatctaaacatgtgaggaggatgggggaaacgagccctgacctcaaagagccggctgagatcggacggattggccttccccgcttgctgcgccgccgatggagatgatgggacagacgcatctccgacgccgacgagtgggtcgtcgacagcgaggtcgctgagtagatccccgatggtgagcagcggacctccgactccccgcatcatcctctttccgtcgtcgtctgtacgagacgagagggacgtgggcctcactgcattctgtatcagcgaaccgattatgggcctcaatgaaccctgatagagcccaacaagtgtggtctgaagagaaggtctggctccggctaaggacattcttgtccagaagctccatttcaccgtttggcttttgttcggttattttcaattcatatatattgtaggggattgatatggattagagaagattttgatttgctagggattgaaaccccctcaatccatatggattggggtaggtggtttgttcatgaaaatcgcagaaccaacggtggtaatgcacacaggtttgctagaagctctttaattagcagcacttgtatggttttcgtcactacctacctaccagatggtgtttgtaattttattcccgaacaactaaacgaatgtaggtgtgttat

SEQ ID NO: 25406 - DNA, 1008 bp, Zea mays
  Clone ID: LIB3898-016-E10_FLI
cagacaggtggggaagatgtcgtcgctgcggaatgcgatcccgcggcgcgctcacaaggagcgcgcccagccggaggcgaggaagaagtttgggcttttggagaaacacaaggactatgtcgtccgggcgcgagcttaccacatcaaggaggcaaccatcgctaaactgaaggaaaaggcggcattcaggaatccggatgagttctattttaaaatgatcaacagtaggactgttggtggaattcatagacctaagcctgaagataataagtatactgaagaggaacttcttctgttgaaaaataaagatatgggatatatccttcagagcgttcaaagtgaaaaaaagaaaatcgaaaagctaagcttaacactccatgaacttgataacaagcctcaaaacaagcatgtttattttgctgaagacagagaagaagcaaaagaaatacaatcaaggataggacaaagcagcaacatgcctgatcttgacaacatcccttctcgtataaagaagaaaatagcctcttcgtacagggagttagaagagaggaagcagcggcttcaaaagcttgagaaattgtatgcagacatggccttgcaaaaagaattgaagaaacctggacgcaagaggaaactgaaactccatgaagatgaagagacggacaatcaaacatcacggcctgtttataagtggcgagcacagaggaaacgatgagatgatatgaatgggctatggagggagtaaaaggcaacatgttagtagtggaagtactggtcagtggaaccgctccttcggaccttaaaatacttccctgtagaagtagccctccacaagaactgtgtctttgtcaaactattgggcttaaagatcagattctgtatgattcaatcatgtgcatcatatatcaattcattgttctgtattatgttgaattcgcctagggatgggctatttttgtgatccattttgagatcagcaagtaatgccagatacaataggatagatcc

SEQ ID NO: 25407 - DNA, 1666 bp, Zea mays
  Clone ID: LIB3898-016-E4_FLI
aagccattccctcttcaagaggggatcatcagattgggcttattattccttattactccaggcaaggatcggagttgctctgaattgactgaaccatggcggcgacaatggcagtgacgacgatggtgacgaggagcaaggagagctggtcgtcattgcaggtcccggcggtggcattcccttggaagccacgaggtggcaagaccggcggcctcgagttccctcgccgggcgatgttcgccagcgtcggcctcaacgtgtgcccgggcgtcccagcggggcgcgacccgcgggagcccgatcccaaggtcgtccgggcggccgacaactgcgacatcgcgcgccagcttggcgccgccgttcccgggcagcaggccgcctgggaggcggaggaagaggcagcgaagaggaggaagcagaagggcggcggcagcaagaagcagcagcagctgggcgatctgagcctgaggaaggtcagggtcaagatcgccaacccgcacctgcggcgcctggttagcggcgccatcgccggcgccgtgtccaggacgtttgtggcgccgctggagacgatccggacgcacttgatggtcggcagcatcggcgtcgactccatggccggggtgttccagtggatcatgcagaacgaagggtggaccggcctgttccgcggcaacgccgtcaacgtcctgcgcgtcgctccgagcaaggctatcgagcatttcacctatgacacggccaagaagttcctaacccccaagggcgacgagccgcccaagatcccgatccccactccgctggttgccggagctctagccggattcgcctcaaccttgtgcacctaccccatggagctgatcaagaccagggtcaccatcgagaaggacgtatacgacaacgtcgcgcacgcgttcgtgaagatcctacgcgacgagggcccgtcggagctgtaccgtgggctgacacccagcctgatcggcgtggtgccgtacgcggcctgtaacttctacgcctacgagacgctgaagcggctctaccgtcgcgcgaccgggcggcgtcccggcgcggacgtgggccccgtggcgacgctgctcatcgggtccgcggcgggcgccatcgccagctcggccacgttcccgctagaggtggcccgcaagcagatgcaggtgggcgctgtgggcgggaggcaggtgtaccagaacgtcctccacgctatctactgcatcctcaagaaggagggcgccggcggcctgtaccgaggtctcggccctagctgcatcaagctcatgcccgccgccggcatcgccttcatgtgctacgaggcgtgcaagaagatcctcgtcgacaaggaggaggatgaggaggaggaggacgaagccggcggcggagaggatgacaagaaaaaggttgaatgatcaaagttcttggccaagaaggtagcaatgtcgtgaagcgtacgtgaactggaaacggatggacaagtatatttggagtttgatgtggtgtttccggatcgtgtgtttgtctcagatgaaaaaaaatacaatattttgagtccaagttaatcaatgttccatttgcctatccggagctcaatttgttaggttgcatgttccatgtaattactatatttgcctatttcaattttcaagctcttttcgttgtgttt

SEQ ID NO: 25408 - DNA, 705 bp, Zea mays
  Clone ID: LIB3898-016-H10_FLI
cgagcaaccgataatccgccggcgttgatatgttggtttatcaggatctcctatctggcgacgagctcctgtcggattcattcacctacaaggagctcgagaacggcgtcctgtgggaggtcgagggaaagtgggtcacccaaggtcctgttgatgtggacattggtgccaatccatccgccgagggtggtgaggacgaaagcgttgatgacacagctgtgaaggtggttgatattgttgacacattccgtctacaggagcaacctccttttgacaagaaatcatttgtgtcttacatcaaaaaatacatcaagaatctcactgctgtgttggagccagagaaagcggatgagttcaaaaagggtgtcgagggtgcaaccaagtttctccttagcaagctgaaggacctccaattttttgttggtgagtccatgaaggatgatgcgtctgtggtattcgcctattacaaggatggtgccactaatccgacattcctctatttctctcatggtcttaaggagatcaagtgctaggcgtgcggcgaaattagttacccatgttgggtactatctatgtactattattatatccaaaactatagttgtcctggctgaattgaactcaaaagggtttgtttgagaaaaaattgtcccaagattggattgcttgttaaagctcaatattgttattgaagtgttattgctt

SEQ ID NO: 25409 - DNA, 656 bp, Zea mays
  Clone ID: LIB3898-017-F12_FLI
aaattgcaccaagaaatccatcgagaggccgtcgacaggggaattaatggcgtcgtcgtctagcagcagccaccgccgcctcatcctcgcagccgccgtcctgctctccgtgctcgcggctgccagcgccagcgccgggacctcctgcgtgccggggtgggccatcccgcacaacccgctcccgagctgccgctggtacgtgaccagccggacctgcggcatcgggccgcgcctcccgtggccggagctgaagaggagatgctgccgggagctggcggacatcccggcgtactgccggtgcacggcgctgagcatcctcatggacggcgcgatcccgccgggcccggacgcgcagctggagggccgcctagaggacctgccgggctgcccgcgggaggtgcagaggggattcgccgccaccctcgtcacggaggccgagtgcaacctggccaccatcagcggcgtcgccgaatgcccctggattctcggcggcggaacgatgccctccaagtaactgcgaagagcatagtgcatgaggaatgagcttgtagctagctcatatgtctgaataataagcacagcaagaagatgaatgcatttctcggatcgttcatccggaacaataattaaaggggatccggatttgttcttgtgat

SEQ ID NO: 25410 - DNA, 849 bp, Zea mays
  Clone ID: LIB3898-018-A8_FLI
atctccgcgacatatcagtcgttcgtccagctaactgcactgcactgcactgcacgcaatggccaccacggcgaccgaggcggccaaggctgcaccggcgcaggagcagcaggccaacggcaacggcaacggcgagcagaagacgcgccactccgaggtcggccacaagagcctgctcaagagcgacgacctgtaccagtacatcctggacacgagcgtgtacccgcgggagccggagagcatgaaggagctgcgcgagatcaccgccaagcacccatggaacctgatgaccacctccgccgacgagggccagttcctcaacatgctcatcaagctcatcggcgccaagaagaccatggagatcggcgtctacaccggctactcgctcctcgccaccgcgctcgcactcccggaggacggcacgatcttggccatggacatcaaccgcgagaactacgagctaggccttccctgcatcaacaaggccggcgtgggccacaagattgacttccgcgagggccccgcgctccccgtcctggacgacctcgtggcggacaaggagcagcacgggtcgttcgacttcgccttcgtggacgccgacaaggacaactacctcagctaccacgagcggctcctgaagctggtgaggcccggcggcctcatcggctacgacaacacgctgtggaacggctccgtcgtgctccccgacgacgcgcccatgcgcaagtacatccgcttctaccgcgacttcgtcctcgccctcaacagcgcgctcgccgccgacgaccgcgtcgagatctgccagctccccgtcggcgacggcgtcacgctctgccgccgcgtcaagtg

SEQ ID NO: 25411 - DNA, 1218 bp, Zea mays
  Clone ID: LIB3898-018-G4_FLI
gcgagagacgggcaggggagaggaaaaaaaaaatctaaccctagcatccgcagcgctagggttcgggggttgcgatggcggcggcggcgagacagcgggggacggtgaagtggttcaacgacaccaagggcttcgggttcatctcccccgaggacggcagcgaagatctcttcgtgcaccagtcgtcgatcaagtcggagggcttccgctcgctcgcggagggcgaggaggtggagttttccgtctcggagggtgacgacggccgcactaaggccgtcgacgtgaccggccccgacggatccttcgtcaggggcggcggaggcggaggaggaggcggcggcggctacggctcccgcggcggtggcggatctggcggcggcggtcgcagctacggtggtagctggggcggcggccggagatccggcggcgggggcggtcccggcgcgtgctacaagtgcggcgagcccggccacatggcaagggactgccctagcgccgacggcggaggcggctacggcggaggcggctacggaggaggaggcggcggcggcggtggctgcttcaagtgtggcgagcctggccacatggccagggactgctccagcggcggcggcggctacggcggtggcggcggcggcggtggaggcggctgctacaactgcggccaggccggccacatggccagggactgccccagcggtggcggcggtggcggagggaggttcggcggcggcggcgggggtggcggcgaccgctcctgctacaactgcggcgaggccggccacatcgcccgcgactgccccacgtgaggtgtgtccgcgtccgtccgtccagccagatcagatcggatcgctccaccacctgctggtctgatggcgccgcccccttctagatctcgcttaaaaaaacacccccctctcgctgtgtgtcggagtaccgctttagttttgccgatccgggcacgagtgcccgctgcctctttcctctcatgcgtaagaggaacccgtccgccgttttcagatttcgttcggtccgtagaagaactctcaagttaagttaagttatcatggtgtgtgcttggtcgttgttcgtcgtcgtcgttaaggttttaagagatgatttggtcctgtgttgccgaggggaagtcgaatctgcttttttctttttttgtggtttgttccaccagactgaggaaggagatgagatgattattctccc

SEQ ID NO: 25412 - DNA, 977 bp, Zea mays
  Clone ID: LIB3898-018-H1_FLI
ccgagttccccagtactccgcagtccgcacggccgcatccgtcaagatccgcgaaaaacaagtgagtgagaaagagagagagaggagggaaaatgctgcgccacgccgcccgccgcctcgtttcccgcgccgtcgctccgcccaccgcgcgccgggcgctcgccacggcggaggtgcccgcggaggccgtcgaggactccacgttcgtcgaggcctggaaaaaggtcgcccccaacatcgagcccccagcgacgcccctctccctcatgcagccgcgcccgcccacgccagctaccatccctaccaagctcaccgtcaacttcgtcctcccctacaagtccgagatcgccaacaaggaggttgacatggtaattgtaccagctacaactggtcagatgggtgttttgccaggccatgttgccacaattgcagagctcaagcctggtgttctctcagtacatgaaggaaacgatgtgagcaagtactttgtgagcagtgggtttgctttcgtccatgcaaactccattgctgatattgtggctgttgaggctatccctgtggatcagatcgacccagcattggttcagaagggtctcgctgaattcactgccaagcttggtgcggcctctactgacctggagaaggctgaggcccagatcggagtcgatgttcacagtgccctcaatgctgcattgaccggttaattggtggcattttaaattgtcttgtatttttcatctacagttttagagtgagtttaagtttgcaaactcatgggcatgggatggagggaatgatcctaaataaattatactccatctaaaacatggacatatgtttcttgtttcctgaatcctgcatggatttctttttgtactggtgaacattttaactctgagctcaagacctggagctgctttctgcccccgttgagtttgggccatggatcagatgaaattgatgttcgtccgtaggtt

SEQ ID NO: 25413 - DNA, 886 bp, Zea mays
  Clone ID: LIB3898-019-C11_FLI
ggagaagccgaagaaaattcgaagacgaggagcagctacactgcggacggacttcgggcatggagggccagttccaggttggcaaggaggaggtcatccaagcatggtacatggacgacagtgaagaggaccagaggcttcctcatcatcgcgagcccaaagaattcatccctctcgacaaactttccgaactaggaatattaagctggcgcctaaatgctgatgattgggagaatgatgagaacctcaagaaaattcgtgaagccaggggttactcttacatggacatttgtgatgtgtgcccagagaagttgccaaattacgaggctaagataaagaatttctttgaagaacacttgcatactgatgaagagatacgatattgccttgagggtagcggctactttgatgtgagggaccaagatgatcagtggatccgtgtagcggtaaagaaagggggcatgatcgttttgcctgcaggaatgtatcaccgctttacgttggatagtgacaactacatcaaggcaatgcgtctatttgtgggcgagcctgtctggacaccatacaatcgtccgcatgaccatctcccggctaggaaggagtacgtcgagaaaatcatcaaccgaggtggaaaccaagccgtcgaagctcgttgagcgtgtccactctacatgtcctcctgccgtctcagcctcttgtgttttacactctacaactcctagtaccgccgaataagatttgctatctgcaatgtgctcatgccaccaccgtgtgtgccagttaacagtttgcacgaaacccgcttaaaatcttccctagatattttgttgtacgaatgaatgacatgtggtgtttgataaatgatgaaacgatgatggttcaaatc

SEQ ID NO: 25414 - DNA, 1358 bp, Zea mays
  Clone ID: LIB3898-020-E7_FLI
gatggatctgtacaggtattagcggctacacaaatgcctgaagagccagctggatggttccagggtacagcagactctatcagaaaatttatctgggtactcgaggattattacagtcacaaatccattgacaacattgtaatcttgagtggcgatcagctttatcggatgaattacatggaacttgtgcagaaacatgtcgaggacgatgctgatatcactatatcatgtgctcctgttgatgagagccgagcttctaaaaatgggctagtgaagattgatcatactggacgtgtacttcaattctttgaaaaaccaaagggtgctgatttgaattctatgagagttgagaccaacttcctgagctatgctatagatgatgcacagaaatatccataccttgcatcaatgggcatttatgtcttcaagaaagatgcacttttagaccttctcaagtcaaaatatattcaattacatgactttggatctgaaatcctcccaagagctgtactagatcatagtgtgcaggcatgcatttttacgggctattgggaggatgttggaacaatcaaatcattctttgatgcaaacttggccctcactgagcagccttccaagtttgatttttatgatccaaaaacacctttcttcactgcaccccgatgcttgcctccgacgcaattggacaagtgcaagatgaaagatgcatttatctcagatggttgcttactgagagaatgcaacatcgagcattctgtgattggagtctgctcacgtgtcagctctggatgtgaactcaaggactccgtgatgatgggagcggacacctatgaaactgaagaagaagcttcaaagctactgttagctgggaaggtcccagttggaataggaaggaacacaaagataaggaactgtatcattgacatgaatgctaggattgggaagaacgtggtgatcacaaacagtaagggcatccaagaggctgatcacccggaagaagggtactacataaggtctggaatcgtggtgatcttgaagaatgcaaccatcaacgatgggtctgtcatatagatcggctgcgtttgcgtctacaaaacaagaacctacaatggtattgcatcgatggatcgtgtaaccttggtatggtaagagccgcttgacaggaagtcgagcgttcgggcgcaagatgcgttgtctggcatgctgttccttgaccatttgtgctgctagtatgtactgttataagctgccctagaagttgcagcaaacctttttatgaacctttgtatttccattacctgctttggatcaactatatctgtcatcctatatattactaaatttttacgtgtttttct

SEQ ID NO: 25415 - DNA, 1139 bp, Zea mays
  Clone ID: LIB3898-021-E5_FLI
cttcctcgctccccaccagtccgtcccatccctcgcctgccttcgcacgggtgcgccgcccgctcgacagccacgccgcgccgcgccgcgccgctcagctgcccggcacccgcccttcctcgccgagctcgggatcgacgtctcccgcacctcctccgcgcccgttccgggctccgcatccggcctctcccccgtccccaaccccattccgcagcaggcgaccagcacaacatctcgaatcccccgcctcgcattcggctcgccgtcgctcctcctccgcgtcccgccaccctccgcacgcacaagtttactatgtctgggatggcatctgatgattcacctgcccaagtgaatgttgaaggagatgtttcagagaaaaaagtagaagttcaagaccagaatgaagtgggtgggatgccctcacgacaagaggaggaggcagcaattaagaaaaagtatggaggaatattgcccagaaagactccacttatatctaaggatcatgaacgtgcttactttgattctgctgattgggctctaggaaagcaaggtggtgttcccaacaagcctaaaggtcctcttgaggcactccgacccaagcttcagcctacgcaacagaatgcccgcgcccgccgaacttcatatgcgtctgcggacagtgacgacactttgaatctgtcccccgaggatctggtcccgcaaggagaacccagccagcagggagaaccagtcgaggacaagaacaaggaataaacacatgcccagcatagctactgtactgtaccccttttcatacacaagatgccattttccgccgtcgcacaaaaaaaaaacttcttttgccttggtaataagcgtgttgattcggttccggcccaacggtcccggtgaggctgaggttgagacacgtgcagcttgaactgcatgtgagatgtggtatccgctgcactgggctgttgggggtccttgggatgcatgaacaaataaacaatgatgcttgcgatgtttacattgctgtacctggacctgtgttacctctatgcaaacacatgcaaatccgatggtccgagactcgaaactctcccgttgagctgaaggagttgctgtactaataataatgaagattttttttttgttct

SEQ ID NO: 25416 - DNA, 867 bp, Zea mays
  Clone ID: LIB3898-022-F4_FLI
cacggatcgtcttcccagcttcccatcggccgtccgtgccactatcgatcgggccgtccatcgcgtttgcacacggatcgacggggccaccaccccacccttttcgcggggttttaaaagcacccaacctcgcatcccctctggcatcacacactcgactctcctctctcgcatccgcagcctctcgagctctactccatcccctcgatctcgaagcgcagcagcagcagtcaggcggccatggacgccagcgcagcaggagccggcgggaaggcgaagaagggcgcggccgggcgcaaggccggcgggccgaggaagaagtcggtgacgaggtccgtcaaggccgggctgcagttccccgtcggccgcatcgggcggtatctgaagaagggccggtacgcgcagcgcgtcggcacgggcgcccccgtctacctggccgccgtcctcgagtacctggccgccgaggtgctggagctggccggcaacgctgccaaggacaacaagaagacccgcatcatcccgcgccacgtgctcctggccatccgcaacgacgaggagctcggcaagctgctgtccggcgtcaccatcgcccacggcggcgtcctccccaacatcaacccggtgctcctgcccaagaagaccgctgagaaggcggcggccaaggaggccaagtcgcccaagaaggccgctaagtcccccaagaaggcatagaggggcgcctttaccgctgtgatgttgaatgctcgtgttcagtagatctttacttctgtagtgtcgtcgttgttattggaactggttagtagatctgtgcattgtggttgaaacgtgattccctgatttcagaaatctaatttgcaatttgggtgc

SEQ ID NO: 25417 - DNA, 508 bp, Zea mays
  Clone ID: LIB3898-022-G6_FLI
gggcacaacagcatcatcttcctgataaacaatggagggtacacaatcgaggtggagattcacgatggcccttataacgttatcaagaactggaactacaccggtctggtggaagcgttccacaatggcgagggcgcgtgctacacagcaaaggttcgaacagaggaggagctgacggaggcactggaggcagctctgggacctaagaaggactgcttatgcttcatcgaggtcatcgtgcataaggatgacaccagcaaagagcttctcgagtggggatctagggtttctgcggcgaatagccgtccacctaatcctcagtgaaatagccgtacatcaggtctcccgaattgtcctgtagatcaaaccgttttctggtgacgtccatagcaaaaagtctcggcgaggacatgctgtcgatttctgaataaattgtccctgcaattcactggtgttgaagtcctcgttgtaaaggtacaaagacgtttggaaaaatcactgacagcgt

SEQ ID NO: 25418 - DNA, 601 bp, Zea mays
  Clone ID: LIB3898-024-A6_FLI
gcgcgcgcagaagcacacctgctcgggctagattaggaggacagcttcttcggccggcgacatggcggaggagaagggcgcgttgcagtcggcgagggagtgggtggtcgaccacaagctccgggccgtcgggacgctgtggctcagcggcatcgtcggctccatcgcctacaactggtccaggccgggcatgaagaccagcgtcaagatcatccacgccaggctgcatgctcaggctctcacgctggctgccttggctgggtccgcgctggtggagtactacgaccaccagcaagggtcaggatcgaaagttcaccaatatgcaaagcagttcctttcatctgatagcaatagcggccatcaaaaggagtagctagctagtgtccttgcgaagtgcaagcagcggagtgggcgttatttcctgatcaaataattttgcctatggcacattctgtggaaactttgacggatctttgcctgcttttctatgtgatgtaagctgctgaaacctgcactcatcaaatgttgtgtatgcagatggtaccatgcatttgtttccctgaatggcttcaaatgaaatgaatgttttttttttatcggt

SEQ ID NO: 25419 - DNA, 442 bp, Zea mays
  Clone ID: LIB3898-024-C2_FLI
ggtttccttcctcctccagtgctgtcatcgccgccgccgccccggtttccttcgtaagcccgtcgtcctccgtccgcgactctgcgcgagaagcgagagtatggacacccaagtgaagcttgctgttgtggtgaaggtgatgggaaggaccggctccaggggtcaggttacccaggtcagagtgaagttcttggatgaccagaaccgtctcatcatgaggaacgtcaagggaccggttcgcgagggagacatcctcacactgctcgagtctgagagggaggctaggaggctgcgttgaggcggaatagtgtcttggtagttttcgtatggagttggatgtcatctaattgtgctatgtttgtcaaactttggtatgaccttcaaaacacctgccttgtatgattatttgtgagcctggtgataagattgcagtttggttttt

SEQ ID NO: 25420 - DNA, 1121 bp, Zea mays
  Clone ID: LIB3899-002-B5_FLI
tttgtggcggctgccgcaacaggctcaacgctcacgcgcacacacaatccatagccgcctcccacatctcactctcgttccgagcttccggccatggcggtgacctccggcgcccccaacgacaacggccggtgatgcttctcctcctcctcctcctcctttgtccataactgtttttttgcagttgcgcatcagtgcacttagatctaactcccttcccgttcccaaggagttgtcctcgccggcggatccggggcgccgctgcaagaggaggaaggaggaggagaggataccagaatggcgtcgcgctcggcgtccaaggatatcatcacgctgcgaggctctgccgccatcgtcagcgagttcttcgggtacgcggcgaatagcatcctctacaaccgcgctgtgtacccggaggagagcttcagcaaggtgaagaagtacgggcttaccatgctgctcacgcaggacgagggcgtgaagaacttcatcgccagcctcacctcccagctctcagaatggctggaggccgggaagctgcagcgtatcgtgctggtcataatgagcaaagccaccagcgaggtgctcgagcgctggaacttcaacatcgtcaccgacgccgaggtcgtcgagaagggggccatcaaggagaagagcgacaaggagatcatgagggagatccaggccatcatgcgccagatcgcgtcttgcatcacctacctcccctgcctcgacgagccatgcgtgttcgacgtgctggcctacacggacacggacgtcgacgctccgggcacctgggtcgagagtgacgccaagctcatcgacaacccgcagatggttaagctgcactccttcgacaccaagattcataaggtggacacgctggtgtcgtacaagaaggacgagtgggacgaggaggagtagagtttgcaccaaaagttaccctgctgctgctagagcttggcgtgaaggctgtgtgaatcgttcattcacgtctatcgtgtactgcactaatagtatactgctactttggggggaagaaaagtgtgagacgctcctaccatttagaatttcgagattgaaatgccggttttaatataacatgagtcagcgcctttaag

SEQ ID NO: 25421 - DNA, 833 bp, Zea mays
  Clone ID: LIB3899-002-D11_FLI
agagaaggaaaaatttccccaaaccctagcttcggatctcgatggcgaacccccgcgtcttcttcgacatgaccgtcggcggtgccccagccggccggatcgtgatggagctgtacgccaacgaggtgcccaagaccgcggagaacttccgcgcgctgtgcacgggcgagaagggcgtgggcaagtccgggaagccgctccactacaagggctctaccttccaccgcgtcatcccccagttcatgtgccagggcggcgacttcacccgcggcaacggcaccggcggcgagtccatctacggcgagaagttccccgacgagaagttcgtccgcaagcacaccggccccggggtgctctccatggccaacgccggccccaacaccaacggctctcaattcttcatctgcaccgtggagaccccctggctggatggcaagcacgtcgtcttcggccaggtcgtcgagggcatggaggtcgtcaaggccatcgagaaggtgggctcccgcagcggcgccacctccaaggaggtgaaggtcgctgactgtggccagctctagatctctggtctgtccggctgccctccctccgtcatcgtcgactccgcctgcgtccgtcccttttcatttccttcgatctgaataagatgatggcgatctgagtggtggtcttagttgagtcttcaagtcgtttgtgtctgtgtccctcgcggttttaatttagcggtttaggtgtggatctgtgaatcccgtggcgcctctgcttaatccttgtttcagctgttatgttatgggatccatgataatgctataaaactgaaattccgtttcgtgctt

SEQ ID NO: 25422 - DNA, 663 bp, Zea mays
  Clone ID: LIB3900-001-B2_FLI
ctctcccagcgcgctgctcgactcgactcgacttcctctgcaacgcgtgtccggtgtaggctgagagagtgagtgagaggcgagatgaggagcgggcggctggcggtggcggtggcggtggctctggcgtgggcgttcgcggcgtcggcggcggcggcggcgcagaagtacaatgccatcttcaacttcggcgactccatcaccgacaccgggaacctctgcaccaacgggaggccgtcgcagatcaccttcacgcagccgccctacggcgaggtaccccaagagccagctttacgtggggctcgccgcggccgagagcggcgtgccggaccacgcgccgccccccgttgaggtctacctcaaatacctctactacgatctgctgcccaaggtgcagaaggcgcccaactatggtggcgtcatggtctggaataggttcaccgacaacaggaccggatacagcggcgccgtcaagggctgggcggcttgcagctatgctggctgtgttaactaagtgcatagcgcatgtataaaccacgtaaataattcgtataaggtgcaagtataaataaacacaagagactttcgtgataatcgaatgtttctttatgtctaaaatacagttccacttatacaacataaatacattgaatgaagtttctt

SEQ ID NO: 25423 - DNA, 1092 bp, Zea mays; identical to SEQ ID NO: 24412
  Clone ID: LIB3900-001-B6_FLI

SEQ ID NO: 25424 - DNA, 1620 bp, Zea mays
  Clone ID: LIB3900-001-G7_FLI
ctcacaagggtagttcaaagtccagaattccagactcgcgttcgcacgccgcctttcgcgctgccttagcgccttagcctgctagggctcgtcgattcatcgccggctcgacttctgatctcgcgggcagagcagcgcgccggcgcgatggcttcggatccggatgtgtccggcggcgagcaggcggagccgcccgacgatgtggacgaccccgacgtcgacgaggtcgaccccaccggccgctacttcaggtacaaggaggtcgtgggatcaggggccttcaagacagtctacaaaggtttcgacgtggtcgaaggcatcgaggtggcatgggctaaagtggagataaacggccggaccatgggatcccccaaggagctccagcggctcaagacggagatccagctgctgcggtcgctccatcacaagcacattctcaagctctacacctcatgggtcgacaacaagaagagggcggtcaatataatcactgagcttttcacgtccggcaacttgagagagtaccgtacgaagcacaagaaagttgacatgaaggcaatgaggcgatgggccaaacaaatactgacagggctagcctatctgcacagtcagaagccaccaatcatacacagggacttgaagtgtgacaacattttcatcaatgggaaccatgggaaagttaagattggagacttcggtttggcaatggtaatgcagcagaggaaaacacagagtatacaaggcaccttagagttcatggcaccagagctgtttggtgaaaactacaacgagttggtggatatatactctttcggcatgtgcatgcttgagatggtgactggtgagtgcccttacagtgaatgtcagggctttgttcagatatacaagaagatatctgaaggtgtaaaaccagttgctctctccaaggtcaaagatgcagaagtaaggagtttcatagagagctgcctagcttcagctgctgatagattgccagcaagtgagctcttgaagagcccttttctcatgaaagatgacatcatcatcaatgataaaacctctaatcctgtgcaagaacctatagcattcccgccaaatttggatctggatcttgaagccacaccaatttttgtatctttgctaccaaatggaaccgttgataatgggaagggatctttcagcctagtgcttcgaaggggtggattcgtactagaaggagatatgagtggtagcaaccctgttaatttattactaaggattcctgtccccaatgataaatgtaagaacattgagttcgcgtttgacctggagaatgatacaagtctcttggtggctacagagatggtgcaagagcttgaactaccttcttggagcatgcctattgtggcaaagctggtagatgcgttcctgctcaaaactgttcgtggttggaggccgtgtgttcaggtcggtcagatgattcaggcagtgcaaaacactgcatccgtgaatggaaaaagcatctgaatcaatgtttgtagctgatgcattattctgcaccttatgtaaatatatcatgctcgaatgcaacgccaggccttgctgactaagcacatcttcttttatctgatgctggttaaagtt

SEQ ID NO: 25425 - DNA, 1460 bp, Zea mays
  Clone ID: LIB3900-002-B2_FLI
cgcaccattcttttttatcgctttcggccagcctctcggtcgaaccaaaaaactgcccacggctagctgccacgcgctttctcggagagatcgacaagctgcaccctcatatcattcatcgatggcgagccttgggctggtcctgcttgtcgccgtcgtcgtgtccgcggcgctcatgccaccgtccgccgtcgcgcagcagctgacgccggactactacgccagcacctgccccaacctcgaggccatcgtccggcgctccgtccagcagtccatggtgcagtcccagatcgccgcgcccgccgcgctcaggctcttcttccacgactgcgccgtcatgggctgcgacgcgtcgatcatgatcgtcaactcgaacggcgacgacgagtggcggaacaccgccaaccagtcgctcaagccggaagggttccaggccattctcagcgccaaggccgccgtggacagcaaccagcagtgccagtacaaggtgtcgtgcgcggacatcatggccctcgtcgccagagaagccgtcttcctgagtggcgggccgtactaccaggtggagctcggccggttcgacggcagggtgtcgactagggacagcgtccggctgccgagtgtcaacttcaccctggaccagctcaacgccttcttctccggcctcggcttctcccagaacgaaatggtcgccctcttaggcgcgcacaccctcggcgcggcggactgccctttcttccagtacaggatcggcgacccgagcatggacccgagcctcgcgtcccagctgcgcggcacctgcggctccaaccccagcggtggcttcgcgttcttcgacccctcgccggtgaggttcgacaacgccttctaccggaacctgcaaggaggcagggggctcctgggcaccgaccaggtgctgtacagcgatcagagatcacgcagcgcggtcgactcctacgcgtccaaccagggcgccttcttcaccgacttcgtggcggcgatcaccaagctcgggaggatcggggccaagacggcggctactggtgagatacgccgcgtctgcaacttcccaaactagcgagcgagtatctgagcttagtttattggcaacgactgctatgcatgcaagcagtccttctttataagcatgcaagcaaactatctgttccattagattacgatccaaccacagatataaccatgatttgttagaggagttttttataaagattattgagctggtggtgaaaaggtttaagtgttaaatgtgacctacggttagattacgatctaatgaaccagatggtttgcttgaacgcttgcaaaaaaagactgtttgcataaccgtcgttgcctttagtagccttactggccggccgttttcacgtcagaatatttaacagtgtacactacatctacacgtaattcagggcggcgactctgtacaatcaaagtttatatac

SEQ ID NO: 25426 - DNA, 1000 bp, Zea mays
  Clone ID: LIB3900-002-B4_FLI
ggagaataagctatgggcgcgccgaagcagaaatggacgtcggaagaggaggatgcgctccgcgccggcgtgcgcaagcacggcgccggcaaatggcggaccatccagaaggaccccgagttcagcccggtcctctcctcccgctccaacatcgacctcaaggacaaatggaggaatttaagtttcagtgcaagtggactgggatcaagtaaactgcgggttccaaagataactggaccctcatcttccccatcatctagctcgcagcctctgcttctcccagcggcaaacaaatttactgaagctacactgcctgcagatgctgagaaaaagccacaagatgggaaaactctgccaaagtatggtgccatgatcatggaagctcttttggaattgaatgagccgaatggttcagatattgctgcaatcttcggcttcatagagcaaaggtatgcggtacaaccgaccttcagaagatttctagcctcaaagttacggcgacttgcagactcaaacaaaattgaaaagatcgataagtcctataggctcccagactcccttgcaacaaggactccagctccaatgaatgcttcagctccaaaacagaaggatccatcaaagccatcgaaggtgtcaaaggccataggattgttttctgcctccagccctgcactagaggctgcgatggcagctgctgtcaaggtggctgacgcggaggcaaaagcacatgatgcgcatgatcagacgatggaggcagaaaggatcttcaagatggccgaggataccgagtctctcctcataattgcagcagagatctatgatcgatgttcaaggggagagataaccacgttagttccagtggcacaaagggagatttgagatctattggagtctctcttgtgttgtttgttgtacatggataggttctggaatccagtggcccggattgctcctgttgtatgatgtaaccgtttgtgttatactgtctccgttcttcgat

SEQ ID NO: 25427 - DNA, 619 bp, Zea mays
  Clone ID: LIB3900-003-C5_FLI
cgagcggcagcggcggcggcgatcggagaagatggtgcgcaaggcgaaggttgagttcgacgagcagccgccggataacttcgacccgaagaacccgtatgccgacccggtggcgatgctcgagtaccgggaacacctggtgcgagagaagtggatccagatcgagaccgccaagatcatccgggagcgcctccgctggtgctaccgcatcgagggcatcaaccaccaccagaagtgccgccacctcgtcgaccaatacctagaggctacccgcggcgtgggttggggcaaggatgcccgcccgcctgaactccacgagcccaagaagaccgtcaaggcggagtagcggcgctgctgccttgcttctcgtgctgctgttcctggattggagaggtgatctgacccttccattgagttgaatgaagtagcctggaactgtggtagttcgtcttttacatcttaagctgctgatagacttcaaataaaatcttgtccaagaaaacattctgtgagcgtacatgttgtcgtcgagctgtgtaattgagcaaatcgtcagattgaaactcgttgtctgccttgttcttcaaataccgcttatccagacggtgcttttgttttc

SEQ ID NO: 25428 - DNA, 1155 bp, Zea mays
  Clone ID: LIB3900-003-E7_FLI
ggaaagcgtcggcgcagaaggagaaggaagcaggcaacgccgcttacaaaaggaaggattttgataccgcgatccagcactacacagaagccatggagctcgatgacgaggatatctcctacatcaccaatcgtgctgctgtttaccttgagatgggaaagtatgatgaatgcattaaggactgtgataaggctgtcgagagaggaagggaactgcatgctgatttcaagatgatctcaagggcacttaccagaaaaggaactgctcttgccaaacttgctaaatcatcgcaagactatgatgctgccattgagattttccagaaggcgttaactgagcaccggaacccagatacactgaaaaaactaaatgatgcagaacgagcaaagaaggagctggagcaacaagagtactatgacccaagaattgctgacgaggagcgagaaaaaggtaatgagttctttaagcagcagaaatatccagaagcagtgaaacattacaccgaagctctcaggagaaaccccaaggaccccagggtatacagcaatagggctgcctgttacaccaagctaggggcccttcctgaaggtctgaaagatgctgagaagtgcattgagctagatcccacattctccaagggatacacaaggaaaggtgctatccagtttttcatgaaagaatatgacaaagcgctggaaacttatcaagctggcctaaagcatgacccgaaaaaccaggagttacttgatggtgtaaggaggtgtgttgaacagatcaacaaggcgagcagaggcgaactcagtgaggaggaactgaaagagagacagaacaaagccatgcaagaccctgagatccagaacatcctgactgatccgatcatgcagcaggttttgacggatctgcaggagaaccctcgggctgcgcaggcgcacctcaagaaccccggagtgatgcagaagatccagaagctcgtcagcgcagggatagttcagatgaagtagacggtggctggaatgtccgggttcagatctgggacctgtgctggaaatgctgtgaacttgatcattgtttcgcattttggaaactgaacccttttgtgcgaccatagtttggtcatggctgttaatgatccatatatgggttttcccatccgat

SEQ ID NO: 25429 - DNA, 656 bp, Zea mays
  Clone ID: LIB3900-004-A11_FLI
ctgaacaccaatacggcaccgctggcggcgcgcttcactgacgcgtgcgcgcactacggcgccatcctggagtcgctggacgcgacgctggcgcgggagattgcggagaaggccagggccgaggcggccctgtcgaagaaggcggcgaacgcggtcggccgggatggccccgaccggctggagcggtgcgaggtcttcggcaagtggcgcgccaggttcggcatggcgggcttccgcccggtgtcgctcggctcgagcattgccgaagagctggtcggcgcccgcgtcggccatgtaccgcccgggttcacagtcaaggcggagaacggcgtgctccggttctgttggatggggcgcgcggtgaccgtcgcctccgcgtggcgctagaccacggcgggcggccgaccgcccgcccgggccattattgccgtcactaaattgtcagttacataattcgagctattgctttcctcgttctcccttcttcctttttttttaccttgattgggtgaggagtgatgagtttgccatgatctggtaaaaatccttcctagctgtagcgactcataattcttataactgctcatagtagtatatggaaaagagtaagttatatcgcaatctcctcctaattttgtgtggcatgttggtagaag

SEQ ID NO: 25430 - DNA, 712 bp, Zea mays
  Clone ID: LIB3900-004-E1_FLI
gaaccacccatggttcttgaagaacctgcccatcgagatgaccgacgagtaccagatgaatttccgcaagacgcttactcggattatcagcgtccagtacgcggttcctgattttgtccgagtttcaatggagtgcaggcatctgctgtctcggatctttgtggcgaaacctgagcaacggataaccatcccagagatcaagaaccacccatggttcttgaagaacctgcccatcgagatgaccgacgagtaccagatgaacctacagctagtcgacatgaatgtcccctcgcaaagcctggaggagatcatgtccatcatactggaggcccggaagcccggcgacgggctgaagcatgcgggacagctccccggccttgggagcatggagctggatgacattgatgttgacgacatagacgttgaggacagtggcgactttgtatgtgccttgtgacgcggttcaggctgtccggcaccgttgctgcggtggactctcccccactctcctggtctttgtgtcttgctgttattccatgttgtttgtttcagcgagctccgagctcccattttgttgttgtaatatcacatgttttgtgtaaccaaggtagtgacgctgtggataaataatagacgttatgtgttgtattcttgctgaattgttgttcagctccttctgtttgccctgtatgaactgggcagtttcatgagt

SEQ ID NO: 25431 - DNA, 1055 bp, Zea mays
  Clone ID: LIB3900-004-E11_FLI
ccggcttcgtgccggcgggtgcttgctggccatcgtacctcacccctcgtgcctcaagcctcagcaagacagcaacgcgaccgctgccacccctttgcggaatcgcggcttcggcctccggcctcagcggctcagccaaccacgacgccgccgtgcgcgccagcctccgtgggacacggctgccggcttcggtccgctctcggctctcgcccctcaggcctcagccacgccgcacgcggccggcacggcggcgcccgcctccacggctccgcgccgcggccccagccacgctacacgcggccacgccgcacgccagcacgctcagccgcgcgcccgcccgcctgctcggctcctcccctgctcctgctcggctgctccgtggtgcctgatccatggcggagaaggaggcggcggctatgtggggcggcggcgacaagctcattctgcgcggccttcagttccatggcttccacggtgtccttcaggaggagaagacgttgggacagatgttcgtggttgacatcgacgtctggatggacctcgccgctgccggcgagtccgactgcatcgctgacactgtcagctacaccgatatctacagcattgcaaaggatgttgtcgagggcacgccacgcaacctcttggagtcggtagctcactcgatcgcagaggccacactgctcaagttccctcagatctccgcagtccgagtgaaggttggcaagcctcacgtcgcggtgcgaggcgttctggactacctgggcgtggagataacgaggcacagaaagaaagaatgagatgctgtacacatgtggtgatggggagccagttcaatgctgatggcactgcggccataaccataatccacgcacgcttgttggcaactaggcatatccctttcacctctgaactgttggaatatcgggaatctgttcccctagttgctttattacgaattcagaatttcagatcatatctgggtagtaagatcaaccttcttctggtctgtaacatctttttttttgtccatgttgctagtcgttgctcttcatacc

SEQ ID NO: 25432 - DNA, 1546 bp, Zea mays
  Clone ID: LIB3900-004-F11_FLI
tgatgatactgaaaccgaggagggaatgggtagcgaatctgaggagagcgatgaggatccagctgagtcaggtgatgattcacaagaggctgacaaagaacacacgatctcgaagtctgagacgacttcagtggatgacctgccatattctgtaaaaaaggggaaaaaatcaaaagatgatcgtggaacagctaaactagaagagaaaaatcaaaatgagggaagattagatgaccagaaacagggtcaaataaagaagcgcaggaaaaagttaaaacatactatccatgttgaatccagtgatttggattttgagattcactatgcctttcatgatgaacctcatattttactagctcagattgccaaaaagatagctaggactattcttgtgaaggcctgcaataacattgatcattgtaagatcgtcaagccaatgcacaaccatacgcgtctagagaccgccggagtgaactttgaagtggtatggaatctcagtgaatacatcagcgtcaatgacatcacatcaaatgatatccatgccatgctgaagacatacggggtggaggccgcacggggcaccatcatcaaggaagtgagcggcgtgtttgaaccctatggcatcaatgttgacatgaggcacctgagcctgatcgcagactttatgaccttggatggcggataccggcctatgaacaggctggggattggccagttcagcacctcgccatttggcaagatgacgttcgagacagcaacaaagttcattgtggatgcagccacacatggggaggcagattttctggagtgcccctcagcgagtgtctgccttgggaagcccccgaaggttgggactgggatctttgggctactgcagaatcttgaattggagcagcccaagaatatctaaaatctgcatttggtgcacgtctggccaagctgccttctgaaggtttacaagttttggtcctgtcagcctttgcacggcagaatgtgctttagtttgttacggtgtggcacgctgcatctgtggtggcttagtggcagcatgccatttcatacgggcatgctgctggaaaaactagcagaacatgtcaaataccagttagtgatctggaattctggattaatttacagcatgatagctagttgtacacatgctttagaatgccgttgttgtccagtgcttgttaagaaagaactgggtcatctttgttgccaggtctcaaaaaacaaccctgcatgacgccaaggacccaggcaccagtgttcgaattatcgacgagcagacatcatatatggatgcgatattctattgacacaatctcaggttgactgctcacctatgtactaaatctgcctaccctgtgatgtggaaattgaaatactagaagcatttgtaggacttttaattagaggactcaacagtcacttatcctagtggcttgggaggtttgaaagcactggaatgcttgcgtgtttgaaagagtcggtctttgtggttctttaaaatattggtaacgaaagcttgatgtgcggctggagc

SEQ ID NO: 25433 - DNA, 1275 bp, Zea mays
  Clone ID: LIB3900-004-H1_FLI
gtccgcaactcctctaaacccttcctctccctccggcgccggcgccgacatggccgtccactacctcctccgccgcggggtctccggtggctcactgctccaccctatccacggtctcttcctcgcctccaaggagcttgggaggcgtccgtttggctctgcggcggcgggagacgcagcggccgagctgaggggcgcgcgggaggacgtcaggcagctgctcaaggccacctcctgccatcccatcctggttcgattaggttggcatgatgctggtacatatgacaagaacatttccgagtggcccaagtgtggtggagctaatggtagcttgagattcgaagtcgagttgaagcatggggccaatgctggtcttgtgaatgctctgaagctgatccaacctatcaaggacaagttttcaggtgttacctatgcagatctgtttcagcttgccagcgccacagccattgaggaagcaggtggccccaaaattcctatgatctatggaagggttgatgttattgcccccgaacaatgcccaccagaggggaggcttcctgctgctggcccaccttcacctgcggaacatttgcgtgaagtattctacagaatgggcctgaacgacaaggaaatcgttgcactgtcaggagctcatacacttggacgtgcaagaccagagcgtagtggctggggtaaatcagaaacaaagtacactaaagatgggcctggtgcacctgggggacaatcttggacatctcaatggctcaagtttgacaacagctatttcaaggctatcgaagaaaggcgagatgaagacctcctagttctgcccactgatgctgtgctgtttgaggattcctcattcaagatctatgctacaaaatatgccaaggatcaggacgcatttttcgaggactacgctgaagctcatgccaaattgagcaatcttggggcaaagtttgacccgccaaagggtatctcactcgagtagttgtggatggaggtgactgaacaggaaggatcatgtttcttttcgtgaccattttcgaaggttggcaaggaaaagtcattggagttcaatgacagctccacaaattggattcaccgattaaaggatttttttcttagcgtgccctgtttttttagtagtatgctacactatgaataaagcaacacctgtcatttcaagataaatatttgttacactaactaactgaaagcatccgaatcctaagtggtttcggtgattaatgacgacataagattgttataact

SEQ ID NO: 25434 - DNA, 660 bp, Zea mays
  Clone ID: LIB3900-005-C4_FLI
ccgtcggctcctccgacgggcgtcccaccgcaggggaatacagatcgtcgatccgctgggcttgcaaacatgtatatccgagtgaagcgcaacaagagtacctacttcattcaatgtgaaccaacagagacagctttgagcatcaaacagaagttgcactcgctgatagatcaacctcctagtagtcagcagttggtcttgtggcctagcagtgatgtgcttgaagactcaaagactttggcagatcaaaaggtggataacgattccattgttgcattggcactaagaaaagatgacggtgagtttgaggaagttttcatcgctaggccggaggatttcatgtcatcatcatgataaagattagtccatcatttctacaaagggaccactgcgcgttcttggagtggaccgtcgctctatgctggttcttctagaatctgggatgtggcttgcttgtccctttgggaggaaaaagaaaatcttttatgtgagatcccaaacaaccgttgtggatgatattaagctttgatttgacgctccaactgatgccgtgcttcttgtacctactggtgtctgtcttggtgttgggatcagagcgcacctaattgtccttttttgtaccagctgttgtatgtgaatccatctgtgccttcatcacct

SEQ ID NO: 25435 - DNA, 1319 bp, Zea mays
  Clone ID: LIB3900-005-C7_FLI
cttcttccaaagctccaactccgacgagaaccgccactcctcgaaatctcgaaggattttctgcggcgaaccccttcgtgacgtgacccaatgggagaggcctcgccgtcgatcgccaaggacgtcaccgagttgatcgggaacacgccgctggtgtacctcaacaaggtgaccgatgggtgcgtcggccgcgtcgccgccaagctcgagtccatggagccctgctccagcgtcaaggataggattggctacagcatgatcacggacgcagaggagaaagggctgattactccaggcgtgagtgttctgattgaaccaactagcggcaacacaggcattggactggcctttatggctgctgccaagggctacaaacttacactcacaatgcctgcctccatgagcatggagaggaggatcatattgaaggcttttggtgctgaacttgtccttactgacccactcttgggaatgaaaggagctgtcaagaaagcggaagagatacaagcaaagacacccaactcgtacattcttcaacaatttgaaaatccagctaacccaaagattcactatgagactactgggcctgaaatctggaaagctacagcaggaaaaattgatggccttgtatctggtatcgggacaggaggtaccatcaccggtactgggcgatacctcagagagcaaaatcctaatgtcaagctctatggtgtggagccagtggagagtgctgttttgaatggtggaaaacctggaccacacaagattcaaggaattggagctggttttatccctggagtcttggatgttgatctccttgatgaaactctacaggtttcaagtgatgaagctatcgagactgccaaggctcttgctctgaaagaagggttgttggttggaatctcttctggtgcagctgcagctgcggcagttaggcttgctaagaggccagaaaacgccggaaagctatttgttgtcgtgttcccgagcttcggcgagcgctacctctcatcggtgctgttccagtccatcaagaaggaagcggagagcatggtggtcgagccctagagcacaaaattctgggcttctggcaaactatttcctgagacgttcaccatttccatcacagaaaaataaagctcgggtgccttctgttgatttcgacgtacatttccctgccgatggtgtccagcccactgttgtcgctggagaacacgtcgtttttagacttgtgatattttactactgttttgacactcgttgtatttctgtatatcgcgtcagactgtgaaataaaagcagtacagtgtgtttcttgc

SEQ ID NO: 25436 - DNA, 1754 bp, Zea mays
  Clone ID: LIB3900-005-E1_FLI
gaagccagcaaatgttttgctagacgcagccatggaacctaggatcacagattttggtttatcaaggcttattggtgaagggaatactagaatagtcaacacacacactcctggaccaatagggtacatggcacctgaataccgttacatgggggaagtttcacgcaaggtagacatattcagcttgggtattcttatactagagattgtaactggtcaagacaatagtaccaaagttgactttatcgatcatgtatgtgaacactgcatggaagggccacaaataaaatttatgtatccctctctggaacctgaattacatgatcaggtagaactgtgcatcaaaattggcctagagtgtgtccagacagatcgaaaaaaaagacctactgcaggggacattatacgtaagctcgaggaaggaaccaaattgggccctacaccatcccgtgaaaatattactacagaaattggtaagccacagatgttttcgtttgaactcctgaatgacatcacagaaagcttcagtccgggacgcctgcgtgggacaggtggatttggatatgtttatgaggggataccacatggtaacgagggagcgatggccgtgaagaggcttaaagaaaaaataggtatatcaccgaaacagtttgagaatgaggttcataatctgagcagaatcgagcacaggaatattgtacggcttataggctactgcgatgaaatacgggaaatactatctcatggtaaaaacaagaatgatccacctattcgcgaacatattcaagaaaggttattgtgttacgagtatatgcctaagggaagccttgacaagataatttatgataacctcgattggcatacgcgatataaaataatagaaggtatttgccatggcttacattgtcttcacgagggtcaacaggatattcagattgcgcatttggacttaaaaccagcaaatatattacttgacagtgacatggttcctaaacttgctgattttggtatgtcaaggctcttcagtctcgaacaagtttatatccttgcttccaagcctatgggaacaattggctacatagcaccggaataccttgaccacaaaaaggtatcaacaaaggcagatatatatagtttcggcattgtagtactggaaatcgtaacacgaaaacagtgcccacgcagttacgcagacataaatgctcagcattttatccaccatctgcgtcaaaatttgacaaaagataactacgtcaaatccatgtacccggcccttgaagcggactgccttcagcaagtgaaactgtgcatagaaattgggctgaactgcgtggagaaggaacctacaaagagaccaactgccagggaaataatctctatgtttaatcaaaaaaaggattcgagcagatctggggtatctaactgcatcgttaatgtgatagaggcgtggctatcaaggcttccatggcatccttggcctctaactttgctccgtcagacttaagcttgatggcaacagcggtatttgaaagatttgcaagggtgtccgcttgagttcctgcgatgcagcggaaggaagaaaaaaactagcagattaaaaatgagaatggggatcttgtatatctatttatgttttatccttttcatagaaaaattacaagctatgattttgatggtatagtggcaatattatgtcaatgtaacattcaatgggcatcgaattaaaatataatctaagtattttttttcctagc

SEQ ID NO: 25437 - DNA, 1523 bp, Zea mays
  Clone ID: LIB3900-005-F8_FLI
gtcctcccccgcccacagccgcgtcgcgcaccaactccaattcctcctctccgagcgcccccacccacctcgacgcctcgcctcggccgttgagatctcgcgcgcccgcggcggcatggcgacgcgcaaccggacgccgctctaccgcaagtaccgcgacgcgctgcggcacgtccgcgcgccgcccggggcgccgtcgtcgtccggcggcggcggcggcgggggagggccggtaatcgagatggcctcactcctgcgctccgaccgcccctacgcgcccctcagcaccgacgacccctccgcctccagtagaggcgctgcgacggtcgggctacccccagcctgggtggatgtctctgaagagatatccgcaaacatgcagcgggcaaggacgaaaatggcggagctggctaaggcgcatgccaaagccttgatgccgtcctttggtgatggcagagacgaccaacgagccattgaggttctcacgcacgaggtaacggacttgctaaagaggtcggagaagaggctgcagaagctgtccatgaaagattcgtcagaggactcaaatgtccggaagaatgtccagcgttctcttgctacagacctgcaaaacctgtcaatggagttccggaaaaagcagtcgtcgtatctaaagcagcttcgtcaacaaaaagagggtcaggacggtgttgatttggaaatgaatataaacggagcaaagtctacatttgaagatgatgagtttgacgatgtgggtttcactgaggttcagatgtcaaaacttaagaaaagcgaagccttcactagagaaagggagagagaaattgagcaggttgttgaatcagtcaacgaacttgcacagatcatgaaggatctttcagttctcgtgattgatcagggaaccatcatcgatcggatagactacaacatacagaatgttgcagcttcagttgaggagggttacaaacaattgcaaaaggctgagaggacccagaagaaagggggcatggtgatgtgtgccactgtccttgtcattctaatcttcatcatgatagtccttctgattttgaaggagatcattttctgacatacatacctatctcattctaccgggaacgccgcagttcgtttgaatagcgcgatacggttcgctgatctgaagatagttctcctgcccattttcataatggctgggccagcaactgtcttccgtgttggccacaatttttttgcatcgttgcagatgtagagatgctctattcatacatgcctcatatttatagggaaaagaggattgttttacacgtttcaccttccagtttgccttgcggcgacgaggcttggctggttgtttatgcctctgtatagggtgagttgtatcatacatcaggttatcggaaatcagaaagtagattcagttcctttctgctttatgttgtctgcccttctattttgagctagttttgaagtggcatttcattgtaccagacattcctaacaattgtttctacaacttttcgctc

SEQ ID NO: 25438 - DNA, 866 bp, Zea mays
  Clone ID: LIB3900-006-A12_FLI
gttcttgcctgccgcgcgcgcagcttgaggtcacatacttcaaccatggaggcatccttccctacatggtccgcaacctggcagcacagatgaaataagttaaaaaagcaagctagcttattggtgcggtgggaataaattaaaaaggttggagtctcttgatcatatttgtgctgactgactctttgatctgtgcatattgatgctctttctgatgcaaaaatatccattggcatggtgtactatcatttttctatgaaaatatatatgacatgtttcaaatacaaataatcacacattatagaaacaacgtcaatctatatactattccatctatccatggtcaaagctattgaagtttgactgccaagaattctaattaaaaccatctcgctcgatacattttggatgtgcaaaagctcacatattctcttctattgatacacatgttggatatttgctatctaggtactcagtgccccacgtatttgacgtatgtctgtaaataagtggcacattcgagcgctcttcgctctgccattgaggtatgccgtatgcatgtatattctaaaataaaaataaaaataaaaatttaaatcaccatatgttgtatgcttaataataatatgtttttctgaataacaagatattattgttctttgttgtggtgcaggtggatcgaagctgccacatattttctccgcaggacatcggcacgaattttgtcttagcaaaccagttaattttgtactctttagattctttaattggttccatgctctctttggtacttttcatgtcagtttgctttgcaaacattatcagcgtgcccttgtagatttcgtaatggttatatgtatatgccc

SEQ ID NO: 25439 - DNA, 873 bp, Zea mays
  Clone ID: LIB3900-007-A3_FLI
gcggtctctccgccgcctcccagatccggcggccatggcaaggaacccgggctgcaccgtcttcataggtaacttggatgacaaggttcctgagagggttctgtatgaaattcttattcaggtaggtcgtgttgtagacctacacatacctcgtgacaaggaaactagccgaccaaaaggctatgcttttgctgagtatgaaacagaggagattgcccaatatgctgttaagctattttctggtcttgttcgacttcataataaaacgcttagatttgcgatctctgggcaagacaaaccctcattaaatggcaatatccctgtaactcctaggttaaactctgtaccacagccaaagcctcatcaacctatgaggtctagtgatactcctttgccacagcatacagcagtgaatggcaggagtgccgggtatggtatcccaccaaatcattcatacgacacgcacactcaagcactgtcgagtgggttaccgaatagaggactaagcaacgcacaagcattcgtgatccgcccaattggctctcagggtgatcaagttataccgtttctgttacctacctgctgtctggtatttgcaagttgacctgttgtcatttccaagttcattagcgtggaagctggtgctgctggattttcacttaactggtgacttatctagatattgcattgtcataatgctacttcatcctagtcagaaaccagctggctttctgagtggcaaaccagcaggataccacaaatccaccatattgttggtcaagatgggttagatgcacatttctcatcgggttgtatctggaagccccatgactgcgattatgatgagctcatatatctactgaccgttgtatc

SEQ ID NO: 25440 - DNA, 1111 bp, Zea mays
  Clone ID: LIB3900-007-D8_FLI
aggtgagaagctagaggagctagagcgagagagtcccatcgcaacacacaaagggaagaggaagaggaaggcgaggacgatgggcttgctcctgctgctccacgtcctcctcgtcgcggcggcggcgacagctcctgcagccgacgcatggggcaaggaggggcactacatggtgtgcaagatcgctgagagctttctgacgaaagaggcatcgacggcggtgaaggagctgctgccggggtgggccggcggcgagctcgcggagacgtgctcttgggcggacacgcagaggttccggtaccgctggtccagcccgctgcacttcgccgacacgccaggggactgcgagttcgactacgcccgggactgccacaacaccaaaggggagaagaacatgtgcgtggtcggagccatcaacaactacacggcggcgctgaaagactcatcaagtccatttgatccgacggagagcttgatgttcctggcgcacttcgtcggcgacgtccaccagcctctccactgcggccacaccgacgacctcggcggcaacaccatcgtcgtccactggtaccgaaggaagaccaacctgcaccacgtctgggacgtgaacgtcatcgagacggccatgaaggacttctacggcaacgatcagagcaccatgatacaggccatccagcagaacatcacggaggagtgggctgatgaggagaagaagtgggaggcctgccgtagccggacaaagacctgtgctgacaagtacgctgcagagagcgcgaagctggcctgcacggcgtacgagggtgtcgaccaagactccaccttggaagatgactacttcttcgccgcgctgccggtggttcagaagaggatcgcgcaagggggcgtcaggctggccgcgatcctcaacaggatatttggtgggaacagcagatcaggcttcagagcagttgattgatcgatccatatccataccagtagtagatatcaaacgattggacatgtggaggagtgggtggggaggggcagacgtgatctgccatctgaattagaataataagaggtatcttgttgccgtctggcaatattgtaacttcagtcttcagtaaccact

SEQ ID NO: 25441 - DNA, 1014 bp, Zea mays
  Clone ID: LIB3900-007-F12_FLI
gctgcttcgagagagccgaggacggccacgccgtgtaccacgtgcacaccgtcgggtcgcgcgagctcaggtgcgtcggagaacctcccgcgccgtgggcgtccggggatatggtaatggcgatgccgatgatggtgtaccttcacccgcacgtcgtggcagacagcaggatctactggcagccggtaaagctgcccgtcggcaacggcaaggtcaacaacatgctcgtgttcgacacaatgaccgagtccttccagcaactgctgtcgcccgtggagggcccctttcttgaactgtttcagatgaacagcggcgcccttggattgtaccactgccgcagcggcaaggttgatctttgggtgttacaggatcacgggagctggtcctggtcgatgaaccaccggatcaaattggacgtgatgtttttctccctgctgccggtgctggacccggaaggagatgtgctagtgctttctaaaagaggggaaacaggcatcctgtggcaacatctgcatcacatttctggtgtcaatggcagtttgctggccctgtatcaatggagcgcttatctgaagcttagcaggcataggctcaaagaaagtctagtccaccatgacttcttctcgatggaaggtaatgagggtggtgtggatgaaaaaccattgttcgatggcttgtcaactgtggcattgcttcgtgatgataattctgagccacattgagaaacaaaggtattactcaagctgtttcatctcatcaggatggagtcactcctgcctagtaataacagcactgcagattagtaataacctgaaactatacctcgagtctgatttttcccttttcacatgagtcataaacactgttatgactggtattttattttcccttttcacgtgagtcatgaacactgttattactggtattttattttccattttcacatgagtcatgaacactgttatgagtggtatgtatgtgcgctggaaaacgggctatggcggtgttggtctc

SEQ ID NO: 25442 - DNA, 739 bp, Zea mays
  Clone ID: LIB3900-007-F2_FLI
cgacgagcacccttacctgcccaagcatattctctaccggcagaaagaacagttcagtgacggcgttggctacaactggatcgatggtctcaaatccttcactgaacagcaggtgacggatgagatgatgaacaacgccgcccagatgttcccctacaacacgcccgtcaacaaggaggcctactactaccggatgatattcgagaggctcttccctcaggactcggcgagggagacggtgccgtggggcccgagcatcgcctgcagcacgcccgcggccatcgagtgggtggagcagtggaaggcctccaacgacccctccggccgcttcatctcctcccacgactccgccgccaccgaccacaccggcggtaagccggcggtggccaacggcggcggccacggcgccgcgaacggcacggtcaacggcaaggacgtcgcagtcgcgatcgcggtctgacgagagtacgtgctcgcgcacctccctgctagcttctaccgggctgcagcctgcagcatgcactgtgcgagcacagccgatcagcgccaataaactggaggataagaacgactggtaggtgtgtgtgtgtgtcgtgcgtgcccaccggccatatcccggtgcggcagcacgtgctattgttacgtgttgtactgccgccagcgtacgtgtctgtgtgtctcgatcatatctgtacgtttttagatttagaagaaaaaaaaaaggcatgtccgtgtctgt

SEQ ID NO: 25443 - DNA, 778 bp, Zea mays
  Clone ID: LIB3900-007-F3_FLI
caccactcccaagccagtacccacagtcctacgagcagtcgcacgcaagtgtcaagagacaaaacggtcgacatggctcgcacgcaatctgccgtagcggtcgccgtggtggccgcggtgctgctgctggcagcggcggcgacgacctcggaggccgccatcacctgcgggcaggtgagctccgccatcgcgccctgcctctcctacgcccgcggcacggggtccggcccctccgcgtcctgctgtagcggcgtcaggaacctcaagagcgccgccagcaccgccgccgacaggcgcgccgcctgcaactgcctcaagaacgccgccaggggcgtcagcggcctcaacgccggcaacgccgccagcatcccctccaagtgcggcgtcagcatcccctacaccatcagcacctccaccgactgctccagggtgaactaaaacctagaccacgcgcgacgacggccgcctgatcgatcgaccaaccattccgccgtcgccgccggccggatcatcgatcgtcgtcatgatgatatctatcaatctacgcgtgatgatcgatggctacttgtctactgctatgtactactaaataaaatctctccgtgtgtgcacgtacgcttgcatgtgcatggtagcatgtatgtacgacgtcgtccatgtatgtgtgtgtgacgtgtgagacagagagagagagagagagagagagagacaggatcgatcgagagacggtcatgtccttttggctgtttggtttattcatatcacaacttttgagtgt

SEQ ID NO: 25444 - DNA, 879 bp, Zea mays
  Clone ID: LIB3900-008-A3_FLI
caagctgctctcgtccctagaaataaagcagctcctccgcggggcggcgaactactacccatcgccaaaaccctagccccgatccggtcgaggagcactacttcttggcatggcgggcacccctagccaggcaagcctcctgctccagaagcagctcaaggatcttgcgaagaaccccgtggatgggttctccgcagggcttgtagacgatagcaacgtcttcgagtggcaggtcaccatcatcggcccgcccgacaccctatatgatggaggctacttcaatgcaataatgaccttcccccagaactatcccaacagcccgccatcagtaagatttacttctgggatgtggcatccgaatgtttatccggatgggcgtgtttgcatttctattcttcatccacctggtgaagatcccagtggttatgagcttgcaagcgaacggtggacaccagtgcacacggttgaaagtatagttctgagcatcatttcaatgctctctagtccgaatgacgagtctccagcaaatattgaagctgccaaggattggagagagaagcgggatgagttcaagaagaaggttaggcaatgtgtccgcaggtctcaggaaatgctgtgaaggaggaacatgggggagttgaatgagtctgcaatcggtgtgctgcaattcacaaccaattatctcatgtcagcattcttttgctttcccctgtatattttttcaaccgatgtcactcgtatagtggtgttgggtctctttagacaaactcgggacggttgcttatcctaaaaattcgattgtactgcgtggcatgaaatgatcgattcgaagaatattttgaacatgctgccacctaatcaaaaaatttcatgtttaac

SEQ ID NO: 25445 - DNA, 1810 bp, Zea mays
  Clone ID: LIB3900-008-H6_FLI
cggcccggcagcccccaagtcccatcgccgagcagaaagtcaggaacagaactcaggcgttggcgattggcatctccctcccctaagccatggctaccgggcggcccgtacgactcgtgctggatgcctccctcctcctcgacccctcctccaccagggaggcggcggcggtggcgctgcggcccggggtagaggagttgctgcggcggttgcgctactccaacctgagcgtggcaatctgctatgcagagggcatgccaactaatgagtcagactttcttgaaaaggtcgcaagctcacacttgtttggatctatagtacttcttgcaaaaagtgggaatctttctccaattgaattaatgatagaatggagccgaacaagtttttgtttttatgcgacttcaagagttgacaaaggtttaatttctgagctccagaatcagaactggagagttctttctgtagctaatgaatgtagcatagaggttcctggtgttttaaatgttcaaaggcttcaggagttgcttctcaccttggctactctaatgaaaaaggaactttgtggctcatctgttctggtgattggatatataatgaaaaaatcccgtgaggaagacttcgcaaagagaggagcatttcccatatatcctagtaagggcagtcttatctttgttcccctctctttcgaaattccattaagtttgcaactgcaagaagttgatatggtcctccacaaaataactgatgagattgtcaagatcgatccaaactgctccattgattttccaaaagggatttcattttctgcaggaatgtctgaaattataagatttgtggaagagcaccctgatttttgtatcatggacccatttaaaaacatttacccattgcttgaccgtcttcaaatccaaaaaatccttgtccggttgcaagaacttggcactgaaggaaagccaaaacttcgagcaccgtattcttgcaaggttgacagttttcataatggtgaattggataagcatctagtagaagctaatttatccttcccactcattgtgaagccacaagtcgcttgtggagtcgctgatgcccacaatatggcactggtttttcagattgaagaatttagcaacctcagtgtgccccttcctgctgtgctacaggaatacgtggatcacggatccaagattttcaagttctatgtgatcggagacaaggttttctacgccgttagagactcaatgcccaacgcgcgcttcctgaagccgtcgtcaggaggtgaagctcttacatttaatagtttgaagactcttccggtggctacgaatgagcagcgaccgcagaccggcgcggaagatggcaagctgttagatgccgatctggtagaagaggccgcaaaattcctgaaggggctgcttgggcttacagtatttggattcgatgtcgtcgtccaagaaggcaccggagaccatgtcatagtggacctgaactacctgccgtcgttcaaagaggttcccgactcggaggcggtgcctgcgttctgggacgcggtcaggcaggcgtacgagtcgacgcgcgggaatgcgaatgcccagggttaataaggtgtcaaggctcttcccgaataagtgaatctacgtggagtggagcgcagcagagagaggagagccgcagtggttgtaatggttctggagcagactcggagtaatgttcggctgtagctgtgggaataagcgaaatcgggagcggaataataattaacaacaatccgccatgtttagctgtcgatctcgtcgccgtggtgtattctgtc

SEQ ID NO: 25446 - DNA, 1063 bp, Zea mays
  Clone ID: LIB3900-009-B5_FLI
cggatctaatcggggcgggcgcgatggctgggcagaaccagcggctcaacgtcgtgccgacggtgacgatgctcggcgtcatgaaggcccggctcgtcggcgcgacccgcggccacgcgctgctgaagaagaagtccgacgcgctgacggtccagttccgcgccatcctcaagaagatcgtcgccgccaaggagtcgatgggcgagacgatgcgcgcctcctccttctccctcgccgaggccaagtacgtcgctggcgacggcgtccgccacgtcatcctccagtccgtccgcgcggcatccgtccgcgtccgctcccaccaggagaacgtggccggggtcaagctccccaagttcacccacttcgtcgaccccgccgcggcctccggggccccctccaacgcgtccccgagcctcacgggcctggcccgcggcgggcagcaggtcgccgcctgccgctccgcgcacgtcaaggccatcgaggtgctcgtcgagctcgcctctctgcagacctccttcctcacgctcgacgaggccatcaagaccaccaaccgccgcgtcaacgcgctcgagaacgtcgtcaagcccaggatcgagaacaccatcagctacatcaagggggagctcgacgagctcgagcgcgaggacttcttcaggctcaagaagatccagggctacaagaagagggagatcgagcgccagatggccgccgccaggctatttgcggaggaacagcttgccgaggatctcgcgcttaagaggggtatctccgtgggggctgcggcaaacctgctggttgctggtggggagaaggacgacgacatcatcttctgaccactccttccatggccatccagtcattcaatcgtggcagaaacaataagttgatgctggagctccagaattgtatctgtttatagaatgatggagatttttgattcagtaagtagtctggagtctagccatccgagaccctcaataatctgtacctggaaaccaaacagtgccaaataacttttacggagcgttatgtgcagctcatgtagaaaattcaattggaccgt

SEQ ID NO: 25447 - DNA, 567 bp, Zea mays
  Clone ID: LIB3900-009-G8_FLI
gcaaggagctcgatcgacagcaacagcggccttcatgaactccagcttcatcgggctcaagcccgctgcggcagcagcccaggccaccgcggctgcctcatcgccgatgaagcagcaggtgcaggtcgcgcccgagggccgccgcgccgcgctgctcggcctggcggccgtcttcgccgtcaccgccaccacggccggatcagccaaagctggggttttcgacgagtacctcgagaagagcaaggctaacaaggagctgaacgacaagaagaggcttgccaccagcgctgccaactttgcgcgcgcctacacagtcgagttcggcagctgccagttcccctacaacttcactgggtgccaggacctcgccaagcagaagaaagtccccttcctcagcgacgacctcgagatcgagtgcgaggggaaggagaagttcaagtgcggctccaacgtcttctggaagtggtgaagcagcgcgcgtctgatatgacggagacctgtgtatctagatgatgcatgtgcccagactgcaggaaaaatgatatcaaatttgactgctattctgtc

SEQ ID NO: 25448 - DNA, 853 bp, Zea mays
  Clone ID: LIB3900-011-G6_FLI
cgtcgcgctcggcgccgcgagggggctggagtacctgcacgaggcggcggcgccgcgcatcctccaccgcgacatcaagtccaccaacatcctcctggacgacaagttcagagccaagatcactgacctcggcatggccaagtgcctgatgaacgacggcgtgaccagctgctcgagctccccggcgcggatgctgggcacgttcggctacttcgcaccggagtacgccatcgtgggcaaggcgtcgctcaagtccgacgtcttcagcttcggcgtcgttgtgctggagctcatcaccggccggcagcccatccacaagtcgtcgtcgacgagggccgacgagagcctcgtactctgggcgacgtcgcggctgcgggacagcgggctggtggtcacggagctgccggacccgacgctgcagggcaagttcccggcggaggagatgcagatcatggcgcacctggcgcgggagtgcctgcagtgggaccccgaggccaggcccaccatgacggaggtcgtgcacatcctcgccaccatcgcaccactccagcacggcgccaagcgtcggaaccttcccatcgccaccgccttcaacctcacgccatcgccgcacgtcgggcggtgtgacccggagcctaaagacgacgacatcgagaggcagatgcagcagcaggagtgctcgccgacgacggctgtccagtggcaacaacaacaagcgcgctgcacccacgcgccaacgggccgcgcgtcgtggcccggcgacagggggaacgttgtgagcagaggcgcggcggtgtcgggcgagctggtgaacgggacggtgctgatgaacccccacgggcggggcagctgg

SEQ ID NO: 25449 - DNA, 982 bp, Zea mays
  Clone ID: LIB3900-012-C1_FLI
tgccgttcatgcacggcatggggctcatctccgacgagctgtacgaggcggcgaagcagggctgcggcggcgacttctacgtggcgccggaccccaccaacgcgcggtgcgccagcgcgatgatggccatcaacatggtgaccttcgccgtgaaccccgtgcacatcctggagcccttctgcggcgcggccgtgcgggccggcggcggcagcatcttccagggctacggcggcggcgcgaggcggtcgatgctggtgcgggacgacgtccgccacccgggcttcttcgccaagcagcggctgggcctgcccgtggagtgcagggacaacgggtaccggctgtcctacatctgggccgacgacccggaggtgagggaggcgctcggcatcctcgagggttccatcgggtcgtggagccggtgcaccatgctgtcgcactacaggcacgacgtgaccaccgtcatcccctaccatgtcaacctcaccaaggcaggatacagggcgcttgtgtacaacggcgatcatgacctagacatgaccttcgtgggcacccaagagtggatcagaagcatcggctaccccatcgtcagcgactggagaccatggttcgccaaccgacaggtcgcagggttcacaagaacatacgcccacaaccttactttcgccactgtgaagggaggaggacacacagctccggagtacaggccgaaagagtgtcaggccatgttggatcgatggacatcagcagcaggccaactctgatgaatatggtgaccacggaattaacgaagtactacagctgtagtcgtcgttggtgtctctccgtcgaattactcatatttagtagtaataataataataataagacgggctttaatttgattcatagctacttagctagggagaggcaggctgcttgtagtacttttggctatgatccatgccagctccgaacatgagcatgtctcacgcgtgtggcttcc

SEQ ID NO: 25450 - DNA, 929 bp, Triticum aestivum
  Clone ID: LIB3908-016-A6_FLI
ctacgaccaggtcgtgcacgacgtggacctccagaagctcccggtgaggttcgccatggacagggcggggctggtcggcgccgacgggcccacccactgcggggccttcgacgtggcgttcatggcgtgcctacccaacatggtcgtcatggccccgtccgacgaggccgagctgctgaacatggtggccaccgccgcggccatcgacgaccgcccctcgtgcttccgctatccgaggggcaacggcatcggcgtcccgttgccggaaaactacaaaggcaccgccatcgaggtcggcaaaggcaggatcatgatcgagggcgagagggtggcgctgctggggtacgggtcggcggtgcagtactgcatggccgcctcgtccatcgtggcgcaccacggcctcagggtcaccgtcgccgacgccaggttctgcaagccgttggaccacgccctcatcaggagcctcgccaagtcccacgaggtgatcatcaccgtcgaggaaggctccatcggcggcttcggttcacacgtggctcagttcatggccctggatggccttctggacggcaaacttaagtggcggccggtggtgcttcccgacaagtacatcgaccatggatcaccggccgatcagctggtggaagccgggctgacgccgtcgcacatcgccgcgacggtgttcaacatcctggggcaggcaagagaggccctcgccatcatgacggtgcagaatgcctagagccagtgtgctgcctcctatagagaaccttgtacattttggtcgttaggtgattcagagagattagtcggcgtcagaaaattaaatgatcctcatcaagggaaacgttggtagtttttcgttctttggtgcactgacgttgatgtacatggttaattgttcgtggagtggacacatacgttgtctttgt

SEQ ID NO: 25451 - DNA, 699 bp, Triticum aestivum
  Clone ID: LIB3908-021-G6_FLI
aaacttgtgcacataactattgggatggtattcttgctcttttggcctcttttcagtgcgggaaggtatgctcctttctttgctgcacttgcaccagggattaatattataaggatgcttctattggggctaggaataatgaaaaatgaagcgatggtcaaatcaatgagccgatctggagaccacagggaacttctcaagggaccactgtattatgccactactataactttggccacttctgtattgtggagaacatccccaattgctatagcacttgtctgcaacttatgcgctggagatggtatagcagacgtagttgggagacgctttggaaaagaaaagcttccatacaaccccaacaagtcatatgcaggaagcatagcgatggctgtcgctggtttcttggcttcaattgggtacatgcattacttccacagtttcggtctcatggagaaaagctggtacatgaccttgggctttcttgtggtctccgtagccgccgcacttgtcgagtcacaccccatcagcactgaactggatgacaatttaaccgttcccttgacatcattcctagtcggtagcctcattctctgatgtttagcgccaaaggaagaatactgtggtcattcttttcaccacgtgaacttccgacatgtaacaagattatcgacaagcatgcgatatttttgttgttgt

SEQ ID NO: 25452 - DNA, 1132 bp, Triticum aestivum
  Clone ID: LIB3910-027-D8_FLI
cgatgatcaaggccgagccggagctccgtggccagctacgcggaggcggcggcatgctgcagcagcgctgcgactcgtgccggtcggcgccgtgcgcgttctactgccgcgccgactcggcggcgctctgcgccgcgtgcgacgcggacgtgcactcggccaacacgctggccagccgccaccgccgcgttccgatgggcgccgtggccccggcctcgcctgccggagggcccttcgtcgtccgccccggcggcgtcaactcctcctggcccatccgcgagggccggaggtcctactacgacgacggcgagggagaggaggaggaggaggaggaggcgacgtcgtggctgctgctcgacccgctccggggctcggagggtgacgcgccggctttcggcgacgcgctcgtcgctgacttccttgacctcggacgagcaggcgagaaggacgcgtcgagcaaggagtaccgcggccacggtgtcgagagccacgagggcagccacgagctcgtcgtgcccggcgagccggtggcgcagctgcatgagcggcagggcttcacggcggagatgtcgtacgatgcacaaaattctaaccatgggtacggatttggcgcaacattccaacgcagcctttcaatgtcatcatcaccggacaacagtagcaccgttcaggatgtgaccagctcgtacatgaggagcagcgagagcagcgtcgacctcttctcagcggcggcgcacatgtcgccgcagttcatgggcatggccatggacagggaggccagggtgcaccggtacagggagaagaggaagatgaggcggttcgagaagaccatcaggtacgcgtcgcggaaggcctacgccgagaccaggccacggatcaaggggcggttcgccaagcgcgccgacgccgacctcgaggtggaccagtacttctccgcagccgcactgtccgactccagctgcggcgttgtgcccactttctaggccggctcggtggagagaccatgagcgttcctccttccatggtcgatcgacgcctacatgttggttggctctccttaatctgccaaatattcagaaatttattggaggcgtcaaagcttcacctgtaaatatatggaaagatgccggat

SEQ ID NO: 25453 - DNA, 1177 bp, Zea mays
  Clone ID: LIB3911-001-B9_FLI
gcttctggaaactcgctggcccgatggcatcggaggccgcgattgctcgtgcgcagtgcctccttcgcttccgccgctggtcgccactgccgcttcttcctctcccttcccctcccgctaccacacgagcagcttcctgccgccgcagcgtacgcatggcctcgtcggacggctctgccgcggccctgcccagcgctaccgtcgatgtgcccggcgccggggcccctgtcctcgtcgtgggcgcgccggggctccccgaggctgacttcaggaacgcggtggagtcgtcgctgttcaagcagtggctgcggaacctgcagtcggagaagggcgtcctcacctacgggaggctgagcctcacgcgggttctcatccagggcgttgacatgttcgggaaacgggtgggctttctcaagttcaaggctgatatcgtggacgaggaaaccaaaaccaaggttccaggaattgtctttgcaagagggcccgcggttgctgtgttgattcttttggagtcgaatggagaaacatatgctgtgcttaccgaacaggttagagttcctattggaaaattcctgttggagctgcctgctgggatgctagatgacgaaaaaggtgattttgttggcaccgcagtccgtgaggtggaagaagagactggtataaagctgaatatagaagacatggttgatcttacggcactgctggaccctgctactggaggtcgaatgctaccatcaccgggtggctgcgacgaagagattggcctgttcctgtacaggggccgcgttgacgaggagaccataagatcgctccaggggaaggaaaccgggctgcgcgaccacggtgagctgatcaagctgcgcgtggttccgtacagcgagctctggcggtcgaccggcgacgcgaaagcactctccgcgatagccctgtacgagatggccaagagggaaggcctgctgccgcagccgacgccgtcggccaacttgtgaagacctgctagcactttaaaacagtggtggccgtcatgcctgtaaaatggaaggaggaacgtcactcgcgaaaccaaatcatatatatctctatctcttcgtttggtataacgcgcttaagcttgtctgtttgtgttatgtatacatatactaataatttaaaaataaaagtataatcgtgtttaaat

SEQ ID NO: 25454 - DNA, 642 bp, Zea mays
  Clone ID: LIB3911-001-E1_FLI
cgccatgggagtcgggagctcagatcgggagggacggggtaggtagggttcacgagcgagcgagggtgctgccgtcgggcgccggtgtccaagtagcaagaggagagatggacgcgttcctacagagactcaagcggttggacgcgtaccccaaggtgaacgaggacttctacaagtggacgctctttggcggcatcgtcacgctcgtcgccgccgtcgtcatgttgcttctcttcatctccgagaccaggtcatatttttattcagcaacagagactaagttagttgtggacacatcaagaagagaaaggctacgagtaaatgttagtactttttaaacgaaataaactgtctgtaggctattggctgatattggtgtttcttggggaaaagagtacgagcactctcaataatgtaactcagcaaatgtcatttgtacatatatattagacacctccagctaccttgccaacgcaagaacgagaagacgagttagactttgtcaaaaccctcttcactagtggaggtatcgaccatcactcgtcactgtaacccgatggtgatcggcaaccatgagcttccatgttattgtgttctgatacttgagacgtttattatgattatgtatgatatattgtctct

SEQ ID NO: 25455 - DNA, 797 bp, Zea mays
  Clone ID: LIB3911-002-A11_FLI
ccagcttctgctctctccctcctcatctctgctctgctctggaccgttaactctccagctccccctcgctccgttcccttccgcccaaatcactgggaccaccaccgccttcttcaagatcggcgggcgggcaccggccggcgatgacatccaccgtcaccacaaccgttgggtgcggggggctccccgtccgcccgttgtcgacagcgaccagaggacgcccacgcagatgcgccgtccgagcccaggccgcgggagcggatgcctccaatgataagtcagtggaggtcatgcgcaagttctccgagcagtacgcccgccgctccaacactttcttctgcgccgacaagacagtcactgccgtcgtcatcaagggatactcttggagctcctctatgcccttgcattatgatgacaaagctgcggaggtagcacaaggattttggaattgcccatgcgtccccatgcgtgagaggaaggaatgccactgtatgctttttcttactcccgataatgactttgctgggaaggatcaggttatctccttcgaggagatcaaagaggcgacatcgaagttctaagcccttgtatttgtcacggagtgtttacttgacagctaattttttatatgtatatgtacttaagtagcatctataagatatgccatcaggaaaattttcataaaatgtgcagtaaacaacacttcgcaaggctgccgatcatatgagccgccttcggcctttttattgtatctgggctccatttcgtgaattaaacctacgcaatttgccgctctt

SEQ ID NO: 25456 - DNA, 1419 bp, Zea mays
  Clone ID: LIB3911-002-C10_FLI
ggacacgaaggtgtgtggggtcatgatctatgccaagctcgggcgctagggctggggtgtacgggtgttgatgtttatgcaaaaactacagcggaaataagccatgaggcgtgctctgtgtcacaggatcacgtgctatggtaggaccgggccccggattttgtctacgccattgattccagcgatttggccggggtcagtagctaacgttccatcccagaaaaccccatcttatcataggaagtctaccagttttgccaccaaggtcacaccatccaccacggccatggagtccggcgcagacgaggtggcgttcgagtccccggcacatttccgcatctacaagagcgggaggatcgagcgcctgaaccggcccccggtccttcccgccggcctcgacgaggccaccggtgtcacctcaaaggacgtcgtcctggacgccggcaccggcctttccgtacgcatctacctccccaagctccaggaaccatccaagaagctcccggtcctcgtctacttccacggcggcgcgttcctcctcgagtcggccggctctgccacgtaccacacctacgtcaacccactcgcagccgccgcgggcgtcctggtggtgtccgtggactaccgcctggcaccggagcacccggtcccggcggcctacgaggactcgtgggccgcgctccagtgggtgacgtcggcgcaggacgagtggatcgtcgagcacggcgacacggcgcggctcttcctcgccggcgacagcgccggcgcaaacatcgtgcacgacatgctgatgcgggcgtccggcgccggcgggccgcgcgtcgagggcgccatcctgctccacccgtggttcggcgggaacgcgcccatcgagggcgagccggagggtgccgcagcggccaccgctgggctctggacctacgcgtgcccgggcgcggtcggcggcgccgacgacccgaggatgaaccctctcgcgccgggcgcgccgccgctggagaggctcgggtgcgcgaggatgctggtgtgcgccgggaagaaggacgcgctctacgtgagggaccgcgcgtactatgaagccgtggcggccagcgcgtggcccggggacgtggcgtggctcgagtccgaaggagaggagcacgtcttcttcctcccgaagcccgagtgcgagaacgccaagctgctcatggaccgcgtcgtggccttcattgccggggcctgacttgctctcttgtggccttgttggcgcggcaccgcgcgacgcagcatcaggtcgccattgaagattgaagttgtggacttgtgggcaagtttctctcgctgaatattggtcttgtctaaatttttttctggtacaagtgtggtactgaagtcttgaaactgattttttaataagcaaactataagtccacattattcatt

SEQ ID NO: 25457 - DNA, 1095 bp, Zea mays
  Clone ID: LIB3911-002-F1_FLI
gccgccgcgctgtctagcgggtcgccgccgctccaagaagcatgccccgcctattgcttccagctccatcgcctcgcccctgtctgaacgactcggtgcgccgtccaccactctccaaatatcgattcttcctgcccaggactcggaggcggccaagtccgcggcttggcgtgcgaatggcggagatgaccaaggttgggagcgccggggaaccggccgaggttggggtttccatggagagtgacccgattgtgggaggggaggcgccgtcccgcccggggtgggaagcgagccggtgggcgcccgtggaggctgcgctgaatcggatgagtaaatggctggtggctggttttcttgcttttgcagctatttggaagcgtgatgctgaaattatgtggtttttgctgggtgcggttggcaactctctgctttcgatggttcttaaaaagatgctaaaccatgaaagacccgcaccagctttgcggtctggccctgggatgccgtcgtcccacgcacagtccatattctatgctgcgaccatcctggctctttcattgtactactggcttgggacaaattatctgaccatgattcttgggcctgcaactatgtcagtggctgcctatctgtcttggctacgggtgtctcggcgccttcatacactaaaccaggtcatggcgggagctgttgtaggatctgtcgtcggtgctctatggtttgtgctctggcattcgcttgtgcaggaggcttttgcttcttctctgctggtcaggattgcagtcgttcttggatcatcagcattttgtgttggctttgtcatctacatgattcgtcactggctcaaggatgagtaatgtacttcttagccgcaatgggagatcgactgataggcacggtgcgtttggatgagtgaatccgttccaattgttatcagaatcgcttgaaatggtgtcaaatgggttgtgagtggagcgattcccgagtgaaaccatttttaattaaaattcaatctagtagttaaatgatttcacgaagtgattctagttcgtgatcagaaacatttcaagaatttagatccaaaatgtttctataccc

SEQ ID NO: 25458 - DNA, 807 bp, Zea mays
  Clone ID: LIB3911-002-G5_FLI
ctccgtggcgccatcctccagcgcccccacctcacgccccgccccgacgcccgccgcgcgccaacgacgaggcgccgcgccgtgcctgcaaagatctgctgcatcggatgggtgattcttcttcttgtctctgactctgtggtttacccgagcacggtgcacggccacttatccgtccggctggccgcccgtctcccgtttcctctttcctgaccacgatcgcctttggggctgggctgggcaggaccccgagggcatcctgggcgcgccgcagggcggccacatcgcgcgcctcgagttccgccgccgcctcgagagggactccgaggcgcgcgaggccttcgagcgccaggtgcgcgaggagaaggagcggcgccgcagcgagcgcgaggcgcgggtgatcccggacacggacgccggcctcgtcgagttcttcctcgacaccgacgcgcgcgagatcgagatcgagatcggcaggctgcggcccaggctcggccaggacttcttcggccacgtctcgcgcgagatagcgcagatcaaatttgcagtcaccaggacagcggagatggaagacagactgatcgagctggaggcgatgcagaaggttcttcttgagggagttgaggcgtacgacaagttgcagaacgaccttgttacagcgaaagaacggctcatgaagattctgcagtcaagtgacagaaaatcgacactgctggaaatggtggagcggaacgagctcaatatatccatactaacacttctcgatgagaacattgcgagcgcgaagacgagtaatcaggatgaggc

SEQ ID NO: 25459 - DNA, 791 bp, Zea mays
  Clone ID: LIB3912-001-B1_FLI
caaggcgaacgcgagagccgaccgtctcagtgtgcgcgcgagaaagaggaggaggaagaagaagaatgtatccggccaagcccaccgtcgccaccgccagcgagccggtaaccgggatggcggcgccgccggtgaccggcatccccatcagcagccccggccccgccgtcgcggccagccagtggtcctcgggcctctgcgcctgcttcgacgactgcggcctctgctgcatgacgtgctggtgcccgtgcgtgacgttcgggcggatcgcggaggtcgtggaccgcggcgcgacgtcgtgcgcggctgcgggggccatctacacgctgctggcctgcttcacggggttccagtgccactggatctactcctgcacgtaccgctccaagatgcgcgcgcagctggggctccccgacgtcggctgctgcgactgctgcgtccacttctgctgcgagccgtgcgcgctctgccagcagtacagggagctcagggcccgcggcttggaccccgcgctcggctgggacgtcaacgcccagaaggcggccaataataacgccggcgccggcatgacgatgtacccgccgacggcgcaggggatgggccgctagttacgctaccagctccatctgtaaactcatatgttgttgtgttgtgtcagccagatcatcgcgtacgtacgggtatacttgtgatatgtaatgtcagggaccggtatgcccatgtgtttcaagatatttcatgttcaagtcctttctgtccgctcactatccgaatgaaaaccattttccttg

SEQ ID NO: 25460 - DNA, 1595 bp, Zea mays
  Clone ID: LIB3912-001-F4_FLI
tgtctgtgtgcgagcgcaagagaaagggagtcagagagagagagagagggaggagaccttgcagaggagcgaagcaagcaaggtgggaaagaggcagcagcaagggcggcgggctgccggaaggggaacatgctccctcctcatctcacagagaatggcgcggtgatgattcagtttggccatcagatgcctgattacgactccccggctacccagtcaaccagtgagacgagccatcaagaagcgtctggaatgagcgaagggagcctcaacgagcataataatgaccattcaggcaaccttgatgggtactcgaagagtgacgaaaacaagatgatgtcagcgttatccctgggcaatccggaaacagcttacgcacataatccgaagcctgaccgtactcagtccttcgccatatcatacccatatgccgatccatactacggtggcgcggtggcagcagcttatggcccgcatgctatcgtaagtgatctccatgcgtccagcctgttgtttcactacttgctgccggtgctagatgatgccctttgtccactttgaagacactttgctaggcaatgcggtcagtactggtgctttctttttgtttttcctgtgcgttattgcgtttagtggtgttcttcatttgctagcacagcatgcctatcggctgagacagcacccagcagcattgccatcgatttaccccttcaactcattcgtctcgtcagatcttactcctgctatgttattgaagcataggcgttttttacgtttcacgcctgcatcattgccattctcctggtcctgggtaaagcggcttgttttttttcttcttctgataattacaaattaatcagagtctcgtattttgcctggtaaacaaatcgagcagatgcaccctcagctggttggcatggttccgtcctctcgagtgccactgccgatcgagccagccgctgaagagcccatctatgtcaacgcgaagcagtaccacgctattctccggaggagacagctccgtgcaaagctagaggcggaaaacaagctcgtgaaaagccgcaagccgtacctccacgagtctcggcacctgcacgcgatgaagagagctcggggaacaggcgggcggttcctgaacacgaagcagcagccggagtcccccggcagcggcggctcctcggacgcgcaacgcgtgcccgcgaccgcgagcggcggcctgttcacgaagcatgagcacagcctgccgcccggcggtcgccaccactatcacgcgagagggggcggtgagtagggagccccgacactggcaactcatccttggcttatcagcgattcgactcggctctccctcgtctgaaactgaactctctgcaactactgtaactgtaactaaactgggtgtgcccggattggcggtcgttctgttctactactagtacctgctacgcgtcgttgggttgggtctggactagagagcgtgctggttctttgatgaacttggctggacttgagggtgttgactagcgcgaagctgagttccatgtaaaacttttgcttcaagaccgatgactggcggcataataagtagcagtaat

SEQ ID NO: 25461 - DNA, 899 bp, Zea mays
  Clone ID: LIB3912-002-C6_FLI
caccgaattccctgcgattcctctcccctcgcctcctcgtctccccctaggggatcgtcggagaggaatcgcaaagagggccgtctcatccgagttaaggaagccatggagcacaaggaggctgggtgccaggcccccgagggacccatcctctgcatcaataactgtggcttcttcggcagcgcggcgaccatgaacatgtgctccaagtgccacaaggagatgataacgaagcaggatcaggccaagctggctgcctcctctatcgacagcatcgtgaacggcagcgacgccgtcatggagccggttgttgctggcagcaacacggtagtagctgttgcccaagttgagttgcaaacaatgaacgtgcagcagcccgctgatgttgccggacccagcgagggggtggcggcgatctccaaaggggggaaggtagggccgaaccggtgcagcgcctgcaggaagagggttggacttacgggattcaactgccggtgtgggaacttgtactgcgcactccaccgctactccgacaagcacgactgcaagttcgactaccggactgctgccagggacgccattgccaaggctaatccggtggtgaaggcagacaagctcgacaagatctagggggggttccctacggttgggtatcaggaagattgtaaaccgcggtaactcgtcatgcggaactgctgccttgccccccgcgcctttctcttccatgtttgctgctacaatcttgttgttgggcattgcagtgcacggtgcacacttgtgtagcccgcctcgagaattcctgcctctgcatctggtcagttctaaaatgatttgcatgttggctatgttgtgtaagctctatttatggtggtctcgctgagacgggtatttggcttcgc

SEQ ID NO: 25462 - DNA, 977 bp, Zea mays
  Clone ID: LIB3912-002-E11_FLI
cctacaggctacagctcccgtctctccgccgcttgcttggaaaacgaagaaaccctcctccaccaacccaatccagctacatccgtctgggtgaactccagggccaggagcagttcgccgccttcgttcgcatcacctacgcggttcgatccaactggcaggaaggaacgtgatggccaagacgagctcgttcaagctggagcacccccttggttgtgattataatggaagtatggtgctgttgttgattggatagtaatgcgtggctgcaattatgtgcttcgactgagtgttcttccacaagtttatgttagacagtgatattcagtagttgtacatgatacaagtggctagtcaatctgtaaatccaaactgatcattggagaagaggcagtctgaggctaatcggatcagagagaagtaccctgacagaattccagtgattgttgagaaggctgagaggagtgacattcctgacatcgacaagaaaaagtacctcgtccctgctgatcttacggttggacaattcgtgtatgttgttaggaagagaatcaagctcagtgctgagaaagctatcttcatctttgtgaagaacacccttccaccaacagctgctctgatgtcttcaatctatgaagagaacaaggatgaggatggattcctctacatgacctacagtggtgagaacaccttcgggctcctctagatggctcaccacaatcgggtctgccttgcccttgcttccctactgatgccctgcctcgtgtaaataagacctgccaagcaattgtgtatattctggtttcctcgctcaactgctggaagtctaaaacctaccttatcatggacaccgtttaaattaagtaattgactggacctgaatctggggggtcctatgacctatgtcgtttacggttactggtccttgtaaatgctgtaacgaggtcaattggattcgcagtatgctattgaatccg

SEQ ID NO: 25463 - DNA, 2267 bp, Zea mays
  Clone ID: LIB3912-002-E4_FLI
ctttggccgcactgtagggatcaagatcatgccggtgggagttcatatgggtcagttggagtcgggtctgcgcttgcctgatagggagtggaggctttctgagcttcaacagcagtttcagggcaaaactgtcttgcttggtgtggatgatatggatatctttaaggggatcaatttgaagcttcttgcatttgagaacatgttgaggacacatcccaagtggcaggggagagcagtgttagtgcagattgctaacccagcccgtggaaggggtaaggatctggaagccatccaggctgagattgagcagagctgccagaggatcaatgtagactttggccagtcagggtatagccctgttgttttcatcaatcgtgatgtgtcaagtgtcgagaaggttgcctattatacgatagcggaatgcgtggttgtgactgctgtgagggatgggatgaacttaacaccatatgagtacattgtctgtaggcagggtgcaccaggatctgagtcagtatcagaggtgagtgggccaaagaagagcatgctggttgtgtcagagtttattggctgctcgccgtcactgagtggtgctattagggttaacccatggaatatagaggcaacagcagaggcgatgaatgaggccatttcaatgccagaacaggaaaaacagttgaggcatgagaaacattaccgttatgtcagcagccatgatgttgcttattggtcaaagagcttcatcctagacttggaaagggcttgtagggaccactttaagaggacttgttggggcatagggttgggttttggtttcagggtggtggccttggaccctcatttcagaaagcttaacatggattcaattgttaatgcttatgagatttcagagagcagggctatattgcttgattatgatggaacactggttcctcaaacttccatcaacaaggaacctagtccagaggttttgaacatcatcaataccctttgctcagatagtagaaacatcgtttttcttgtcagtggtagagacaaagatacgttaggaaagtggttctcctcatgtccaaaattggggattgcagctgaacatggttacatcttgaggtggtctagcaaagaagaatggcaaacatgcacccaggccatggactttggatggatgcaaatggcaaagccagtgatgaatttatatacagaagcaactgatggatcctacattgagagaaaagaaagtgccttggtgtggcaccatcaggatgctgacccaggctttggatcctcacaggcaaaggagctgcttgatcacctggaaagtgtactagcaaatgaaccagtctctgtcaagagtggacagttcatcgttgaagtcaagccacagggagtaagcaagggaatagttgccgagaggatacttgcatcagtgaaggagaggggaaagcaggctgatttcgtattgtgcatcggcgatgataggtctgatgaggacatgtttgaaaatattgccgatatcattaagaggaatatggttgctccaagaacatcgctgtttgcatgcactgtgggacaaaaaccaagcaaagccaaattctacctggacgatacatttgaagtggtcgctatgctgagcgcacttgcagatgccactggagctgaactgaaatctgattcggctgatgaattggcggcatctatctcatcacttgatattggtgacgaacaatcagaatccagcgatacaccaattggagggtcttagccagttttctcttgaatttcagaatataatgattatttcaatagtcaattctacagaggggaagcttctcaatctgctgcactccaagtttatccagttgggcaagatagtagtctgtcgctgcaaggcgtagatccatatgttcatagctgactcgccgacttggcatattctttgactttctcattcctggttgaagtaaaatgaaagcctgacagaaggaaagggaactgtgtggctgaagtaattggggaaagttataggagtggcaaatgctaaaggagcccgtgcgcagcttctgatatgatcccttattaacatgacattacaaagtggtgtcactttttgaactatcagtagtaggtagtagcaatctcaagggtgaggtttaaattgattagttgcttcaaaaccagattttggctcctctgtgtttgggttatattttaattactaggtgagtgcccgtgcgttgcaacggaaccgaataataacacgataatttagt

SEQ ID NO: 25464 - DNA, 1585 bp, Zea mays
  Clone ID: LIB3912-004-B5_FLI
gcgcacatggatgctcccagctcctactacttagctgccgaggcggcggatcgaccgatcgagtagctacatactgggcgcgcgccgcgatcgagaaacagagagtggatcacggtcgctgacctctgccctccccactccacgcgcgctcgcggatctcggtcgcgtcgcgcgccatggccagcggcggggcgccgtggctggagcggtgcgggccgagcgtggggatggtgctggtgcagctgttctacgcgctggtggacgtggcgctgaagacggcgtacgggctgggcatgcgccccatcgtcttcgtcgcctaccgccaggggatcgccgccgccacgctcctcctcgcgtcgctcgccgccagggggtgcacgctgcggcccatggccgtcggcgcgcggggcttcgcgctgctcttcgcggcgtccctagccacgtgagtcgtgatgatcctcagtcagtggacaggagactagtggagtgcctgctgcatgctctggtttttctgattcagtgcgaatgggacagcgccactggccagtacttgtacctccagggcctccacctggcttcgccgtccatggccagggccaccaccaacctcgctccaggcatcaccttcgccattgccgccgtcatcgggtaggtgactgtttctttctttcttccttcctgttttgggctgcccaaattgttacccccactccggcacgccatccatccggctcgcaggctagagaaggtggacatcaggagcccgaggagcgtggccaagatcgtcggcaccgccatctgcctcgcgggagcagcatccatggcgttcttcaagggcccggcgctcctcggcgcggctcttccctcgaccaccagcgacaacagcgactgggtcaagggaggcatctacctcgtgggaaacgccatctgcgtctccatctggtacatcttgcaggtgcccgtctgcaagtcgtacctggaccctgtgtctctggcgacctggatgtgcctcctggccaccttgcagtgcgccgccatggcgctgttcctggagcccaacaactacctggagatctggaagctgaactcgctctgggagttcccctgcatcctgtacggaggcgtgtttgcctctggcgccaacttcttcctccagtcgtggtgcatagcggtgaaagggcccctctacagcgccatctttacgccgctgagcgccgtcatcacggcgacactgtccacgctcttcctgaacgaacagctccatgttggaagcgtcctaggtgcggttacgatcatcgcggggctgtacgtcgtgctatggggtaaagcggaagatgcgaacggcggacaggtcggatccaagcagacggcagatgcggatggcatcgctgtcacagtagacactccgaccaatctttcagaaccgttgctaccgacagtggctgagccagtgttttgaacttgagtcttgggatttgggaatacccaagttcaaagggaaatttttttccccaatgcataacaatataggatttcttattcgtttttgaagtccaaaagaaatctacaggaaacaaatgtgcgt

SEQ ID NO: 25465 - DNA, 1272 bp, Zea mays
  Clone ID: LIB3912-005-D5_FLI
cagcggcagcagccgtgatgtacaggtgagctggctctgccgctccactccatggaggatctgtacagcatccacccggggatctcgcgggtcgtcggaggcgcggcgagcgaggcgtccgtcgccggcgccggcgccggcgggccctcgccgtcggatctgacggagctcatgaaggcgcagatcgccagccaccctcgctacccgtccctcctctccgcctacatcgagtgccgcaaggtgggagcgcatccgcatgtgacgtcgctgctggaggaggtcagccgggagaggcgccccgacgccggcgccggggagatcggcgtcgatcctgagctcgacgaattcatggacgcttactgccgggtgctggtgcgctacaaggaggagctgacccggccgttcgacgaggccgcgtcgttcctgagcagcattcaggcgcagctcagcgacctctgcagcggtggaagctcgccggcggctaccgccacgcactccgatgacatgatgggctcctctgaggatgagcaatgctcaggggacactgatgtgccagacatggggcaagaacatagctctcacttaggtgaccacgagctcaaggagatgcttcttaagaagtacagtggatgcctcagccgtcttcgttcagagttcctgaagaagcggaagaaagggaagctaccgaaggatgctcggacggtgttactagagtggtggaacacgcactaccgctggccttatcctacggaggaagacaaggtgaggctcgcagcaatgaccggtctcgacccgaagcagatcaacaactggttcatcaaccagaggaagaggcattggaagccatctgaggacatgcggttcgcgctcatggagggtgttgccggtgggtcttctgggacgacactctacttcgatacaggcacaattggaccctgaatcatacaccacttgggatgacaactggccagctcatattagtaataagatctggcatgtggagtgacgatctgctcggtgaaaattgaaaataaatctgctgagctgaggttgatcagactagtcagttgccctattattttacaagatcatgtgtatatggtgccgtcgtatcagaacaaactgtatgcatgtatgggcgaattgagacctgcaaaaggagtttaattagtagtttcaagtattggctcatggatttgtaatactcgctacccaatttaattgttagataggctgaagggcttataaaggtaaatttacttctgctcttcc

SEQ ID NO: 25466 - DNA, 617 bp, Zea mays
  Clone ID: LIB3912-005-H11_FLI
gaagcctccaccctccagcgcctccaccttcctcgccgcctcactccctctgaggtcgcagatccgtccggttagacgaagccgcccgcacccatggcctccggtgagctcgcctgcacctacgccgccctcatcctcagcgacgacggcatcgccatcaccgccgagaagatcgccaccatcgtgaaggcggccaacatcaaggtcgagtcctactggccggcgctcttcgctaagctcctggagaagcgcagcgttgaggatctaatcctctccgtgggatctggtggtggcgctgctccagttgctgcttccgccccagctgggggtgctgcagctgctgctgcccctgctgcagaggagaagaaggaagagcccaaggaggagtctgatgacgacatgggcttcagcctgttcgactgagaccctcgctacccagccattagcaaattcgcttatgctgtccaagacttatcttacgttatgtctgtaggcttttgttattacaagtactcaagttttgagtttttgagatgtggctatgacaatgtgatgaagaaccctaaaccatcgtattagagtgaaacttgtttctatatagagttccaagtttcttg

SEQ ID NO: 25467 - DNA, 565 bp, Zea mays
  Clone ID: LIB3912-005-H12_FLI
cctgccgcagccgcacaccaccccaccggtcggtcatcggccatcgccttcgcgttcgctttatcggctctggcatcttctcgcccagctcttccgccagctccatcgcagtccccattactgcactgcgctctgtcgcctcctctcttccccacctcgctgctccgatccagcaagagctccatccgcgcgcagggaggtcgtcagatggagttcgtgctcatcatctcgctgccgctgctcatactcatcatcatcgtcgccgtcgtcctctgcatcatctgccgctaggctcgctgaacgtccacagagaagaagaagaaggttcagccccgtccgtctctgcagtctgcactctgctagctgtgatcctaccataccatgtgttagtgctgatttgacattgtacgtacagcatgacctgataaaccctcctctctctctctctctctctctctctctctctctctctctctctctctctctctctctctcttgtctgcattgccgtacgtgagattaatccgctgtagctctctatacgttgtttcttttcttcaaaaga

SEQ ID NO: 25468 - DNA, 1338 bp, Zea mays
  Clone ID: LIB3912-005-H7_FLI
ttccggtttcggcttccgcggggtgggaatttggatagcgcggcgcaggaaaaatggcggcttccgctctccacctccgcctccacccctcgccgccggcgggtgtgaagcttcagcagcggcaactgcgctcgaaaatacagaggcagggtggcctatctcgaagattttcaaaagttgtgtcctattacggtctcacaaccccgccatataaactggatgctctggaaccttatatgagcaagaggacagttgaacttcactggggtaagcaccatcaagattacgtggatggcttgaataatcagctggctaccagccctctgtatggatacactctggaggatctgataaaagaagcttataacaatggcaatccattaccagagtataacaacgcagcacaggtctggaaccatcacttcttctgggaatcaatgcaaccagaaggtggtggcttacctgagggaggtgtgctgcagcagattgaaaaggattttggctcgtttactaattttagggaagagtttatccgctcagccttacagctgttagggtctggttgggtttggcttgtctgtgagtttctttctattttttctgaagtacaggcaccactgattcaagctactgatttcctgaattgctctttctatagcaagtttataagttcagtttatattccattgaatatttgttgcagtgaagagaaatgagagaaagctttcggttgttcatacacgaaatgctatctccccacttgcttttggtgacattccaatcatcagcttagacttgtgggagcacgcttactacttagactacaagagtcttttgtgaaccttggtgagccaaatatcccagaggcttgagctacagatacaccctagttatcatcatgaggcattcttcggatacatcggatcaaatcctgctggaggaaccagagagttggaaaatctcatgtctcacaagaaatgcttatcaccccaatgtcatacacgccaagataagctgctaggatttcaccattgcccttggatattgctacaaggaaatcactagtcagcatccagtttgaagacatgcaacaaaacagctctagaagctatggagctggtagattctggagttggcagtgaggcagtgatccaacttgggctttgaagccatggtactttctctagacggctattatgtccgtagtgttgttagaataatcctggttctgtgttttcataacttcatcatgctagtgttctgttgtagcggaacgcagaatggaacggaacgatattcttgttttactggttgagaaacatgttagttttggactgc

SEQ ID NO: 25469 - DNA, 1250 bp, Zea mays
  Clone ID: LIB3912-006-D11_FLI
tcgtcggcggcggcggagagagagcagatgacgtcctcggggacggtcgcgcagcagctgccgcggacggaggcgcggtcgctgtcgggtcacgagggagcggtgttggccgtgcggttcaaccgggacggcaattactgcctgagttgcggcaaggaccgcactctccgcctctggaatcctcacacaggcgcccaggtcaagacctacaagtcccacgcccgcgaggtccgcgatgtgcactcttcctcggataacgccaaactggtgtcctgcggtgccgacagacaaatcttctattgggacgttgcctcgggccgcgtcatccgcaagttccgcggccacaacagcgaggtcaattcagtgaagtttaatgagtacaatgctgttgtagtctcagctggttatgaccgtacggtgcgtgcatttgactgcaggtctcaaaacaacgaccctattcagacaattgatacttttcaagatagtgtaatgtcagttaacctaacaaagacagaaataattgctggcagtgttgatggtactgtccgggcatttgacattcgcatgggtagggagactgttgataatctagggcatcctgtgaactgtgtatcattatcaaatgacaacaattgccttttagctaactgtttagattctactgtgcggcttctagacaagtcatctggagaactgttacaggagtataagggacatacgtgcaagtccttcaagatggattcctgtctgacgaatgatgatgcatttgttgttggcgggtctgaggatggttatattttcttctgggagttggtggatgcacctgttgttgcaagattcagggcacatagttctgtggtaactagcatcagttaccacccaacaaaggcctgcatgttgacgtcttctgtggatggctctattcgtgtttggacctgaagactcttgaatggttgatgtgctattcgtactgttcctccaaatcatccagttatctagcagcaaggattcgacagtatgaaagatgaacgcatgtctaacctaatgggattcatacacgccttgctgcagagagaagaaaatgcgctgctgttgggctgtgtagcacacagctctgaggccaaaaccttttgaagccggtattctgtcatctatgaagtttgtgagccttttagatgattttggattgtacctgaagacaacttgtgagttgcatgaaaagtaacatttgttacgaagtttcttactgc

SEQ ID NO: 25470 - DNA, 1522 bp, Zea mays
  Clone ID: LIB3912-007-A1_FLI
tgcaggaagcttttagtttcacctgtagcttatctggtctcctcaatgtaccatttttttagtcatcccaaattctgttgcggtgcagaaaatattcttttttgttcaactttccactgttgtgcctgcacttcctctggtttattattccatgctgcagattcaattttcttttatttctcattagttttccctcaatgcactttgtagttatgcatttttgtttgttgcccacatattctgcttatctgagacttgtaaagtttgatttcttatttgaaatattttatcaacagctgatgactcagaataagattaaaaaatcgaaatagttgaactaatatgttctacttcatgcccgtgttagcgcatgtggatatttccaggttgtgattaatacacgcagttgctgctacatagttttggtcacttaaagatactgggtattgtgtagataatctgagtttatctactgacagtttgtgactatagtaaaatttcttctgttgcagctaagcactacatgcagtgaacaactaattgaagcaaggatttcttgtattcttcctctgacctcattggaatgctaaccatttctttatttgttttatttacttacattactgcaaatgttgttgactattttggatccttactagaaatatgttaagctattaattttgctggccagaatatgggtgtccagtgttcctttgctattattttgggggtctgaattcccagccaatttgccaactttgttgctgatggtttgtcttgccattgcaggagcataccagagctctcaaggaaattcttcagagaatgatcccaacaatacaacagtctttgtaggtgggttagattccaatgtaaatgaggagtatctaaggcaaatttttactctgtatggagaaatttcttatgtgaagattcctgtaggcaagcattgtggatttgttcaatttaccagcaggtcatgtgctgaggaagccatccgaatgctgaatgggagtcaggttggtgggcagaaagttcggctttcatggggccgtagtcctcaaaacagacaggcttctcagcatgatgccaacaaccagtataatgggaacagctattatggataccaacagccgggttatgaaggttatggctatggtgcttccagtgcacaagacccaagcatacaaaactactacggatactctggttgtggtaactatgagcagcagcagccaacacaggaacagcagctgcagcagcctccaccaccacaacagcagtgacgattgcttgcacacctttggagtgctatcggattagagtgacggtggagtcacggggcgctgcaatgagacatcctatatagatatgaaggtcatatagtcgcataggagttgttggactttcttggggaccagtgttaatcgatgatggcactccggatgtttcttctgtttgtcgttgagatcttgactgttgaagtgtgctctgttgatattaatgtcttcgtcagattgtt

SEQ ID NO: 25471 - DNA, 711 bp, Zea mays
  Clone ID: LIB3912-007-B11_FLI
cccagatgtaggccacatactactagatggcgtggacatacgcaagttccagcttcggtggttaaggcagcaaatgggcctggtcagtcaagaaccggccttgtttaacgacacgataagggcaaacattgcctatggaaaagatggacaggcaacagaatctgagatcgtatctgccgcacaactggcaaacgctcacaagttcatcagctcggcgctccagggatatgacacaatggttggagagcgtggagctcagctgtcaggagggcagaagcagcgcgtggccatcgcccgtgcgatcgtgaaggaccctcggatcctgcttctggacgaagcgaccagcgcactggatgccgagtccgagcggatcgtccaggacgcgctggacagggtgatggtgaaccggacaacagtggtcgtcgcccaccgtctgtcgacgatacagaatgcggatctgatcgccgtcgtcaggaacggggttatcatcgagaagggaaagcacgacgccttggtcaacgtcaaggatggcgcgtacgcgtccctcgtcgcccttcactcggcagcctcttcatagctgcaggtggtaggtagcatgggatcctgcaaacgtctgctgaaacatatatatatatatggacagaggcacagagctgccacaacctgtgtagcaagtcaggtgctagtatctgttcctctatttgatgacac

SEQ ID NO: 25472 - DNA, 944 bp, Zea mays
  Clone ID: LIB3912-007-G11_FLI
ggagggccagcccacaggacgcaggcccagctcagtgaggcggcctaactcgatgccggtatgcaggtgcatgatccttgcccgcagctccactccaaaccacgtgctgcactgtactgtactgtactgctggaaagagagagacgcctccgccgctggaatctggtgatgggagacgcctacgcgaagcgggtgctactcaccgcagctggcgacaccgtctcgcgggggatcgcatgtaccctcaccaagcacggctgcagattggtcttgttgggcgacgagggcgcgctggccgcgacggaggaggaggcgcggcgctgcggggtagggggcggatgcgtcgaattggtcgggctggacttcaaggcgtgcggtgaggctgctgccgacgcggcggtggatcgggcctggcgctgcttcgccggactggatgccttcgtcaactgctactcatacgagggggaggtgcaagattgcctcagtataagtgaagacgagtacaggaagaccatcaaagtaaatgtgataacaccttggtttctaatgaaggcgattgcaaagcggttccaggatacaaaatctggtggatctattgtgttcttgactcagattattggtgctgagagaggattgtatccaggcgctgcagcatatggcacaagcttgggagccatccaccagttggtccgtctgtgtgcgatggagcttgggaaacacaagataagggttaacgccgcctgccgcggcctgcatctgcaagacaagttccccgtgtccgtgggcaaggagaaggcggagaaggcaacggcggaggtgatgcccctgcggagatggctggatccggagaaggacctggcgtcgacggtgctgtaccttgtcggcgacgagtcccggtacatgacgggcacaacaatattcgtggacggtgctcagtccatcgt

SEQ ID NO: 25473 - DNA, 1504 bp, Zea mays
  Clone ID: LIB3912-007-H10_FLI
aacgcgaccggcctcgtcctaccaccggtcgatagggatctcggcctcgtgccccaccgccctctgtctgcccatcaccggatcacccctcgtccccacccagcgcgtcacgggcacgagctcgagccctcgtaccctcgcgtccgcgctctccctccctcgctcgccgcgctccgatcgaactcccgtccccgcgtggaggagagcagggccccacgagggccctctcgcgcggcgaccccgtggcgttcctgcgcggctgcttctcgttcgggtcggcggggcggaggcggcccaaggcctcgcccttgccctccccgccgcgcctgaccgcggctgcggcggcagcggacgacggggccaagatgaagggcctcttcaagtccaagccgcggacgcccgtggacatcgtgcggcagacgcgcgagtgcctcgtctacctcgacctccactcggactccaggagcggcgatgccaagcgcgaggagaagatgacagagctaagcaaaaatatcagggatatgaagtctatcctttacggcaatggtgaatcagagcctgtaactgaagcatgtgtacaattgacccaagaattcttcagggagaacactttacggctattaatcatacatcttccaaaactaaatttggagactaggaaagatgctactcaagttgttgcaaacttgcaaagacagcaagtatcctcaaagatagtagcgtctgagtacctagagtcaaataaagatctcttggacattttaattttagggtatgagaacatggacatcgctttacattatggtgctatgttgagggaatgtattcgccaccaaagcattgcaaggtatgttttagagtctgaacacatgaagaagttctttgactatatacagcttccaaattttgacatagcttctgatgcttcggctacctttaaggaactgttgacaaggcataaagcaaccgtggctgaatttctctccaacaattatgattggttctttgaagaatttaactctaggttgctgtcatcaaccaactacataacaaaaaggcaagctatcaagttgttgggagatatgctgctggatagatcaaatgctgcagtcatgatgcgctatgttagctccaaagacaaccttatgattttgatgaatctcttaagggattcgagtaaaaatattcaaattgaagcatttcacgtgttcaagctgtttgctgcgaataaaaacaaaccgcctgaggtcgtgaacatactggtcaccaatagaagcaagctacttcggttttttgctggattcaagattgacaaagaggatgaacagtttgaagcagacaaggagcaagtcataaaagaaatatcggcactttgagtatgcttgaggttgtaattagtttttgtgatgaattttcttttgctaagaaagtgcatgtgaaataataaacttctgtgtaatattctgttggaccaagaggaacaatgttactcattgactctagt

SEQ ID NO: 25474 - DNA, 871 bp, Zea mays
  Clone ID: LIB3912-008-G10_FLI
caacgagaagagcggcggcgcgggcggacaaggagcaggcggaggaggagctgtgccaagccacaatgggtatctcgcgtgactcgatgcacaagcgccgggccaccggtggaaagcagaaggcctggaggaagaagcgaaagtatgagcttggtcgccagccagccaacaccaagttgtcaagcaataagacagtgaggagggtccgtgttcgtggaggtaatgtgaaatggagggctcttcgccttgatactggtaactactcatggggaagtgaagctgttacccgcaagacccgtatcctcgacgtggtctacaatgcatcaaacaatgagcttgtgaggacacaaacccttgtgaagagtgccattgtgcaagttgatgctgccccattcaagcagtggtacctcactcactatggagttgacattggtaggaagaagaaaacccctgctgcaaagaaggataatgctgagggacaagaggttgaggcagcagctgaggaaacgaaaaagagcaaccatgtcacgaggaagcttgagaagcgcaaggagggacgtacccttgacccacacattgaggagcaatttggcagtggacggttgctggcatgcatttcttcccgccctggacagtgtggccgagctgatgggtacatccttgagggtaaagagcttgagttctacatgaagaagctacagaggaagaagggcaagagcgctgtagcttagagcattctcatggattgtcttgcaccgaaatgtgtgtcctgatgagtacactttttttggttaatcgtctcaagttcagagcgttatgccatgttttcagacctgattagtacactgttttctaaaagcgattgagctct

SEQ ID NO: 25475 - DNA, 1211 bp, Zea mays
  Clone ID: LIB3912-008-G2_FLI
ggcccagctcggcagctctccagcctactgcagtcctgtggtcgcacggtccttcactcctgcgtcctgcctcggtgcctcccagagtcccagacccaggcggccaggctcccagcctcccaggtccccggtggcggcagcaggctcccagtcccagatggccaccagttctaaaccctagccgccaaaccaacacgagcagctgtcgacctccaggccggtcgagcggggcgccgggcaccgtcgcgccgagcggagagtgtagcacctgcaccgagcggccagcggggcgccaagcactcgtctactcgtcttctctgatcctgggcgtgcctgccaatgagcaagaagaggaagcatctggatccagcgaactcgttgaaagacagcgaacaagtagtcgcctcagatttcataagaggagacgatcttgatgacctattatcgaagcttatcaggagtgtggagattgccaaggcttcaaggggaggcttaccagaaaagatatggatgaagcaacaatttgctatcggcgtcaatgatgtcacaagggttcttgagcgaatgccgcattctgtcactgctcatcctgctcaaatgtctagtggagcaccaactgtctcaggccgacgtcaagctcctttggtgccattgcaggctgtccttgtagctgccgactgcaatcccaaatggttaacaaaacacataccaacactagcgtctacaaggcaggtaccggtattgtgcgtgaaggacaacaagggaggctcagtaaggttaggccatgtggtgaatgtcagaacagcccttgccattggagtaaaggccaaagatagcgttctcaacaagaccattgatgagttcctgaaagacagtaaactggttgccaatgaaccataaagtaaccccaagtctagtgacacgtttgtactaaaaagcctgtacttctgggcatgcaacatcccaggatcatctcataaatgggtttaagtttgagaaggggatcgagtatcttgagcagattgtggcaatatcaatttggagggacttcttgagagaacagtcatgggaaataggacagactatttgtttggtccgtgcaatattgtttgactggtgaacctagttatccattgtgatctagaacttgtatcaaactccaatgtaacgagatgttagaatccttgtttattgggtacagttttttcttc

SEQ ID NO: 25476 - DNA, 639 bp, Zea mays
  Clone ID: LIB3912-008-G5_FLI
ccgcgccgtgccacccgagtccaggcccccagggtgcgagggcggcaccggcgcaggcgaaccgcagtccgcgcctccgcactccgccccatccgaagctccgagcacagcaggagcagcaaagcaagcgagcgtcagtggcagactggctgaatcgagaggtggaggcagcaaccaacaaggtagcactatgaaggtcaagattcttcagtggcatgcagtggcttcttggacgtgggatgcacaggatgagacatgtggcatatgcaggatggcttttgatggctgctgtcctgactgtaagttccctggtgatgattgcccactcatttggggtgtctgcaaccatgcttatcatcttcactgcatactgaagtgggtcaattctcaaacatccacacccctttgccccatgtgccgtagagagtggcagtttaagggctaaggtactatggacatctagaactgcaccaagcgactctcagttctcagagaaggctgatgtttttctggtacttctgtgatgctttattttaactactacatattgttttccgtatcataaatcctgatgtcagtgcctgatcctgtgtatgcttccgagcttgtagtggaacaaatgaaattattgcttttctt

SEQ ID NO: 25477 - DNA, 476 bp, Zea mays
  Clone ID: LIB3912-009-B7_FLI
ccaggagaaggccgaccaccgagcggacgccgccactggccaccacggcacgcgcgtgcccctcaccggcccgcacggccaccacggcgctggcgcggccgtcgaccccgcgtacccgtcctccggcaacacgtacccggcgtcgggcaagtacatctaggtgactgcgtcggatgagcgaggccagggtcgtggtcgcacttgcgtttttgtgtacgtagcgaccgagaagatcgatcctggctgtacgcctgcagtaccggtaccgactggttagttgtagagggtatccggtgcgcacgtgcacgtgcgcgcaagtcgtctggaataaaaatgctctagttgctgttaggttgcttaatttcagtgtagtcgttcgttcacgggcactgttgccctctatgtagtatgtttttttttgtttttaatcgttttagtgtttgaccaagtacgcgtaatagatttgtaagttcgac

SEQ ID NO: 25478 - DNA, 1688 bp, Zea mays
  Clone ID: LIB3912-009-E4_FLI
gctaccagcgggggcggcgcctctgggtctggggtgcttgccctcccgtttctcccgtgcaaattgcgcttgtttaggtgggaattgggtgattcttggtgtgcgctactaggcaagacaacaaccacatcagcgcggaggagggggaagaggacgtatctcacgggagcgaggcccggagggagatgaaggatgtggccgtggctggagaggattgcgtccgcgtgctgggaccgggtccggaagtacgcgcttacgaggaagggtgaggacgacgccgacaccgacgccgacgtcgacgccgtcgcggacgagctgctgtggtcgcgggacctcacccgtcacgcggcgggcgacttctccttcgccgtcgtgcaggccaacgacgtgttggaggaccagagtcaggtggagacggccgccgctgccaccttcgtcggcgtctacgacggccacgggggcgccgaggcgtcccgcttcatctctaaccacctttctgcgcacatcgtccgtcttgcacaggaacatggaacaatgtctgaggatgttgttcgaaaggccttttctgctacagaggaaggcttcctgtcgcttgtgcgcaggacacatttgataaaacctgctatggctactattggatcttgctgtctggttggtatcatatggagagggacactctacctggccaatcttggtgattctcgggcggttgttggttgtttggatggagcaaacaggatttttgctgaacagttaacaagggaccacaatgctagcatggaagagattaggcaggagcttaggtctcttcatcctgatgattcgcaaatcgttgttctgaagaatggtgtgtggcgcatcaaaggcatcatacaggtttcaaggtctataggtgatgcatacttgaagaagcgagaattcgctgttgatccatccacagctcgtttccacctctcggaacctctccgccggcctgttctgacgtcagaaccatctatatcttcaagaattcttggttcgcaagaccgttttttgatctttgcatcggatggactatgggagcacctctcaaaccagcaagctgttgaaattgtccacaatagtccacgagaaggtgttgcaaggagattggtacaaacagctctaaaagaagctgcgaggaagagggaaatgaggtatggcgatattaagaagctcgaaaaaggagtccggcgctacttccacgacgacataacagttgtcgtcgtcttcatagaccatgaactgcgggcggagcattcttcctcgacctctgttcctgaactctcggtccgtgggttcgttgatgcgggggcacgctccagcttttcagggatgaacgacattacttgatacagtaaccttgtgttgcctaaatttctgtcattttgatgtaacattagatcaaactggccttctgtagttttcttattctattggtgttactagcgcgtagtacggcatctttgcttctattaacatctggccacattggaatcacaattcgttctggcaatgtctggctactctatttctcgtttccccagctctcctgaagaataagtttcacatcggtaaatatctataggatattgctagctaatgttttttcattgctgatcttctaaagctgggactttacttgatgaatctatatgggaggtgaaact

SEQ ID NO: 25479 - DNA, 860 bp, Zea mays
  Clone ID: LIB3912-009-E5_FLI
agccgccgccgctgctcatctcacatccctcgagaagacgcctgctcctcgccgatcgatacgatggccgtcttctccgacctccacaccgccgacggcctcaagtccctcgaggctcacctcgccggcaaaacctatgtgtctggtgactccattactaaggatgacattaaggtcttcgccgcggtgccgtcgaagcctggcgctgagtttcctaatgccgcccgctggtacgagaccgtctctgcggctgtagcctcaagattccctggtaaggctgttggtgtaaatctgcctgcgggatcagctcctgcggcagctgctcctgcggatgaggctgaggatgatgatgaccttgatctttttggtgatgaaactgaggaggacaagaaggcagctgatgagcgtgccgccgctgccaaggcctcttctaaaaagaaagaaagtggtaaatcctccgtccttatggatgtcaaaccatgggacgatgagactgatatgaagaagctggaggaggctgtccgcagtgtccagatggagggtctgacttggggagcatcaaagcttgtgcctgttggatacggcatcaagaagatgactatcatgttgacaattgtcgacgatcttgtgtccatcgacactctaattgaggaccaccttacgcaagagcccatcaatgagtacgtccagagttgcgacattgtggctttcaacaagatctagagttcagtttctgagattgggcaacggcagcggctcagctcgtcaagtttgtgctgggatgccagtttatcccttctagtctattacagaaatgttgttcggagctgagtctattataaacatcttggtctgagttg

SEQ ID NO: 25480 - DNA, 913 bp, Zea mays
  Clone ID: LIB3912-010-D3_FLI
gggcgccaggcgccagccgccagccgcagcccgcaggggcgctagcagacgagcagagcaggctagcagcactgcagcagtaccgcagcggcgcagcgcagtccgcagccggccagccgcagcccgcaggcaggggcggtaggcgcgccgcgcgcgtagccgccaggcgccaccgcgtcaggggcagggcacgagcagcgagcagcgggcagcggccagccggccaccggccaggccagcgacgcgcacgcgccgacgcccactccactcgaccaggcccagtgaccagccgtccagccgccagcgtgctgtactgctgtttcactgttccagttccaggcttccaggtttcaggcaagcgtgaggagagtggagatcatcccgatgatgatgcgaggtggaaggctcacgggtttgacctctcaggttctgaggtgcttcagcacggagatatttgtcagcagattatcattctatacgacagaggaagaattcaaagatattttttcaccatttggcaccgtagaggaagctcgacttatgagagaccaccaaactggaaggatgaagggatttggttttgtcaaatattcatcgcaagcagaggcagagaaagctgtcaaggcaatggatggcaggattctacgtggaagattgatctttgtggagatggcaaaaggacacgaaagcaagtaggacaccctccccacgagaggatttcactgaacatgaaacatgagagcgccatcagcttatgccagatggcaaatatcccaaattctcaattgatgttgcaacttatatacaaagcacaagttaattttagctagcttatctttgataacactgctaccttaccatctgaatggttgccgtgtattggtatccgttgacctgtgtaagaaatgttggc

SEQ ID NO: 25481 - DNA, 1481 bp, Zea mays
  Clone ID: LIB3912-010-E2_FLI
tcgatcccagggccgctccggcggcggcggcgcgttgagatggctgacactgacagcgcggagaccgagaaagagaagatggtagcggatgatgggggcaagcccgcagagctctcgaagagcgcgaggaagaagctgcagaagcaggagcggcaggcggaacgtaaagcggcccgaaaagcggcggagaaggagcgacggcgcgccgacatagagcggcggaggcgtgagtgggaggacgctcttgccgccgcgccgtcggatgaggcccgggccgagatggtggcggcgcggcgggagacgcggcgcgagcgggtgggccggcgggcggaggagcgcggggcgcgagctgaccggctcaggcgcgcggctgagggcgcgggccagaaggtggtgctggacctcgagtttgcggaccttatgaggcccaacgagattcatagcctcacgcagcagattatgtactgctatgcagtgaatgggagatctgcaaacccagctcacctgtggctgacaggttgcagtggtgaaatggcgacccatcttcagagaattcctgggtatgataagtggatcattgaaagggcggccaggccttatattgaagcatttgaagaccgtaaagaaaacctcgtgtatcttacagcagatgctgagacagtgcttgatgatctagacatgtcgaaaatatacatcatcggcggcctggtggatcgaaacagatggaaaggcataacactgaagaagtcagctgagcagggaattcaatctgcaaagcttcctattggaaactacctaaaaatgtcaagttctcaggttcttacagttaaccaagtgtttgagataatgttgaagtttgtggaaacaagggactggaagacggcattcttccatgtgattccacaaaggaagcgaggagaagctgagaccagagatgacgtggaaaaaggaggcctggatgacaacgatggcgccgccgaaggggctgcagatggagaccattccgaggaagacctgaacaagggcttcggtgaggaggaggacgatgatggggacgaagagctggaagaggaagaagcagatgtctccaacaagaggcagtgtgttagagttgaaaacggggaagctggggatgccaccgtagcagaggtggaaccaaacaacggcggcggcggcgggggcggggaccgctgaacagtgaacagcaccaccacgtttgtcgctaactcgctattttcacaacagcatcggtattggatttttgagcgttgtctctggcatttttcatgtattttagggctagtttggcaaattcatttttccaagtgattccgattttcctaaggtaaaatgaactaatttccttggaaaaatgaaaaaaaaaatcactagtaaaaatgggattgccaaactgtcctttattagacaatttctgccgtactctactcggaactgaataactgaccagcttagttaaagtt

SEQ ID NO: 25482 - DNA, 854 bp, Zea mays
  Clone ID: LIB3912-011-E10_FLI
ccccgccagccggcacaaagcgcggcgttaatatctcccctcccccttgccctcaggtctccccaccgcccccgatccaccattcctcctccggatttcgcagtcagcggtggtgaaggtagcgggcgcggaggaagatggggctcgcgttcgggaagctcttcagccggctcttcgccaagaaggagatgcggattcttatggtcggtctcgacgccgccggtaaaaccaccatcctctacaagctcaagctcggcgagatcgtcacaaccatccccaccatcggtttcaatgttgaaactgttgagtacaagaacattagcttcacggtctgggatgtcgggggtcaggacaagatcagacctctctggaggcattacttccagaacacacagggtcttatctttgttgtggatagcaatgaccgtgaccgtgttgttgaagccagagatgagctgcacaggatgctgaacgaggatgagctacgtgatgctgtgctgcttgttttcgccaacaagcaagatcttcctaatgccatgaatgctgctgagatcactgacaagcttggattacactccctgcggcagcgacactggtacatccagagcacttgtgccacaactggcgagggtctgtacgagggcctggactggctgtccagcaacattgcgagcaaggcttgaatatcaaatgcgaactgactaggagctccggatgtatcatggaaacttaggacagaatcgcctctacaacctgttaggtgtcttctaccggcacaatatattttttgtttggaatatgtaatgatgttacggttcaacgtttattctaccctactatactgttggatgttc

SEQ ID NO: 25483 - DNA, 1968 bp, Zea mays
  Clone ID: LIB3912-012-A3_FLI
gcatttgcttgctccccctccccgacaaaaaccccctgtcccgtcgagcctcgcatccctagttccctacaagcaaggaaggaaacccgggcaacacgacaccggcggtgccagtgccacggaaaattagccggctccctccccgacgtccggcggcggccgagcaacggtgctggctcccaacatggagacatataccacagacgacgcgcttaccattatggggtttggaaaattccaagcgcttgttcttttctacgctggaatgggctgggttgcagaagctatggagctcatgctcttgtcgtttctcgggccattcatacgagaggagtggaacgtctccccagagaacgagagcctcctttcgagtgttgtctttgctggcatgctgctaggtgcctgtgcttggggctttgtttccgacaaatatggacggagcggtattggtagtggtttgctcatggcatccggctggactagatttgcttcgtcagcaaactaactagccatgtcagcaatctacctcatacaatgattcacaaggattacagggactggtttaatattttcaactctatttactagtggaatgggttttctaagcgctttatctcctaactacttatgcttggtggctcttcggtttctggttggagtaggagtgggtggcagccatgtgtttatatcttggtttttggagtttgttcctgcacaaaatcgtggcacttggatggttattttctcccttttctggactctcggcacgatcttggaagcttcacttgcatgggtcgtattgccagcattgaattggaggtggctgctagtcttcaccgcccttccatgcttcctcttgcttcctttctttggactaacacctgagtctccgcgctacctttgtgcacaaaatagaatgtctgatgccacatctgttctagagagaatggccaacgcaaaccaatcagctcttcccccgggagttctcacgtacaatagacaaacaaaatgtgaccacgacgttctcgctcccgagagtgaatgtcttcttcctgtcagagagaaggaatgcacagttgacaatgccaagagctccgaatctggcagtcttgctgcactgcgcatgctattatcgcgcgaactgctcagatcaactctgcttctttggtttgttttctatgcaaattcctttgcttattacgggttagtattgctgacatcgcagttgagtgatgcaaataaaagttgtgcatctggtgtgtcttttggtctgcgccaaaaggaaatcaatctttacaaagacactttcatcactagtttagcagaaatcccaggtttatttttgtctgctgttcttgttgattggtttggtcgaaaagcttcgatgtggtctatgatgttcgcatgctgtgctttccttggaccacttgtacttcaacagactgagttgttgacaactattcttctatttggtgcccgtgcatgtgccatggggagctttacagtcttgtgcctttatgctccagaggtgtatccaacatttgtccggtcaaccggtgcaggaattgcgaccgccattggtaggattggtggggttgtttgccctctcgttgctgtcgccatgctgcggagctgccatcagatggaagcactcattgtgtttgaggtgatattatgccttgctgcagttgcctgcatgttcttccctgtagagaccaagggccgtggaatggactgatgcaatatcaggcttcagcatctagatgagcttgtagttcatcactgtttgttttatgccatcattatgtacagagaatatacatgtaacatggtgtggatagttcctcaaaatatgtgcaggactttccaaatttgtaagacagattttgtactgaaagacagctggttctgtactgccaaaacactgaaagacagagttgtattactcctcagcatttcttgcaagcc

SEQ ID NO: 25484 - DNA, 812 bp, Zea mays
  Clone ID: LIB3912-012-B1_FLI
aaaaagatctacgtggtacggtctgggcactgatgattagttgctcttgttcaggccaactgataaccaagtaaatgaacatcaagggtcgcgacgtcggcatcgatggctggccagggggactgatggtgggaggcgcaacaagctggtgggggagtctgacggaggccagcatgctggagggcaggtgtcacacccgggtttcggggccaaaacccgagcgcgaaataatcaccatggtgtgggacaaagtctcacacatatgataaacagtggtgtggtcgtcttctgccttccttttctgctatccgtgagacaatgaagcaagcagtgatgggctgctagagggtcagagaccgggatatcgagggcttgggcatcaacgtcgtggatcctatggggcaccgtcggccggcggtgactccgctgcttgataacatgagcggccccacatgggggttcagatgggccctggcacaccctaagctaggcctaccgaggactccacccggccatccggcgtcggcagttccaacttcccaacttctacgcagatctgatcgcttctggtggcaacaactcaacaatacagcttcctgttcttgcctctgcctggctgcctggcagctattcctggtgggcggcgagccggcgactggtcgttcctgcaggctgcagcctgcgccgctgttcctagcgcccggcgcgggcggctggctgcttcctgtttggctgcccatctccgaactccggtggccggctggcggtgtaccgtgtacgacaggtaatttgcaatccaattttttgtatag

SEQ ID NO: 25485 - DNA, 729 bp, Zea mays
  Clone ID: LIB3912-012-G6_FLI
ggaagcagcagcagagagcaggccaggaacaagaacagcaatgaactcgccgccgggcgacgacggcggcggcagcgcgcacggtttattcgggtcgggcggcatccgcgggttcggctacggcgtcggcgtgtccatcggcatcctactcgtggcctccaccatcgcgctcgccatctacttctgcacgcgcacctccatgcccgagtccgccgccgcgctcgcgccgccgcggcagggcggcgacgccgggcggggcatcgacgaggccacgctcgaggcgttcccggcggtggcctacgcggaggcgaggaaggcggcggcgaaccaggcgtgctgctgccccgtctgcctcgactgctacggcgacggcgacgtggtccgggtgctccccgactgcggccacctgttccaccgcgcctgcgtcgacccctggctccggcagcgccccacgtgcccggtctgccgcacgtcgccgctgcccagccccatgcccacgccgctcgccgaggtcacgccgctggcgtccgcgcggccgtcgtgagggctgtttcttttttctctctcgcgcgttcgtgtgtctggcctctgctgctgcactctgattgcttcgtgccttcgtcccttgtgccgtttcatttctacgtacacagcacggtgtgtgatcagcgcgcgaatcagcaagatgttattttgtctctcaagattatgaaattcgatcactttggc

SEQ ID NO: 25486 - DNA, 578 bp, Zea mays
  Clone ID: LIB3912-014-A5_FLI
cctttacttccgttcaacatgttgaactacctgttatctgtcactcctgttggtgttggagaatacatgctggcttcttggttgggaatgatgccaatcactcttgctctggtgtacgttggaacaacactaaaagatctatcagatgtgacacatgggtggagtgagatctcgactactcgatggattctgataatatctggttttgtattatctgtggtcttgattatctgcgtcacaaaaattgcaaaatcatctctggagaaggcattggctgagaatggagagctccatgtaggaacatcgcagcttccaggtgtagcctctcccttggatctgcaacaacctcttgtaatcaagattgacacatcaaatgaagaccacgagaagtaaaggtgttgtgtttacaatctcagatgtacattctttggctgttgagtctgtagactgtatatacacccatactctggtgaggccggtaaatgggtaaaaaagacatcatccccccttccaaaaaagggaatgaagtttagtttactgataggttatagtaatacgatatgcgctttgtttcactc

SEQ ID NO: 25487 - DNA, 995 bp, Zea mays
  Clone ID: LIB3912-014-E6_FLI
taccatactgcccctgctccatttgatgacctgaccctgaccctgaccctgaccctactataatacaagcgcagcagccactgagtcctgagagcgcgcaacagcagctaagctagcactagcaggcggccgggcaggtcggcatggagcctcacatggagagcgcgctgcggcagggcctgtcggaggcggagcagcgggagctggagggcgtggtgcgcgcgcaccacacgttcccggggcgcgcgccggggacgtgcacgtcgctggtgacgcagcgcgtggacgcgccgctggccgccgtgtggcccatcgtgcgcggcttcggcagcccgcagcggtacaagcacttcatcaagtcgtgcgacctcaaggccggcgacggcgccaccgtgggcagcgtccgcgaggtcaccgtcgtctcgggcctcccggcctccaccagcaccgagcgcctcgagatcctcgacgaccaccgccacatcctcagcttccgcgtcgtcggcggcgaccaccgcctccgcaactaccgctccgtcacctccgtcaccgagttccagccgggcccctactgcgtcgtcctcgagtcctacgtcgtcgacgtccccgacggcaacaccgaggaggacacgcgcatgttcaccgacaccgtcgtcaagctcaacctccagaagctcgccgccatcgccacctcttcatcggccaattaattcctcctcctccccctccggtgccggtggtgccacggatcatcgtcactagctagcgcgcgctaatccattgcgtccaaggcatgccctgttcgttccgttgctactgcaaattgcctgcaatggtgacgatgcttcttgcttgctttttcatctctccatccgtccatcgtttctagctctttggaacgaacaagaagctagctagctagctagagagagagaaaaaaaatgttgtccaacagtttgctataaacgaccttttccttttatttcatcgtaact

SEQ ID NO: 25488 - DNA, 979 bp, Zea mays
  Clone ID: LIB3912-014-G3_FLI
ctcacctccggccacctctcctcccgtgcctccgccaactccctcctccgcgtcgccccctgctcctccgcctgcgcgctcatcctccgcctcctgctgctccaccgcctccgacccgaccacatctccctctccttctccctgcacgcctgcgcccgcgtcgtccccaccaccagccgctacccgctcacggtcacgggcctcctccactcgctcgccctaaggcttggccacgcccgcgacgtctacgtcgccaacgccgccgtatcctcctacttcgccgcctccgacgtcgcctccgccgaccgtctcttcgcggaggtctccaccgacgtcgccgacgtcgtcacctggaccacaatggtcaccggccacgccagtgccggcggcctgggccgggcgaggcacttcttcgacgccatgtccgagcggaacgtcgtatcctggaacgcgatgctgagcgcgtacgcccgcgccgggatgctcaccgaggcgcgggacctgttcgacgcgatgcctaccaggaacgccgccacctggagctgcatgatcagtggcctcgtgctgtcgggacgctgctgggaggcgctggggctcttcggtgacatggtccacagcagcggcatcgtgccgaacgagcccgcgctggtgagcgtggtctcggcgtgcgcccagatgcggtcactggaacacggcgcgtgggtgcacgcgtacgccgaacaggagctgcagggggcgatgagtgttgtcctcgcctccgctatcatcgacatgtacgggaaatgtgggggtatccacagtgccatcagggtgtttgctgccatgcccatgaggaacatctactcctggaacgcgatgatcactgggctcgcgatgaatggtggcgaacgacaggccctgtcgctcttatggaagatgcagatggttggcgttcaaccaaatgacataactttcatcgggttgctgagcgcttgcaccc

SEQ ID NO: 25489 - DNA, 1145 bp, Zea mays
  Clone ID: LIB3912-015-C11_FLI
ttgggttctagaccaaagaagcaatggaaaaggaatcatctgccacatacgagccaaaaaggaacagtgaaataagggtttttgagagttcagatgagatttcaacggatcttgctgagtatatctcacaagtttcagaaatttctgtcaaagaaaggggatactttgccatcgccttatctggaggtcccctagtcagttttttggggaaactttgtgaagctccatacaacaagacactggattggtccaaatggtacatcttctggtctgatgaacgtgctgtggcaaaaaaccatgcagagagtaactataggttaacaaaagaaggattcctcgccaaggtaccgattctgaatggccatgtctactccataaatgacaatgccacagtggaggatgcagcaacagactatgaattcatgatcaggcagctggttaaggtccgcacaataggagtctcagagagaaacgactgtcccaagttcgatctcatccttctcaccatgggctccgatgggcatgtggcctcgcttttcccgaaccaccctgccatggagctgaaagacgactgggtcacctacatcaccgactctccgcagcctcctcctgagaggatcaccttcactctcccagtgatcaactcagcatccaacatagcaatagtgtccactggtgatgacaaagcaaaggctgttcacatagcagtttctgacatggccgaaggtcttgatgctcctacatcactgcctgctagaatggtccagccaacggacgggaagctggtatggtttctggacaaggcggcggcatcattccttgactccaagaacgacgacgacgacgcttgctacgatcgtcacgagtgactaactctgaggatcgttggtcgttttgaagcgaatgaacggaggtgtgtgtaagtaggtggtggcgtatgatggaagacgcgctgttccccttttagctcgatgcatgggttaattttgttctgagggtttttagctccggaaatctgaaattgcccttggtccttttgcagtgaggtgatttaaaagcgatgaaatgtgtatgcgatgttgagtcgtcaaagaacaccggaatttaactgtggtcgtataatattatgtgctacattctatgct

SEQ ID NO: 25490 - DNA, 1907 bp, Zea mays
  Clone ID: LIB3912-015-F5_FLI
caatatttgagatgcagtttccttgttggtactcattaattcctcgtctcttgaagacgtgataggaaagtcacatcagtaactttattgcttgtttcatactttttagtatgggaaaggatgccactaataactaggtatcaaaattatgttgttagaagctgtctctaacattatggttccatctgtattggtttgcaattcgagagtattcatataaccttttgcaaattaatgttgaaatgctggatttatcacggatatggaaaattaatctgttgttttgtcattttgtattgttctacatccaactttttttattgctttgaatgatgatatattcaattattttgcaatactgtttaattcttgtcatcttgtgtatatattatgttgagttggtaggtcatgtgatgaggtataatataattgtgcccttatcctgttatacatttatatgttggccaatacaataccatatcttaggtctttgtatctttattggggaggtccacttctcttcttggatgcactgaacattccagagtatgctattgggtatgagttgtatggttgagtcgaggcttttcatgccgtctagatgatgaggtgcatgatgtagattatgcacacgtatagttccagttgatatgttgtcaaattatacacacatagaccataaactttctgcatggtgtccagagctgataatattttcccttgatttgttgttactatgtgttgggtgacaattagttaacctttggtgataaagttgctcgattctatctcttctcttttctaataactatagagaaacatgactgagaagggtagacctttgcagtggtgagaactgagtcaggggaaggcttgctcggtttatcccttccgcaccctactcatgtgggagtctactgcactggatcttttctttttatagacatgactgagtgatgatgttatttgttccatgcctttttcgtcatcagtatttatatctttccttgtctttttcaggacaagcctcagccgccacctgagggccgtcttcctgatgccaccaagggttctgaccacctgaggcaagtctttggcaagcagatgggtttgagtgatcaggacattgttgccctctctggtggccacaccttggtttgttgctgtccactcatgtttgcttcaggaatttaatgtgtatgcctgtactgatttagttttctttgaggttttattagggaaggtgccacaaagagcggtctggttttgagggggcctggactacgaaccctttggtctttgacaactcttacttcaaggaacttctgagtggcgacaaggagggccttcttcagctcccaagtgacaaagccctgctgagcgaccctgtcttccgccctcttgtggagaaatatgctgcagatgagaaggcattctttgatgactacaaagaggcccacctcaagctctccgaactggggtatgctgatgcttaaatggtccatatcctggagcgggacacaaactgctgcctgtatggactcgtgcgattcagggtgaaccatcagattgtctagtgtcttctttgtaataaatttatctgttcttggtactttgtctatggttgaatcggaacccattttccgtttgcctagattcttaatttctggtgctgtatccagctgaaactagtagatctatgatcttgtggctgcagcatgttcttgtcacttttatctggtctccgttggttcggttcacaggttgtgtgctttaaaaggctgtgcttaagtcctgcaattcgagtccaccaaactgtagggtgcaagtcgagattttattagtgatgcaagttgctggtattggtgcattatcgggctaatacgcttgcgttgccttctgatttt

SEQ ID NO: 25491 - DNA, 714 bp, Zea mays
  Clone ID: LIB3912-015-G6_FLI
gagaaatatgaaccccactacgactacttccatgacaaaaataatcaggccctgggcggccatcgcattgccactgtgctgatgtacctatcaaatgtcgagaagggtggagagaccatcttccccaatgcagaggggaagctattgcaacccaaggacgacacttggtctgattgtgcaagaaacggatatgcagttaaaccggtaaagggtgatgccctgctgttcttcagtctccaccctgattcaacaacagactctgacagcttgcacggtagctgccccgccatcgaaggccagaagtggtccgcgactaaatggatccatgtgaggtcatttgacctcaccgtcaagcagccgggtccctctgatggatgtgaggacgacaatgtcctctgcccccagtgggcggccgtgggcgagtgcgccaagaaccctaactacatggtggggaccaaggaagcacctggcttctgccggaagagctgcaaagtatgcgcagagtaaggtatcggtcctctgcgtctgatgagtaatcgtggcgtacgtgttacgtagttgctgtcaccattttaccagggtttaggtacgaccgagtacagcatgtataagacagtacaaacccggaagaaggaatcgtaagagttaggggacgagttaccagggtttaccgagttaaagctgagcaatctaatcaatggcaacagttcgagc

SEQ ID NO: 25492 - DNA, 815 bp, Zea mays
  Clone ID: LIB3912-016-A11_FLI
cacatctttccctcccgtcggccagcagccttacggtttaggccccgtcgcatctctcctcctcgtcggccagctgcagggcacctagcgcgtggtcagcgagcgggcggcacgggggcgccgggtgtcgagtacgccgcacggggaccgagcgcgcaggcccccacccacagacgactggggcggccttcactgttacttcggccccttcgccgccgacgagaaccaccgcgtgctggttggaatggcaagtacagcatgctttgtgattgtcagtaagaatgacatcccaatctatgaggcagaagttggatctgcacccaaaaaagaagatttgtcttatcaccatcagtttattctgcatgctgcattagatgttgttcaggatctagcatggacaacaaatgcaatgttcctgaagtcagttgatagattcaatgaccttgtggtgtctgtttatgtaactgctggtcataccagattcatgctacttcatgactcgcgtagcgaggatggaataaaaagcttttttcaagaggtccatgaactttacatcaagatattcctcaacccgctttacctgcccggctctcgcatcacatcctctcatttcgataccaaggtgagggcgctcgcgaggaggtacctgtaatatgggcatatgctggggtttcatcgtaaagcagacacgccgatttttttgtgccatcatcatctgataacacatacgtctaatttttcttggcgttggctttgttatgaccgacctatggatcattttttttcgagaacaaaatgacttggcgataattttc

SEQ ID NO: 25493 - DNA, 1836 bp, Zea mays
  Clone ID: LIB3912-016-B2_FLI
gtcgcctctcgctccgttccgctcgcttgtgttgtccttgtccgttgtgcgtgctttgtgctgcgcgcgcgtgcagcaccgcggagacggccgggagcagggggggcgggagggatagtggcggcctctgctgctgctggtcgaggcttcgattccgggcgggggctggtggtctcgagaatcccggagggaagggagcgagcgcaaagatagatacctaagcgggccgcttccgctgcacagccacaggcatggggtgcggggcgtcgagccacaaggacgccggggcgcgccggagacggcctgggagcgtcggcgacgtggtcgttttcctcccgggcctccgggtgccgagggccgtcgacttcgcccaggcgctcggcggctgcctggccagggctatagtcgagcggctgtcggctctgaggtcgcgggtcgtcgagatggcaatgcaagaatcggcggcggcgctcaagcccaggcggaaggcggctgcacggcacgggtctagtacagccaatcttctacaggccctcgaagactacttgccagttctgctgggactagcacaacaaggtagcgtcttgagacacaaagtgcagttcacctggagtaaccaagaggataatgctgaggagacagccatttcagatgtctggtacgaggtgctgtccgtgctgcacttgatggccatggtctgcttgctgcaggccaacaccctgcttctcccaaggtcatacggcgatggctacgccccaagagtttctgaagagagtagacgggccactgttgatgtcttcttgaaggcagctggatacctagactgcgcaattcgtcatgtacttccgaagatgccactggaactaaggagacaacttccagtcgacctggctgaaggaaatctcaaagctctaagcctgcaagccttgggtcagggggttgacatgcagctcggcttggctattgatagtccaaaggccactttagcagtcaaaaggcgcttagcctgtgagatggtcaaatattggcaacaagttcaagagagcattccagagcttccagtctctgatggatggggaaaaaagcaccggctatttgtaaagtggaagtatgttgaagccaaggctgcagcatactatttccacggtttgattcttgacgagggaaataccgagaaatcccatggaatggcaatagctgcactacaagcttcagaagaatttctgaaagaaagcaaaatggtttcggaagccttccatgcaactcctccaacatcgaggagtccgaatgcattcggaacagcaaaatatctgtttgacaagatcccaagagatgcttccagcaaggtccgaatcaaacaggacctgtatactcaagaaaaggtcattggagcaccacccccattaccagattttgcattggcgctaacacctgaagattatgatcttcctccactagatccactttggaacaaagaagatacacaccattaagtgtctatacagcagattggttgcttctggcaaaaaattggctctggagagaaaggaggaccaagatctaccatgtcaaaggtcgaacatggtaacaaatgaagtgtacaaaatattttcaaacaaaattacatgtcaacaaaattaagcaaggcttgaagataatctgaagagctctgtacaggcaattttcttctgacaagggaaatgatatgtcaaagggttcattgatcattgtcgatcctgattcctgatgcttttattttttcaacaacagattttcagcattcgaaatggaactggaatcagcctctgatcgaagtggaaacctttttttagtcgt

SEQ ID NO: 25494 - DNA, 1052 bp, Zea mays
  Clone ID: LIB3912-016-E12_FLI
gtgctttttggcttgttgtacctgcatgctttatttgatctggagaacgggaaccaggagctcaagagcgacctcaaggacctgtacatcaacaatgctatccagatggatgttaccgggagcaggaaggctgttgtcatccacgtcccataccgcctgcgcaaggcctttaggaagatccatgtcagactcgtcagggagctggagaagaaattcagcggcaagctcctttctatcaagaggtttgacatggtagatctgccattatcagaacaagatgaattaatggacatgctttggaatatctcttgattgaaacaccccagtatgcagaaaatggctctcttgatgatattttgtttacaccagctagaagatctagggctttcaagatcgcagcgatgagatgccctcttccccgaccaccagatcacagcgatggagctggatccggtcgccgctggggcatcctcctcgccagccagtcgcagatgtccctgatggcaagcttcagcaatcgtcaagtacaaagacatcctcccgtgcaaaattcaatttgcccaatcctaatctcttctatatagcctcacagatcgcagcgatggagccggatctggtcgccgctggggcatcctcctcgccgccgccttcaccggtgtcggccacgtccccgccgtggcaaatgcgagttgaacaagtggagcttatcaagagtttcagaattcgggtatgccagggtgcatgccacaagaggtgatatgctggttcagtttgtaagctcaagtacgatggaggttttggaccaatttagaattgtgaagcctgatccggcaaggaggctatggaacaagccagtttaaccatagctgtagtgcatgcaaaagatggagctggagctacttccttatattattgttatgctatataaaagatggcgttgaattacacatcagcgtgttgtctaagttctatacttatctgtgtggtgtatggttctttatgacatttccacatgatagttctttctccctctgtaaaatatattgatcgac

SEQ ID NO: 25495 - DNA, 775 bp, Zea mays
  Clone ID: LIB3912-016-E4_FLI
gacgcgcacaacacagcgcccacacacacacagacagtcttacgcgacgacacacacgcaaggcggacggacatggatatgagaggagggcacaacatgggcggcatggcaccgccgccgtcccctcacggcggcatgcggaagcgctacgtccacatgaccttcttctggggcaagaactcggagatcctcttcacggggtggcccggcgcgcgcggcggcatgtacgcgctggcgctcgtcgccgtcttcgcgttcgcgctcctgctcgagttcctaggctcccgccgcctggacgcgctcctctccgccgcggccggccggcgcgcggcagcggcgggggcggcgcgcacggcggtgtatgccctgcgcgtgggtggggcgtacctgctcatgctggcgctcatgtcgttcaacggcggcgtgctcctcgttgcagtcgcgggccacgccgctggcttcctggcgttcagggccggcctgttcggcgaccggcgggcgcaggtggagggcgacggcaaggatgaggtcgcgccggtcgtgtgctgttaggctcgtccgttgtcgcccgcggcggtgcccatgacgattcggtgggtttgtctatgtcaacggtgcatgcatcgttcgggccggcgcgttcaatggatccgtgttgctgtttggttgaaatcaagatgcatggcgatcgacatgcagttgtaagcttaggtttcggtgataaattgtgaatctcttggctgtatcctattcagacatagtcttcagtcacacc

SEQ ID NO: 25496 - DNA, 1021 bp, Zea mays
  Clone ID: LIB3912-017-A1_FLI
tccgaattcccaggcaggcaggtcggcgaggagggcaggaagaccgaagaccgagccgtgcgggggctcgggacgggaacgggacaggaccccaaaatctcagatccttcctgcccgcccgcccgtgcccgtcgacgcgtcgttcttgccggccgcgccccacctccgccctctcctcctccagggggatcggatacgccacaggctgcgcgatggtgctgtgggtcttcggctacggctccctcatctggaaccccggcttcgacttcgacgacaaaatcctcggcttcatcaagggctacaagcgcacctttaatctcgcttgcattgaccacagaggcacaccggagcatccggcgaggacctgcacgcttgaaaccgacgacgaggccatatgctggggaattgcatattgtgtcaagggtggtccagaaaaagagctaaaagcaatgcagtacttggagagaagagagtgtgagtacgaccagaaaatatccattgatttctacaaggaaggagatcccttgaaaccagctgtgacgggcgtcttagtgttcgtttccactccagatccaattggcaacaagtactatcttggccctgctcctctgcaggatatggcaaggcaaattgctacagccaatggccctactggctataatagggattacctgttctcaatggagaaggcattagccagcattagccacgaagatgattcgatcatagagcttgcaaacgaggtgaggaaggtgctcaacagaacaaaggagaccaagatcactggtgccaatgcttccctgaaatcacatgcccctcttgtgcacctgtccgcgcttccagaaggcaccgttgtggactcgagatagcgacctctactcggaatttactttcagctcttgcatgtttgtggttgtggccatcatgtactgattttcccttttcaacagttgtcgtgaggctgtatcgtctggagtaaaaaaaaatgctaaaagccggcactaataatgatattaacttg

SEQ ID NO: 25497 - DNA, 1220 bp, Zea mays
  Clone ID: LIB3912-017-A11_FLI
ctagggtggctggagtggtgccgcggttggatggccatcgtgggggagttcctcttccagcgcatcgccgccagccacctggccaacccgctcgagttgcccccgctcgatggcgtctccatcgtcgtcaccggcgccaccagcggcatcgggctcgagatcgcaaggcaactcgctctcgctggggcacatgttgttatggctgtaaggagacccaaggtggcacaagagttgattcagaagtggcagaatgaaaattcagaaacaggaagaccactaaatgccgaggtgatggaacttgacctgctctccctcgactcggtcgtaaaatttgctgatgcttggaatgctcgtatggcaccgctgcacgtgttgatcaacaatgctggcatcttcgctataggagaaccccaacatttttcgaaggatggacatgaagaacacatgcaagtgaaccatcttgcacctgcattactggcgatgctgcttataccttcccttctccgaggttctcccagcagaatcgttaacgttaattcaatcatgcacagtgtaggttttgttgatgctgaagatttcaacttgagaaaacataaatatagaagttggttggcgtattcaaatagcaagttggcacaggtaaaatttagtagcatgcttcataagagaattcctgcagaagctggcatcagcataatttgtgcttctcctggaattgtcgacacgaatgttacaagagaccttcctaagattgttgtagctgcataccgttttcttccctacttcatattcgatggtcaagaaggttctaggagtgcactgtttgcggcatgtgacccccaagttccagagtactgtgagatgctcaagtcggaagactggccagtctgtgcttgcattaactacgactgtaatccgatgaacgcgtctgaagaagcgcacagccttgaaacctcgcagctggtctgggagaagacgctcgagatgatcggccttccgccggatgccctggacaagctcatcgccggagaaacagtgccgtgccgttatggacaataggatgtcgtcgcacagatccaaacaacaccacttttcagttaacagtttcgaggtggtttgttccagcctttgattagagcacctctgttgtatcctttttttatcctaaatttgcaggggggaaacaccgtgtaaggaagaaaaagaaactgttaacatct

SEQ ID NO: 25498 - DNA, 898 bp, Zea mays
  Clone ID: LIB3912-017-E10_FLI
aagagcggcggcgcgggcggacaaggagcaggcggaggaggagttgtgccaagccacaatgggtatctcgcgtgactcgatgcacaagcgccgagccaccggtggaaagcagaaggcctggaggaagaagcgaaagtatgagcttggtcgccagccagccaacaccaagttgtcaagcaataagacagtgaggagggtccgtgttcgtggaggtaatgtgaaatggagggctcttcgccttgatactggtaactactcatggggaagtgaagctgttacccgcaagacccgtatcctcgacgtggtctacaatgcatcaaacaatgagcttgtgaggacacaaacccttgtgaagagtgccattgtgcaagttgatgctgccccattcaagcagtggtacctcactcactatggagttgacattggtaggaagaagaaaacccctgctgcaaagaaggataatgctgagggacaagaggttgaggcagcagctgaggaaacgaaaaagagcaaccatgtcacgaggaagcttgagaagcgcaaggagggacgtacccttgacccacacattgaggagcaatttggcagtggacggttgctggcatgcatttcttcccgccctggacagtgtggccgagctgatgggtacatccttgagggtaaagagcttgagttctacatgaagaagctacagaggaagaagggcaagagcgctgtagcttagagcattctcatggattgtcttgcaccgaaatgtgtgtcctgatgagtacactttttttggttagtcgtctcaagttcagagcgttatgccatgttttcagtcctgattagtacactgttttctaaaagcgattgagctctagtccaatgtattgataatttctgctgttgtcct

SEQ ID NO: 25499 - DNA, 1690 bp, Zea mays
  Clone ID: LIB3912-017-F10_FLI
gcgggcgaaaccgaaagcgagaggggggagactgggagagagagggacgagcggcgcggtctgctggtccgtcggcggcgaccgcgacgcctcgctgcagcggccgacgcatccgccgcgggcgtggagctcgccctctcctggctcgcaggagctcgcgagttgtttcgggtgcgagtgctagctgtcgaaggcaacgaggaaaagactgccatggggatttcagctaagtggatcaaatcacttgttgggataaaaaagcacgaaaaagggcgaaatgctgaatgcagcgatgcgaggagctctgctgtccagttgctacgcaaacgggaacattctgttgatacagaaagtgttcctgcggctgaagaactcagagtacaggccgaaccattggcaggtgacacaaatacagaaacaatatcaaattctgcctcctcaccgagcacatctcttcaagcttctcagaccgaacttggtacaaaggagcatcaggctgctgtagttatccaatctgcctttcgagcattcttggctaggcgggccttgcgggcgttaaaaggactagttagactccaggcacttgttcggggtcatgctgtaagaaaacaagcagcagaaacacttcagtgcatgcaagcgctagtaagagctcaagctcgtgtcagagcgagacgagtccgtgtttctttggaaagccaagggactcaaaagaaacctcctgaagaaaatgttcatgaggatcatgttcgagatattgaggaagactggtgtggcagtataggctcggtagaagaaatgaaagctaagacattaaaaaggcaagaggctgctgctaagcgggaaagggcgatggcatatgctttaacccatcagtggcaggcaagttcaaggaaacagaaagcagcaagcctccaaggccaaggactcgccggggacgagaaccagtggggacgaaactggctcgagaggtggatggccgcgcgcccgtgggagaacaggttacttgacagcaacgccagggacagtgtcactgccggcgacgacgacgacaaaccagcggaggaaggcaaggcaaaagctccggacctgagcaaaccaaaaggaaaagctcccgttttggcctctcagtctaacgggtcgcggcaggagaaagctgcagaccacgagaagtcgcattctgatgtcagcggctgtggctcttcgtcggggcggtctgcggacgtgcagccaacggtttctctagagtcgtccaaggtggaagtgaaggtgaaggcaccgcaggaggtcgcagatgaagcgagctctggaccgtcgaatccggcttcccggtccgcaagcaatccgaaagaaaggccggcgcgaaccgatgcgccagcgaggaagcggttatcgcttcctaacaacgcaacagcagccagtcggggagtagggaagcgccctaccaacagtagtcggagtcggacgaacgtggcctcgagaccgaagaatggcagaggcgcctccagcccaggcctcgagtagtgtcgtagggtggttgtgttgtgctggtgtacattgtttacgttgctgtgtattctaccattgtgttatgtattttttgtgcgtgtgtgtgtctgtgttctgttcaaattgcgtcctttcgaactgctcagtctgtggacgtttggaaaagcatgtttctggattc

SEQ ID NO: 25500 - DNA, 1157 bp, Zea mays
  Clone ID: LIB3912-018-E11_FLI
ggcgacctgctctgctgctcctctgcgccgcttcggcctcacgctagctcctccccctgcgtcggcaggcaacggatagatacgcatcgaggcagagggcttggccgagatctccccactaccccgcagcgtctttaaaaccaggacctgcttgtttgattgtttcatcgatcgtcaatctaagtagctagccagcactacagaagggcgtggcaagaatcaggagagagatagcaggggggctagctagctgagctcgtgcgacgaagaatggccggaattggcaggaacatggtggcgccgctcctggtgctcaacctcatcatgtacatcatcgtcatcggcttcgcgagctggaacctgaaccacttcatcaacgggcagaccaactaccccggcgtggccggcaacggcgcgacgttctacttcctggtgttcgccatcctggccggcgtggtgggcgcggcgtccaagctggcgggcgtgcaccacgtgcgcgcctggcgccacgacagcctggccaccaacgccgcgtcgtcgctcatcgcctgggccatcacggcgctcgccttcgggctggcctgcaaggagatccacatcggcggacaccgcggctggcgcctgcgcgtgctggaggccttcgtcatcatcctcgccttcacgcagctcctctacgtgctcatgctccacacgggcctcttcggcggcagcggtggctaccgggaccacgactacggcgtcggcggcgcggccggcgagcccaagggggtcaccagggtctgaggattctgatcgatgcagctcgtacatgtgtcatcatatcaggcgctgctggagtgtgatgacgtaataagtagtacccatatatatatatggtgtgtgttgacgtaccacgtacactacgtacgtgtgtacctagtagctagctagtcagtccatcgtctgctcatctcgtcaggtcatcagatctctcggttctggtttgtacatcagtacgtgcatgcatgtatcccgtgtcaaatgtatttcgtcacccgtcagtttcagccggtcagtgaccaagtttatttcgtcacccctcagttcagtgacattggtgacatgaggtcgtggtgtcaacttttggctcaatgtattatgtacctgatcttttttac

SEQ ID NO: 25501 - DNA, 1439 bp, Zea mays
  Clone ID: LIB3912-019-E4_FLI
atttcacctcctacgtgccgaatggctcctgtgtctcacaacaatgattccgattcgagtgatagtgacgacaacacaatcatactggccactcttcttaccctatgcatcgaagctaccaggcgtaggcgcaggcagtcttctatccctcgccgcgtgatcgctagggatcattttgctagggagaaccttatccgccatcactacttcggccctaaccccgtgtatccagctcacatgtttcgccgaaggtttcgcatgagtcggccattgttcctccgtattttgcaaggcctccagcagcaggatagttacttcactcaacaggtcgacgctacaggcctcgccggtcttggaccacttcaaaaagtatgtgcagcaatgcggaccctagcttacggcttacctactgatgccatcgacgaatatatacagataggcgagtctacggctagacaatgccttattcgtttctgtcgcgcactcattgcatactttagtgtgtggtaccttcgaactcctaaccaggccgacattgcacgcatcatgcaacatagcgagtcgagggggtttccaggaatgctggggtccatagattgcatgcattgggagtgtaggaactatcgtggtcgaaattctagacctaccatgatacttgaggcggtcgcatcgtacgatctatggatttggcatgcttttttcggcatgcctggtacaaacaacgacatcaacgtgctacataggtctccggtttttgacccaatgacaagcggtcaaatgccccccgtgcattacacagtaaacggacatgcatacaactttgggtactacctagccgatgacatataccctaactggccaacttttgtgaaagccattcggcacccctgggaggaaaagaagatctatttcacgcagatgcaggaaagtcaccggaaagatatcgagcgcgcattcagtgtgcttcaagcacggtgggcagtgctacgtggtcttgcttacagacgggatcgtaaccgtctaaccgagatcatcactgcttgcataataatgcacaacatgatcattgaagatgaaggggagtttgctgccaacaccgactttggagacaatgcttctgccactgcacattgcgaactcatacaagagggaaggtcggattgggtcatcgatcactttgatctacgtcgccaggaacgattttgcaatcttcaaaatgatcttgtcgagcatttgtggaccaaacgtgggagtatgtgatgaaacttgaaccttagtcctttaaatgatgtggctccgtagtgtatgttccatgtgtgtggtggtcattgtgttatgtttcatgtgtgtggtagtgggtgtgctatgttccatgcgtgtcttagtttgagttaggggttctgtggtcacgggcaatgagtacgaattcatttactctt

SEQ ID NO: 25502 - DNA, 816 bp, Zea mays
  Clone ID: LIB3912-019-G10_FLI
ggagaggggagagaaaacctcgccgtcaatgtcagcgttcgttcccaagggcgctagggtttaaccccccaactgttcggtctctctctctccccgaatccaattcagcgtcatctagtccgggagcctgcgacatggggtacctccaggaggcccgggagaatcacgtcaagaagaaggtcgaggaagctctgaggagcaaaatgaaacaaaaggctcttcaggaatgtgatttctattgttcaaaatatgctgagtgtgcacgaggaagaacattttctgtggtatggcaatgccgcaaacaagcaaaagagttgaatgagtgccttcatcaataaataataggagatgtgtgtatcattgcattaaggagataaatatgtaaattagaagacatccaccatgctcaccccctcatccccacccacccagcccacacactttcagcacaaatgatgcaatcctggaagaaatgaagaaggcttatatgattgagcaaaagagcaaggagataaatcaataagcaaaaatccattgcacaatgtgcatcacgatcaccctgcttgtatgtatactgttgcctttgatagatactattcatgggtagtgttgcaaacattgttctccccacatgcataacctgatactagtattgggtggcaaactggcaatcttgctgtttctgtcgaacatgtgatataagttgttttcttctgttgcaattttcatcccaaatagattttgtttggatgcagataacacaattgtatttttgttgccctgctaccattagctctagttccaccaagattacat

SEQ ID NO: 25503 - DNA, 2017 bp, Zea mays
  Clone ID: LIB3912-019-H8_FLI
ggtgggtcattggctcactgcttcctgcaacctccaaccgggcgggcgcgggccactggaccagcgacacatccggggagaagaaagctcggaggatccgaacgacgctgacggcgaggccgtaaccgcagagcagcggttgttgggatctcctgctcctggtcctggatgctggcacttgaattccagcatgaggtcaaagaagatatttggtttatccatttcccttgtactcatcaacctagcttctatattggaacgagctgatgagaatctcctcccagctgtttacaaggaagtcagtgctgctttcgatgccggtcctactgatctggggtaccttacatttctgatgaactttctgaagtccatagcatctcccttggcaggtgttcttgctcttcactatgatcgccctgcagtgcttgcgatagggactgcgttctgggctttgtcaacgggggctgttggtgtcagccagtattttgggcaggttgcattctggagagctattaatggtgttgggcttgccattgtaataccagctcttcaatccttcattgctgatagttacaaagatggcacacgtggagcgggatttggtttgctatcacttattggttcagtaggtgggataggaggtagtgttttggcaaccatcgtggctggaggggattattatggttttccaggatggcggcttgcatttatatctgtggcatttgtgagcttcttaattggacttcttgtatacctttacactgttgatcctaggaaattatctccaagccattttggcggtggtgaggacaatgagaggttacatttggtcagcaatggtatccttcctccacattccatctggaaggattcgtggatagcggcgagatccgtaatgaaagttcggacctttcaaatcattgtgttgcaaggcattgttggctctttaccatgggctgctgtagttttcttcaccatgtggtttgaactcattggtttcgacaacagcagctcagcggcgctgaatagctttttcgctattgggtgcgccagtggatcatttctgggtggtgtgatagcagatgtcttatctagatactatccagattctgctcgcgtcatgtgcgctcagttcagcgccttcatgggcatccctttttcatggatcctcctcacagtcattccccagtctgttgattactggtctgcctatgccgtcacactctttttaatgggaattaccataagctggtgcgctacttgtgcaaacaaccccatgttcgcagaggtagtccctcccaagcaccgcacaatgatctacgcctttgaccgcgcatttgagggttcatttggctcgcttgctgcacctgctgttggattagtgaccgaaaagatctatggctacaatgcaaaggccgtcgatctatcacatggatcagtggatggagcttatgcactctctagaggtctattgactatgatgattgtcccttttgctctgtgcctcatgttttacaccccactgtatacagtgttcaagcgtgaccgagaaaatgctagattggccagcatcaaggagcaggaacttacttgaaaagctttctaacaaggagtactgatgtagtttggattacatagtctacaacaccgccaacctggaggttttgattgaagtactttggttgatgtctaggatactcaggttttatgtttcttcagtcggatatcatttatgagtacacattttgtacacaagcgatagattgtttgttctcgtcgtatgtaactggttcagtatacattcggaccttaacctggagagtggagacagggtgttgcagctttccattgaactttcagcatatagatacagttctttctcgttttgttactatttacggtctgtaatcttgttttgaactgccttaaccatcacgccattccaatgatgatgtcatttgcagaactcttgtaccagtttcagtttatatcattataagatcaacgcttttctgac

SEQ ID NO: 25504 - DNA, 1188 bp, Zea mays
  Clone ID: LIB3912-020-A9_FLI
ccctgcaatggcccagtctggtcgtccatgttcctttgaactttctctctcttgcttctcccgagccccgactcagactcactcccgtcccccctgcctgcctgcgcgcgctctctgcctcgtagcggcgacgacgccctcctccaggtggccaggccatcgtcggatcgtattcctcggccccttctccggtgatgagcacccagaataaaaggctcaaggatgtggaggtcagtttcccaatcgtctacggaaccatttccttctggctcggcaaaaaggccagcgagtataactctcacaagtggactgtatatgtccgctcggcaaacaatgaggatctgagtgtcatagtcaagcgcgcggtgtttcagcttcacccgagtttccagaacccgacgagagtcgtggagcagccgcctttcgagctgtccgagtcggggtggggagagtttgagatagccataaccctttatttccacagcgatgtctgtgacaagcgcttggatctgttccatcagcttaagctgtatccagaagaggaagctggacctcaatcgaccaaaaagcctgttgtcgtggaaacgtacgatgagattgtcttccccgagcctacagaggcctttttcctacgcgtgcaaaatcatccagcagctaacgtgcccaggcttcctcctggtataaccttgcctcctccaggccctatggaaattgttccgtatgaaaagaagcgaggtgacactaaggatcatcctttgagtcagtggttctcgaatttctctgaggctgacgagcttttgaaactagctgcagctcggcaacaggttcaggttcacatagccaagctgagaaggcagttaaccatgatagaaggaatgccccagcaatcgaaagccttttctgtccctggacagcagtttaggcacatctaatgtagtgcacctggtttgtaaggaagatgttggaatggaacctttcagcaactgcttgacagattgggttctgtgtattcgcattgcagtcgctgccttgggcttgcaaatgacctgtatattctatgaagtgtagtaccgttaggctcataagagaacactactagcatgacctgttctttttaactttttcttatatctccattaccgttcgtttccctatgaaaatggcatgtcctcgttgtggctcttcagt

SEQ ID NO: 25505 - DNA, 1187 bp, Zea mays
  Clone ID: LIB3912-020-B6_FLI
ccgaggggaggccagagctagcggcgaggccaagggcgcgggcgcgggcgcggacggcaatggcgagagctggaggcggcggtccggtccgcggcgcggcgctggtggtcgtgctgctaggcatcgtcgtgggcgcggcgagggctcagctgcggcagaactactacggcagctcgtgccccagcgcggagtccacggtgcgctccgtcatctcgcagcgcctccagcagagcttcgccgtggggcccggcacgctccgcctcttcttccacgactgcttcgtcaggggatgcgacgcgtcggtgatgctgatggcgccgaacggggacgacgagagccacagcggcgcggacgccacgctgtcgccggacgccgtggacgccatcaacaaggcgaaggcggccgtggaggcgctccccgggtgcgccggcaaggtctcgtgcgcggacatcctcgccatggccgcacgtgacgtcgtctccctgctgggcggtccgagctacggcgtggagctggggcggctggacggcaagacgttcaacagggccatcgtgaagcacgtcctcccgggccccggcttcaacctggaccagctcaacgccctcttcgcgcagaacggcctcacgcagacggacatgatcgcgctctcaggcgcgcacacgatcggggtgacgcactgcgacaagttcgtgcggcggatctacacgttcaagcagcggctggcgtggaacccgccgatgaacctggacttcctgcgctcgctgcggcgggtgtgccccctcagctacagccccacggcgttcgccatgctggacgtcaccacgcccagggtcttcgacaacgcctacttcaacaacctccgctacaacaagggcctgctcgcctccgaccaggtgctcttcaccgaccgccgctcccgacccaccgtcaacctcttcgccgccaacgccaccgccttctacgaggcattcgtcgccgccatggccaagctcggcaggatcggcctcaagaccggcgccgacggcgagatacgccgcgtctgcaccgccgtcaactaagcctgcattggctgcttgctgcttgcgtgcgtgggtttcacttatttcacttcttctttctcttgtttatatacgtacgtttgtcggatggattttggtagccatgagatgacatccttgctctgagct

SEQ ID NO: 25506 - DNA, 790 bp, Zea mays
  Clone ID: LIB3912-020-D1_FLI
tgcggcttcttcggcagtgctgcgacgatgaacatgtgctccaagtgccacaaggagatgataacgaagcaggagcaggcccagctggctgcctcctccatcgatagcattgtcaatggcggtgacggcgggaaaggacctgtaattgctgcatctgtaaatgtggcagttcctcaagttgagcagaagactattgttgtgcagcccatgcttgtagctgaaaccagcgaggctgctgctgtaatccccaaggccaaggaaggcccagaccggtgcgcggcctgcaggaagcgtgttgggctgacgggatttagctgccgatgcgggaacatgtactgttcggtgcaccgctactccgacaaacatgactgtcagttcgactatcggactgcagcaagggacgcgattgccaaggccaatcctgtggtgagggcggagaagctcgacaagatctgaggcgggcattgggggagcgaaatggttgcaatctgcaagaattcaacatgctgtctttgctgcgttatcattgaaacttgccattcttgtctgctgctgcgtcccgtgaggttcaatactgtgatgcacacagcatccaggcagccgcaagaatttcatcaaaatggtttcccgtgttggctatgtcgtgtaagcttaattcagttattcatggtggtttcggtcggtattgtggtattcccatttaggtagctctgtaatgtattgctgtctcaagcgtgttacattccaattagtaatagtaatcagcaattgtctgccccatatatttttt

SEQ ID NO: 25507 - DNA, 1910 bp, Zea mays
  Clone ID: LIB3912-020-D3_FLI
gaggagcaaaagcagcagatcggagctccagagcttgaagcctggaagcggtggaacttctggcacaagggacactttaaggaaagatgaccggtgtcgaagctgccgccatatcttctgtagcatctggaatattaaagatcgtggccaacaagttggcaccactggttacaagaaagtatagctcaatagtgggtgtggaaaaagatctccaagagcttcaggtcctagtagaggatataaactattggctagaaagcgccggatatcaagctttagacgatgatgcatcagttagttggttcaagcagttgaaagatgttgcttatgctgttgatgatgttgtcgatgagtaccagctgaaggccgagagaaacgatgcttctggtgatggtggtttcgtgtccagatatatgtgtaaaaaaccagaatcgtttatatttcagtgtaaggcagcaaagaagatcaaggcaatcaagaagagatttgctgcaatcgtgaagcaaagagctgacatcaatataatagctagggtctggatgcgagtggaagctgctgcaactgcctgcagaccaatgcctggggtcctcttcctactccaacttcggccacctgaagacccttcggctgtggggggtgacagagctagggtctggatgtgggtggaagctgctgctacacatgccagaggggttgcggagcctcatatccctccagtcactgactgtgtccgcgtgctcagctcttgtagtgctgcgcgtgtccctgccgaagcttcacatccatatctgtcatggcctgagcagccttccccagtcaatgcggcagttcgcatccctccaggtgcttgccatagatgcatgctacggactccaccggctgcctgaatgcctaggggagctctgctctctacgccagctcagaatcagcgattgcccgaggctggcttgccttccccaatccatgtccggcctcacctcccttcaacaactccagatcatcgagtgccagggcctcgcgtccttaccgagggggatgatgagcagcctcgcctcccttgaaaacctggtcgtcgatggctgcccggggatcaaatccttgcctcaagacacaaagggtctcaccactctgatggggttgcggatccgtaggtgccctgatctggagaggcgttgtgaggcaggacagggggaggactggcacctcatctcccacatccctactttgatgattgggttatcagtggcctgcatcatctggtaccttaaccaagggtaaaacaaacaaaggagcggggaaataccttgctctaatgctgggagaagggggagggattcaacaaaaaaatcccggatttcagccgacgagctgggcgacagagaaggaagaagagaagagggagccgcatgcggctctttatgcatgacatagctgccatgttatccgattgaagcttcctttcaaccatgtccgtgctgagctgcccggccccgggcatggtgcagtggttcgacgaggccaccaagattgaggtcaaggacctcgtcaaccgctatcctcgtcgtcgaccccaggcaccacgagcacaagaagtttgggcggctgtggtgcacggccaggttccagaagtcctaccgttgagtgatggcctgccgaattttgcgaaagatggctgtgcttgttggtggtttcgttttctgtccatggagctgcttacttagctggctggctgttgctttaccttaatgttcagttatgaagactagtaattagtctctggagtatgttttgctgttataggttatagttgcgactggaatggctcctctgctctaattcatatttgataggcctaatacattgttgggaaagaaagatacaaaaagtcagtatcagctgcttacttatct

SEQ ID NO: 25508 - DNA, 1177 bp, Zea mays
  Clone ID: LIB3912-021-A4_FLI
tggtcgtcgcttcattggtcaaaccttgagagccccggttcagcaatcgcagttccacaaggcggcgatggacggcggcggggtcgatacggccacgacggcggcctggatggagaagcaccggcacatgtacgagcgggccacccggcacccgttcaccgtctccatccgcgacggtaccgtcgacatgtctgccttcaagcgctggctgagccaggactatctgtttgtaagggaatttgttgcattcatagcaagtgtactgctcaaatgctgcaagcaagaagacagctcggacatggaaatcatcctgggtggagtagcgtctatcagcgacgagatctcttggttcaagaacgaagctactgtatggggcgtcgatctagcaagtgtttcccccttaaaagccaatctagagtaccacaggtttctccggagctttactgagccagagattagctatgctgttgctgtaactaccttctggacgatcgaaaccgtgtaccaggacagctttggtttctgcatacaagacgacaacaagacgccgccggagctcctgggcacctgccagagatggggcagcgccgggttcagacagtactgccagtctctgcagagcatcgtggatcgttgcttggctaacgcaccggctgatgctgtccagagtgctgaagaggccttcgtccgggtactcgagctggaaattggtttctgggatatgagctcttctcggtcctaattaccagcgtgttctctgagtccaaacatctacgcaaataatcgaacgaaataaatggtgcttcgggctcagacccaggttttccccatgtcaccttattcctatctttggttttcgcgtgacagtactttccgctaggcctgggcaaaaagaaccggaaccgaggaaccgaaccgaaataaccgagaaccggaaccgaactaaccgaaccgaaggaaccgttatgaatttcggttctggttttttgagaaccgaaataaatgagatattttcggttctgcactccaaagaaccgaaagaaccgaaagaaccgaaaaacccaaaagtattagattcaatttgttacatgtgtttgtaacttcggatgttgtgttatcgacttatgttgaacctctaaccatccatgtattatctatgaaattatagtcattgtgc

SEQ ID NO: 25509 - DNA, 944 bp, Zea mays
  Clone ID: LIB3912-021-C12_FLI
gaaaccatcgggggcaaaaggataggagaataaggaaaaaacaatggcggtgctactccgccgcgccgcggcgctcctcgtcgtggctgctgtctgcgcggacggcgcctccacgttctactcctccgaccccaacctcggatccgcccgcgtcgtcttccagacgaattttggtgatattgagtttggcttctttcctcatgttgcacctaagactgtcgaacacattttcaaacttgtgcggcttggatgctacattacaaatcacttcttccgggttgacaagggtttcgttgcacaagttgctgatgttatgtcaggtcgaaccgcccctatgaatgaggagcagaaaaaagaagcggagaaaacaattgttggtgaatttagtagtgtcaagcatgtcaggggaatcctctccatgggaaggcactctgatccagacagtgctggctcttccttttctattcttctgggcaattcaccgcatcttgatggccagtatgctgtatttgggagggtcactaaaggtgacgatacattgactaaactagagaggcttccaacccggagagaaggcatttttgtaatgccgatcgagcgtatcaacatcctatcaacttactattatgatattgatctagagagctgtgaagcagaaaaatctattctccggaggagactttctgaatcagcatcagaagttgagcgatggagaagaaaatgctttgcttaatggtggaataaggactgcatattccgtttcatgatgctggatggtttcctgaggctggatatggacgacggtgtggaaatgtgtatgccgcgtgttcttatgctatcactgtaatacttgagtagatgttagatgggtcctaaggttccacatggatcttgtttgtaacacatgagcagatgagttgttacaataaaccttcaattcgttt

SEQ ID NO: 25510 - DNA, 647 bp, Zea mays
  Clone ID: LIB3912-021-H11_FLI
agaaggcgagaacgcactccgtccctctcctccaggaccgcccgctcttatcccgtttctcccttctctgggctcggagaatcggagatggcgtccagcgcctctcggttcatcaagtgcgtcacggtcggcgacggtgccgtgggcaagacatgtatgctcatctgctacaccagcaacaagttccccactgattacatacccacggtgttcgacaatttcagtgcaaatgtcgttgtggatggcaccacggtgaatttgggcctgtgggataccgcagggcaggaagattacaaccgactgaggcctctaagctaccgtggtgcagatgttttcgtgcttgcattctcacttgtgagtcgagctagctatgagaatatcatgaagaagtggataccggagcttcagcattatgcacgtggggtgcctgttgtgttggtaggcacaaaatttgatcttcgtgaagacaagcactacttgatggaccatcctgggttggtgcctgttaccacagcacaaggggaggaacttcgtagacaaattggtgctatgtattacatcgaatgcagttcgaagacacagcagaatgtcaaagctgtgttcgatgctgccatcaaggttgtaatccagcctccaactaaactaag

SEQ ID NO: 25511 - DNA, 818 bp, Zea mays
  Clone ID: LIB3912-022-A9_FLI
caaaagtctgtcatgaagcgaaagagatcttcaaagagacaaaaaggccaagttggtcatggaaagcttgaaattttattgcatggcgtcgaagaagaagcagtcgaacccgatgcgggagatgaaggtccagaagcttgtgctcaacatctccgtcggcgagagcggtgatcgcctcacccgcgctgccaagtgacacgaccttgacagtcaagatgctctttcagctaggcagagcatgttctatttacagcaggccagcagacaccaggcagtaaggtgacgtatgagtcaattatcaggatggaaatgttttttggcagctttctcagtgaatcagtatcaccgcagaacctttttggacacctagatgtcgagagatgcccattcctaaggaatatcaatggagctacaaccttttccctctcttctgctttgccagtagctgctcaaggaggcaagggtccaattttttaggaagggtcaggctttgagtcaacattcaagcttttccatggccgagatggaatagttcccctttcagaaagatcatatgtatctgatgaaaaccacaatgagagcattgacgtcaagttatatacttagttaggctcaatttagagtacacttatgtacagtacacttatttatattgaaccgtcagagttcatacatatgtatcaagttatatacttagttaggctcaatgttagcacaaacagttgatgagcaactttaaatttagagtacacttatgtatgagttatttgacaatgcttatttatgagatattgaatgttatttatctatattatatt

SEQ ID NO: 25512 - DNA, 1579 bp, Zea mays
  Clone ID: LIB3912-022-C12_FLI
gaagcaacaacgtaaacagccataattattctcaataacccggtagcaatgcaggggaattaacaactcttacaacatcaggtgttgtaaaccacacaatacttcagaacagacacacataacacgatagcaggagcaactctcggcagatcacgggataagggcagcacactggcctgatgctgcgtcatcagcaaacttctctagtactcgtcaccctcgtcgccatcctcgccctcatcgaactcagcaccgacctcctcgtagtccttctcgagcgccgccaggtcctcacgggcctcagagaactcaccttcctccataccctcaccgacgtaccagtgcacgaaggcacgcttggcgtacatgaggtcgaacttgtggtcgatgcgggagaacacctccacaacactggtggagttggagatcatgcacacggcacgctgcaccttggccaggtcgccaccaggcacaacgctaggaggctggtagttgatgccgcacttgaagccagtcgggcaccaatccacgaactggatggtgcgtttggtcttgatggtggccacagcagcattcacatccttggggaccacatcaccacggtacatgaggcagcaggccatgtacttgccatggcgtgggtcgcacttggccatcatgacgacggtggtgcctgtggattcaagaacgtgaatctgccgccgttctcggcaatgacgtcgtgcggcaacgagcccctgttcaaggacggcaagggctgcggctcctgctaccagatacgatgccaaaaccacccggcctgctccggcaacccagagacggtgatcatcactgacatgaactactaccccgtggccaagtaccacttcgacctcagcggcacggcgttcggcgccatggccaagcccggccgcaacgacgagctccgccacgccggcatcatcgacatccagttcaagagggtgccctgcaactaccccgggcagaaggtgacgttccacgtcgaggagggctccaaccccgtctacttcgcggtgctggtcgagttcgaagacggcgacggcgacgcggtgcaggtggacctcatggaggccaactctgcgtcgtggacgccgatgcgcgagtcctggggatccatctggaggctcgactccggccaccgcctcaccgcgccattctccctgcgcattacgaacgagtccggcaagacgctggtggctgaccatgtcatccccgccaactgggtgcccaacacctactaccgttctatcgtccagtattagccgctcccagctgctgcgccggccggataataatatacaattctgtgtcattgtgctttactattagtttggtattagtattgtatttctgcatgggactgatgaggcacagagctgaagtgaggtgcctcactccattgctaatttgctactaggtgttaagttggtgtgcggcttcagggagttgaagactgggaagtggaggaagcagtgctttttcccgcccattgtcgtgaatgcatgtaccagtgcgattaagattatataaattatattgacagtattctgtgtgccat

SEQ ID NO: 25513 - DNA, 2585 bp, Zea mays
  Clone ID: LIB3912-022-D1_FLI
cgccggccccggagctgccgctggtagacgagatgttcgaggccgtccgatcccgtggcgctggcgtccatgtggtccctacctttgctggatggttttcgtggaaagaaatccacccagttgagaagcagaccttgccttctttttttaatggaaaatctgagaagcggacacctgaggtatatttggcggttagaaattcgatcatgatgaaatttcatgccaatcctcaattgcatctggagtccaaagacctggctgagttgtcaatcggggagaccgatgctcggcaggaaatcttggaattcttggatcactggggcttgataaatttccaccctttcccaccagatggacatgaggagagtaagccagaggagacccaagacaattctaatgacgagaaagcttctttgatcgagcaactgtttaagtttgaatcagttcaatcatatatgacgcctttaccaatgaaagaagatgtgagagctccgcctcctctgcctagcttgattcctgaatctgtactcattcaagatgtggttgcagcagctgagccttctgttgagtaccactgcaattcctgttcagttgattgctcacggaagcgctatcattgtcggacccaggcagattttgacctctgttgtgattgctataatgaagggaaatttgatccaggcatggccaaaaccgatttcatcctcatggattctgcaggagtttcaggtgctagtggtactagttggacagatgaggaaacattacttctattagaaggtttggaaatttttggtggaaaatgggctgagattgctgaacatgttgctactaagacaaaagcacaatgcatgttgcactttcttcaaatgcaaattgaagaccgcttccatgatggcaaagatattaatcaaaacatcccagtaagtacagatcaagccacaactgagaaagccattgctgaaacatctgagaaaatggaagttgaagataaagtggaaggaagaggtactgtggatgaaaaggcctcagagaaaacagagggaaactgtgaagaaacaaaaactgaaaatgccagtgttgttgtaaataaagatactcagaattcagatggcagagattcaggtgcatctccaagcactgaagagccaaagcaatcttctgatgagcaacctgtagtaaaggaaaattctgcagatgtagatacttctggtgaaaaactatcaaatgttgctattgatatcttaaaatctgcatttgaggctactggtcacagcccagaatatgaaggttcatttgcggatgcaggaaatccagttatggcactagcagcgtatttagctggtcttgtggaagatgataacaccaccacttcattccgtagttcactaaaatctgtatctgatgtgtctcctgcactccaattatcaagtaggcactgttttattcttgaggatccgccagatgaactcaaagacatttgtgctagtgtaagtaagaaaaatagagatggtgatcaaaaacaagatgaggatatgattcaaaattcaattgataccgagaaaaaagagatcaatgagaaagaaggtaagtctttatctgtggaaaagaaaaacaattcatccatgtcacaaaatgaccaccaagaatcaggcattaagagcgtctcaagtgatgattgctccttagtggagccaaaaaccaataatgctaaggagtcaggtgattcaactgctattggggacaagagtgcaaccgaaactacaaaaggtaatactgaacaagtgaatgacttgccaagtgttgaggtggaggctcctgatgattcatcttcaaaaggtaaggatgagctcaataagactaaagatgcagtggcgacaccagctaccgtacaggaacagaaacacagccaaacattgggaaatggggatagggaagaacctaacaacattgaaagtgtagttgtcggtgaagagaagggctctgtagtgactgccaaccgacctgattccatagctaggctcaaaagagcagcagctactgctgtttcagcagctgctgtgaaagctaggtttctcggtgatcaggaggaatatcaaattcgaaggctgacagcacttgtaatcgaaaagctgttccaaaaaatagaagtgaagatgtcattgttttcagagattgagcaggtggtctttcgaacgagagagtacaccgagaagaccagaaagaagctcctgaaggaacgaaatgcgattattgcagctcggatgggcgcattgccgtctaggccaaaccagacaggtgtagccggaaacaggttaccacctgggtatggcaaccctcctgtaaggcctccaaacgcaatgcctcggcccaccagctgaggaaattccggattccggacacccagtgatctataccccattcttttagaagcataccccaaagactcaaacctgccagcttgttgtagcattttttagaaagtacattgtacaattgtctgtataactgcttctatgaaaattcaccaaacctccacaactgttttaaacattccatcagataggaaaattccatttctctac

SEQ ID NO: 25514 - DNA, 1556 bp, Zea mays
  Clone ID: LIB3912-023-H6_FLI
ggcagcggcagcggcagccggagatgggggagcgggcgaaggaatggctcctcgcagcaggcgccggcgccgccgtcggcgcgctctctgccgccgctgtcatggatcttctctcgagatccaagcgcagagagaggtacgcgcgggacctgctggagtccaatgcaatgacgactggtacgcgtgcagggaacactcggtccagcaagcacctgggctctgttgctagctcggctcttctctctgatgaagtggtctctgaacagcttacaaggaatatacaattttttggcatggactctcagaagaaagtgactgaatcctatgttgtggttattggtcttggaggggttggcagtcatgcagcatcaatgctcctgagatctggtgttggcaggttgcttcttgtggattttgatcaggtatcactctcatcactaaatcggcatgctgtggcaaccagagatgacgttggaacttcaaaagcgttgtgcctcaagaagcatttttcaatgatatacccagagtgccaaatagatgcaaaagtgcaattgtatgatgcatcgtctgaggaggaaattctttctggacagcctgactttgttcttgattgcatagataacattgataccaaggtgtcactccttgcagcttgcgtgcgcagaggtttgaaggtactttctgcaatgggggctggagctcgagctgatcccaccagaattcgtgtcgcatatttgagagaatcaagcaatgaccccctctctcgatcggtgaggtacaggctcaagaaagaacatggaattgagggtggaataccagtagtcttttcattggaaaagccaaaggcaaagcttcttccttttcaagcttcaaaagaagaggaaactccatcagattaccagattgtgccaggattcagggttcgcattataccagtattgggaaccatccctgcaatatttggtcaagttatggcctcctatgtggtcactcagcttgctggattagattttcaaactgaaccggttgttaacctggatttggatcattaccgtatacttcatcagcgtcttattgagcatgaggaactgatgtatggcacagccgagcaagttctggtagatgctgaagaggtaatgtacattgtcaaagaattgtggcgtggtcgaagtgctagagaccaaagccaggacactggccggaagatgtggagatctgtgaacgaactaatgcttgttcggtgggacaaatcaaaggctgctggcatctcaaacttaatacttgtcaagttcagtgaggctgacgcccatgaatccaccacactcgaccgaataaaagaacaagaacctgagttctactctatggtttcacgtgtcctgaaacgagctgagatggagtttgccttatgacctgatgagtagcgagggttgatcctgttggactcccacagttgctattcagtgatggtcttggatcagcattcagtttggcgggaatcacacttggggtacctgattggtgtgctatggtgaaaatgatgtgcaaagtttcttctt

SEQ ID NO: 25515 - DNA, 1154 bp, Zea mays
  Clone ID: LIB3912-024-B10_FLI
catcttctcttcctctcgcgcagcaccgcctctcaacctccgccgccgctcgcccggggcgtcagcgtcacccacccgcgcagaaggcccccgccgctcaaactaccggtgccctaaaccccgatattcttcttcgcccgaccttcagggttccgccgccatgccgcagggagaccacatcgagcttcaccagaagcgccatggcaagcgcctggaccacgatgaacgcaagcgcaagcgcgaggcgcgcgaggtgcacaggcgctcgaaggacgcccgcaatttgattggtgctaagggcaagaggttcgccaagaaacgctatgctgagaaggcgcagatgaagaagaccctgaaaatgcacgatgaatcaaataagcgacagaaggttgatgatgatgtccaagagggtgctcttcctccgtatctactcgatcgtgatcagacacagcgtgccaaggtcctcagcaacacaatcaagcaaaagaggaaggaaaaggctggcaaatgggatgttccgctgccaaaggtcagacctgtagctgaagaagaaatgttcaaggtgctacgaactggcaagcgaaaaaccaagcagtggaagagaatggttaccaaagccacttttgttggagctggatttacaaggaaaccaccgaagtatgagcggttcattcgaccaactggtctgcgtttcaccaaagctcatgtgactcacccagaactgaagtgcactttcaaccttgacataatttctgtgaagaaaaatccaaatggtccgatgtacacttctcttggtgttatgacaaggggaacaatcattgaggtaaatgtcagtgagcttggtctggtaactcccgctggaaaagttgtttgggggaaatatgctcaagttacaaacaacccggagaatgatggctgtatcaatgctgttttgctagtgtagaaccatagtgagattttgtttatggtggtgaatcgtcccatttgtatctgctcttgataagatgctcccttctgaccgatctcatggctaatcccaggagttgttttgctgcactgtggtccatgggcgagcattctatatccttgccatgtgcgacaaatgacttggctattatagcctgctataaagttgactaatacaaattagcagc

SEQ ID NO: 25516 - DNA, 1714 bp, Zea mays
  Clone ID: LIB3912-024-D8_FLI
gggaaaccctaaccctaacttagggtagggagatgtattaatagactcaggttgttgggcttgacccattacataggggtataagactatccgcaacggttccctttaaatttctccccctatatcactttttttttgtgtcacatcattaatagtttgttccctactttttcatctcccgcagcggtttcccctataccccactacaaccataaaatatcatttcctatacttttcatctactatcaatttttcatccactaacaattactcttggacccactactacaagaatgaacagtgatggagaggatgaacagtgaaccgctatatacggagggagagagaagagggccgacgcgtagggggccgaccaggggtcagcgctgcgggtctaggggcgctccctgtagccgcatgcaagaggcgggggctggcacgcggagaccgctgtggccagcctaactgtaattacaatgggctaaccctaaaaccctaaacgggtactctaacaccgtgggccgggtcaaaggggccactgtgcctacatatctgggagggagcaccggcgccatggacgaagacgaagggcacaacgcagatcgaagaagggcgttgttgctattagtggagacaaagggaacattgacgtctgcagctcttggaggggggaggcggcgactgcagcacttggttgtggcggcggtgtctacctctcgttgggggcagagctcggggaaaaatggtgcgagaaagaaaagaaacggctgcaggagaaatattgcacgtggaactgatagattgagatggcagttcttcgactggaattagagaactgtgccgatttttggtgttgccaaaatattgggctacgagttggatactgttggagcagtgattttttcgccttatttgccaaaactagttttgggggacatttattaggagctcttggagatgctctaatagtcagtgcaccggactggatggaaacacaagaaaatctctcataacctaaaatttcttgtatggtcacaattgtcaattatctttatggtaattgcgacatgcacgagtcatgcatttttattagcacaagaggttcacttgctgacttatgtgcagtgatggtggactgtactgtacagctttattagacaaaaagaaaggctgtcctgttgtagtgaatggcttttcatgcactctaaaaaggcccatactgtaaaggggaaaatactgacgttattttcttttccccgtctatgtgcattatcggtttgaacttaaaaacaatgcaggttgggttgattgcaacaccagatgtccattcctttgaacttactaagaaagaccatttcatcattctagggtgcgatggcttatggggagtatttggaccaggtgatgctgtcgaatttgttcagaatcagttgaaggagacctcatcagccacacttgcggtgcgccgcctcgtgaaggaagctgttcgcgagaggcgatgcaaggataactgcactgctgttttgatcgtcttcaggcactagcgatcggcctaattcccttttgctttcgtcaggctggaaagaattagctgataaagaacaatgtttgaagtgtagcgagttgaacttggaactcttgctttgtctgttttgatttgatgtgacctattaatacaccatccatattcatttggaaattactctatccgtcc

SEQ ID NO: 25517 - DNA, 1039 bp, Zea mays
  Clone ID: LIB3912-024-E4_FLI
cccgcggtctctccgccgcctcccagatccggcggccatggcaaggaacccgggctgcaccgtcttcataggtaacttggatgacaaggttcctgagagggttctgtatgaaattcttattcaggtaggtcgtgttgtagacctacacatacctcgtgacaaggaaactagccgaccaaaaggctatgcttttgctgagtatgaaacagaggagattgcccaatatgctgttaagctattttctggtcttgttcgacttcataataaaacgcttagatttgcgatctctgggcaagacaaaccctcattaaatggcaatatccctgtaactcctaggttaaactctgtaccacagccaaagcctcatcaacctatgaggtctagtgatactcctttgccacagcatgcagcagtgaatggcaggaatgccgggtatggtatcccaccaaatcattcatacgacacgcacactcaagcactgtcgagtgggttaccgaatagaggactaagcaacggtacatatgaatatagtaggcgtgtatttggttctgttctgaatgatgttagccgtcgagctaccagggaaccaatcccgtacccgtcctactagcatgttgagccccggtgactgtgactctgtgctgacagaaaatatttctgaagatgttgtctgttgtgtcagccacctgtaatatctctgtactcaccatttcatgcctgtaaatatgggttatggtggtaggacatatgcttgtttttttggttctgcttcgcattgtagtgagacttgtccctgcttgttaggtccttctcatcccctagtgtgaaggccatgcctccactagtatggctgcactaggaaataccattcctagttacatgaatgggtggcaatatgctggcaattgtgttttaacattagtgccattagctatttcaatgttacagcagggcgtgtttgtgtttgcgatattagtatttggtggattttgtgcttctcatcatgtatctgggacatctgaaggagaaacattgtttt

SEQ ID NO: 25518 - DNA, 2043 bp, Zea mays
  Clone ID: LIB3912-024-F11_FLI
gttccttcctgactgcccccacttctcctccggcggcgcggcggcgggttacctcccaacagcccgaccatggaagccgacatcgctttcaggtatgagatcccccggaccgcccagttcctccgcgacggcgcctacaccagggtcgcgctccagttccccgacgagatgctgaaggatgctgctgcggtggcgagggcgttgcggcgggagcttgcctccggcggcgccgacagtggggttagggtgttcgtgatggccgacacggcgtacaactcctgctgcgtggacgaggtgggcgcgtcccacatcgatgcgcagtgcgtcgtccactacggccacgcctgcatgagcccaacatcaaatttgccagctttctttgtatttgggaaggcaccgttggatgtccacgcatgtgccggcacattgctggagtgctcaaggaaaagcaataagcgcattctggttttatatggactagagtacgcatatgcattggatgaccttagacagactttcatggagtcatgtaaatcaaattctggcaatcatgaagtccagtatgcagaagttctatgttcagttatgagtccatcatcaagtactacagaagaaaacaaaattcctcagtcgagtggcccctcttgtaatggggatatctccagaaacagcgagtcggcaacattcctgaataatcgtaatggcatggaatgttccagttccacacaaaagtacagccttgctggcatgacatggaatatttcagttgaggagaaaatggaggactatttcatattttggattggacaagatagctcagcatttgccaacatagtgcttaccttcaataaatgtgaaatagttagatatgatgcaatagaaaatcaactcacagcggacgtctctcatctgatgaaaattcttaggcgaagatattacctcgtggagaaggcgaaggatgcaaatattattggcattttggtgggaactctgggtgtagctggttatcttcatataatcgaacaaatgaaagatctgatcaaggccgctggaaagaaatcctatacattggtcatgggtaggcctaattctgccaagcttgcgaattttccagagtgcgaagtttttatttatgtttcttgtgcccaaactgctctgctggatagcaaggattttttagctccagttattacaccttttgaagctgtactagcttttggcaggggaagagagtggaccggagagtatcttttggatttcaaggatttgatcacttcagagaaacaagaagctgcgagcacaacaggagaagcacgcttttcttttatcaaaggtgtctatgtggaagataattgccctcaagaaaatgaggaacaatcggaaacgtcgctcgctctggctgaggtaactgaaaaggcactgagcatccaaaaccagcacaacgacgctgtcctttaccaaggaagagcaatgtcctcaatcgactacctcaaggcacgttcctaccgtggtctaactggagaatacgaaggcccagttcctgattcagtcttggtaggcagaatgggcagggcagctggttacagtgacgagaaaactgagagcgcacagtgaaggtagcattatgcgagttgatcagttgctacaggctccccttttttggcggtgaaaaaccaggagggtgcacaatgattcaatcatgcagcctggatggtttaccaacctgtgtacttttgtttaggtgggctaacaggtttatagacaattgtcaacatttttttattgttgagaatacctgtttctagtcccagggaacaatactttggatgctgttcaatcaggtggcttttttgctattaggaactactagtgtgtgcctaatcagtttgtatgcaatagtgagagctatctcactgatgtggggaagcctttttttttctttctaacaactgtggcatgtgttcagaagatgagatgtacactattcacaacatgcactgtactcatccattatgtttgtacaagacaccaaatttactctgc

SEQ ID NO: 25519 - DNA, 802 bp, Zea mays
  Clone ID: LIB3912-024-G11_FLI
ccgatccccaattcctccttcggatctcgcattcagcgcagcgcaggtgtgaaggaagggggacgcggaggaagatggggctcgcgttcgggaagctcttcagccggctcttcgccaagaaggagatgcggatcctcatggtcggcctcgacgccgccggtaaaaccaccatcctctacaagctcaagctcggcgagatcgtcaccaccatccccaccatcggtttcaatgttgaaactgttgagtacaagaacattagcttcactgtctgggatgtcgggggtcaggacaagatcagacctctttggaggcattacttccagaacacccagggtcttatctttgttgtggacagcaatgaccgtgaccgtgttgttgaagccagagatgagctccacaggatgctgaacgaggatgagctacgtgatgctgtgctgcttgtttttgccaacaagcaagatcttcccaatgccatgaatgctgctgagattactgacaagcttggattacactccctgcgccagcgacactggtacatccagagcacttgtgccacaactggcgagggtctgtatgaaggcctggactggctgtccagcaacattgcgagcaaggcttgaggcctaccttgaatgtcaaccgcgaactgactaggagctccggatgtatcatggaaactcaggacagaatcgcagttgcaacctgttagatgtcttctaccggcactatatatattttttgtttgatgtgtaatgatgttactgttcaacgtttattaccctactatactgttggatgttct

SEQ ID NO: 25520 - DNA, 1156 bp, Zea mays
  Clone ID: LIB3912-024-H9_FLI
cacgaggtgaaaaggaccacgcctccgatgaagcgccagaaaagagtccacatgaccacatcggtctctccgatcagagttcaactcggttctttaattgcgcaccaatctgttttatatatacggagagagcactcctgttttgtggcaaattctattactagctgcaaaagggcgtgtttgagactagcggaccgaccttgaagttgaagttgaaaaggccggcctgcgcggcgatggatgtcaagtgccggcgtctggaggggaaggtggccatcgtgacggcgtccacgatggggatcggcctcgccatcgccgagcgcctcggtctggagggcgccgccgtggtcatctcctcccgcaagcagaagaacgttaacgaggcggtggaggggctcagggccaagggtatcaccgcggttggtgccgtctgccacgtctccgacgcacagcagcgcaagagcctcatcgagacggccgtcaagagctttgggcacatagatatccttgtctccaatgctgccgcaaatccttctgtagatagcatacttgaaatgaaagagtctgttctcgataagctgtgggatattaacgtcaaggcttctatccttcttattcaggatgctgctcctcacctacggaaggggtcatctgtgattattatttcttcaattgctggttacaatccagaacaaggattgacaatgtatggtgtcacaaagactgctctctttggtctcacgaaggctcttgctggtgagatgggacccgatactcgtgttaactgtgtagcccctggttttgttcctacacggtttgctagtttcctcacagaaaatgagaccattaggaaagagcttaacgagaggaccaagcttaagagattgggtactgtggaagacatggctgcggctgcggcttttctggcgtctgacgacgcatcatacattacggctgaaaccattgttgttgctggaggggtgcagtctaggctgtaaatctggctgaagtttatatttacttggttactaatgtgtactagtgctctagagcatcaggcgtggctaataatgtgtactagtgccgctagagcatcaggctaccttctatatatgacaggcaaccctaaaagattttctatatcttattcctcttc

SEQ ID NO: 25521 - DNA, 975 bp, Zea mays
  Clone ID: LIB3912-025-D6_FLI
gcagagtctttcgtcatctcttctccggcgaagaacccccagtcgcccaccagatcacttgttaaactttgttgaggggtgatggcggtttctttcgcaaacctcaacaccgaggcagggcttaaaaagcttgatgagtaccttctcactcgcagctacatcactggctaccaagcttccaaggatgacttggctgtctacacttcgttttcgtctgctccctcgtccaagtatatcaacgtagcaaggtggtttaatcacattgatgcgctcgtgaggctgagcggaattactgcagagggccaaggtgtgaaggttgaatcctcagcagttccttcagccccaactccagatgttgctgaagcacaggccccagctgctgaggaggaggacgatgatgatgttgacctttttggtgaggagaccgaagatgagaagaaggctgctgaagagcgtgctgcagctgccaaggcttctggcaagaagaaagaatctgggaagtcatcagttttacttgatgtgaagccatgggacgatgagactgacatggccaagctcgaggaagctgttaggagtgtcaagatggaagggctgctctggggcgcttccaagcttgtcccagtcggatatggtatcaagaagctgcaaatcatgatgaccatagtcgacgatcttgtctctgtcgacactctcattgaggactatctgtgcgctgagccagtgaacgagtacgtccagagctgcgacatagttgccttcaacaagatctaggcgtgactttcgatcagtccttcccctggggtgctggcgatggtggtggctgggcaatgcaccagcctaatttatccatagctctatgtctgctttgtttggccagtgatattgccgtgagtatttttggatcctattcgagtcgaatgtaccagtaccagagttaatttgctttaattcgaaacaccgttccggttggaattc

SEQ ID NO: 25522 - DNA, 1044 bp, Zea mays
  Clone ID: LIB3912-026-F3_FLI
cgctccacggccatggtgaggatgaagcaggtaaagatttcggtaaagaaggacgtggattcgtacacaatccgcggcaccaacaaggtcgtccatgtgggcgactgcgtgctgatgcgggcgtcggactcggacaagcagccgtatgtggcgcgggtggagaagatggaggccgacggacgcggcagcgtgcgggtgcaggtgcgctggtactaccgccccgaggaatccaagggcggtcgccggcagttccacggcgccaaggagcttttcctttccgatcatttcgacctacagagcgcccacaccatcgaggggaaatgtgttgtccactctttcaagaactacaccaagcttgataatgtcgggcctgaggactacttctcccgatttgagtacaaggcggccaccggttcgttcacccctgaccgcgtggcagtgtacggagctcctcaatcctttcattgttgactttttcttctctttgcatgcgttttgagcctgcttgtgataatttgggtgtgtgtatttttctctcaaggtattgcaaatgtgagatgccatacaacccggatgacctcatggtgcagtgcgaagcttgcaaggactggttccatccatcttgcatggctatgaccattgaacaggccaaaaaactagatcactttgtttgctcagactgtttgaaagaaaatggttcaaagagactttcaaatgtatatgccacttcatcaaattcttagcccaaggctgaatcaataaggcagacgaggtgaaaactgagtgccaacatccagtggagatgtgctgcttctgtggcgaatcagtccttgcactggcgagagcagaggtgtacagtgtttgctgtggtttgttcgatgtaactagccagtgtggcatgtcatgcagttgttggtagatcagtcattgtgttgacttggtcagcttaactcaataccccccttcgttgattacattgttgctatggcggtgcggcatgatcgattactgttctattaatatatgacttttatatgttgatat

SEQ ID NO: 25523 - DNA, 656 bp, Zea mays
  Clone ID: LIB3912-026-G2_FLI
gagacaaacactttgtttaaacgtagaatcagaaacgatgccagaacaacaatgagagaaatcgcctgtgattctctccttgcttggacactcctactccgcaccacaacaacacaactcaattccatggtgttctcgtcactctatataggccatgcttgcgcattgaggtcgcgatagtggagaaacaccaacagctacacatctgtctcgtcttgctcatttgctctactgattcctctccctcatcctccatcaagctcttcctccactcacacaccagcacaccgtgagtgtatctatgacaaatttgctaaatattaaatagaaaattaactgaatacgatgatttagagatcaacaattaagatcggagccttgaaccattgcataccctgattgttgcgggcgtgacaaggacggtgtcggtgttgtatccgacgaggcactgggcgatgcgggtacgaccaatgtgcatggaggatttgtcgaggatggtgcaggcagagatgacgcggatggtaagagtgtggccatgcatctaggggtgcagctggtcgacggtggtgaagaccggcttgcgcacggtcttggccccatctgcgggatctgcaaccagctcctgctggatgccgctagagggtgttgtagctgag

SEQ ID NO: 25524 - DNA, 1060 bp, Zea mays
  Clone ID: LIB3912-027-C11_FLI
gctgatttggttgcggatttcttagatgtggggtcttactgaccgaattatccatccacgggtggtctgtttgattaggttccctctcttctccgcgcatgcgtgcggggtcgaaaggtagggttcataccccaaagtttgtcattggggacaacaccagcggcggcgatggactacaccaacgccatccacatcatcccacccatggcctccgacgcacggaccaacgcggcggcgtccccgggcgaggaccccgacatctgggccaccgagaaagactaccgccagtggagtgccgaccagggctacaatgaccggaacccctcctcgcggacggggagcgagcagccgctgcctggtaagaaggctcacggcgggggcggcagcagcgatggtggcggcgggagcagcacaagcaagtcagcgccatcgcaagatgttcttcaagaccaagctctgttgcaagttctgggccaggacctgcccctacgtcaccaattgcaacttcgcccatggcatggaggagctctgcaagccgccgcccaactggcaggagattgtggccacccacgaggatgccaccacgaagcagggagaggagcaccagatccccattatgacatccagaagtgtcatcgctggagacgatggcggcggcggcagggcatacaagggtcgccactgcaagaagttctacactgaagagggctgcccctatggcgacacatgcaccttcctgcacgatgagcagtccaaggcacgggagagcgtcgccatcagtctcttgccgacgattggtggtggcggatacaatgctgcctctgccagcggatcgatggcgcaaaattcttccaattggaagacaaggatctgtaacaagtgggagatgactggatactgtccgtttgggagcaaatgccactttgctcatggatctactgtaatacccaatttgtaaacaatctaaagagagtagatctcattatgtgtttttgccctatactcattgtaacctggtgataaccatatatataaagagaacaaataactaataacacct

SEQ ID NO: 25525 - DNA, 721 bp, Zea mays
  Clone ID: LIB3912-027-C2_FLI
ttatctcaaaaaaaaaaagtcttgagtcccccctctccttccccttcccaacgctctcgctgcagaggaaaggcgaagatggcgatgaccgtcgaagtgcttgctgcactcgcgttcatgttctccacgagtattctactgcagatactggcatgcgctttgtacagcaactggtggcccatgttagcagctctcatgtggattaatgctgcaaaattcttgactggtgcatcggccatgggaagccttgctattccagcaattctgaggcatgctggcttaatcgagaccggggccatgttcatcgagttcacgtccttcttcatccttgtatgcacagtgctgtgcttccatagggcgactctggatgaagactggtaaatgcgcatttcaccgacaccctgaaccctagcggttcttggctgcttctgtccatgctaagaaatattcctgttggaagctaacatggatctgtacaaagaagcgtatttcgagcgtagccgtagctgatgtcttatgtagacacttgtgaagattatgtggtcatgtggcaatgcagatgttattaccttcactttgactttgtcgtcacatgttctatggtgaaggaaggaatcatccgtgtaaaccatggccagggcacgccctacttggctcctaattctatcgcaggctttggggttaacctattatgaatggaataataggatcttgatgaccg

SEQ ID NO: 25526 - DNA, 1689 bp, Zea mays
  Clone ID: LIB3912-027-D12_FLI
gcggaagacgaggtagaggagggggcgagcgacagaggcagtggaggggcgcggtgaggaggccggcggcgcgcgcgcgcttgcggcgccggcggcctggcgatgggggaggtggccgcgctgcgccagctcgtcggccaggtccaggagctctgggacctctacggcgccaacggcaaccccgtccccaggtggtatttacctgacttcgaacatggttcaatcaaggatgattattgtgggggaagctcaggatacaactcggaattactgaagatcatggaaactaaccaatctcccccttgcaagcgaccgcggagagatcgaaaccgtgaaaaggcaccctcctcaaacaaaattgaagtcatggaacaagagatatggagagatttccctgaagatcttttcgaaactgtcatagcaaggcttcctgttgctgcaatttttcgattccgcactgtctgccgaaggtggtcttcccttttgggctcagacagtttctctcgtcagtactctgaagctccacatggactgccatggttctatacaatcactcatgagaattcaaacaacaatgttgcgatgtatgatcctttgctgaagaaatggcaccaccaatctgttcctctcaatcatacgaagatagttattccagtggcatccgtgggtggccttgtatgtttattggatctgagccacaggaatttttacatctgcaaccctcttacgcaatcactgaaggagatcccaccaagatcagtccatggttggtcaagagtcgttgtagggatggtgttgaatggaagaagttctagtgatggctacaaagtaatgtggttagatattgatgggacttgcgaagtttatgactctacaaagaacgtgtggtcttgccctggaacttttcctccaagcatcaaacttccacttgctctaaatttgaggtcacaaccagtggcggttggcagcatgatatacttcatgtgcgcagaaccagatggtgttttgtcatatgatgtaagcaccgggatttggaggcaatttgccatcccactgccactgcatctgactgatcacacacttgccgagttccagggaagggttatgctggtgggtctgctgtgcaaaaatgcagcgacctgcatctgcatatgggagttgcagaagatgactctcctctggaaggaggtggacagaatgccaaatctctggtgcttagagttctacggtaagcacatgaagatgaaatgcctgggcaacagtggtttgctcatgctctccttgaaggcgaagcatatgaaccgccttgttacatacaaccttttgaaaagggagtggcagaaggttcctgattgcatgctaccatggagtcgaaaaaggcaatggataacatgtggcacagcatttgatccggtcccctgcgccttggtctgacatggaattttaccttctttgtctgagcactataatattttagtcctttcatatcattggcctatctttagatctttctatgttgttgtgacaagttctgcgaaaacgcattactgtggtttgctttgtataacgccgccgaaacaatcgaacggtttcctttatcacctgctgttctgttaagcttgtaatctttctgaacgtgcagttacctgcccagagctgagttcattatacaataaataccgggatgtt

SEQ ID NO: 25527 - DNA, 617 bp, Zea mays
  Clone ID: LIB3912-027-F4_FLI
gcgatttgttctgttgttcggtccccaatcttcgcctccgctccgcccgccccgacccagatcaggagctgagagatggacgccaacaggcgccaaggtgggattcagcagttgctggctgcggagcaggaggctcagcaaattgtgaatgcggctagagctgagcagtggtgactctggtgcgaacgtcaagcgtctcgaggaagagacaacggcgaaaatcgaacagctcaaccagcaggctgcaagcatctccccagatgtcattcagatgcttctgaggcatgtcaccaccgtgaagaactgagaagtgctgctcccaaactatgctcatcggtctatttatttttgtcagagcaggtgaggaataataatatggcccttgtaccagtaattctttttttaactacggaataagccgcagcagctttagcggcaaccgtgactgttactaccagaacttgccattatttggtataatcggcaaattaaataatattgttttatattggatttttgaacaaacttttttttgctgattccctacctggtgtttctgtttcatttcttgtatgagatctgcaaattcatcatggagtgaaagccgctcgacatgg

SEQ ID NO: 25528 - DNA, 1776 bp, Zea mays
  Clone ID: LIB3912-028-F1_FLI
tgcccactgtcctatacgctaacacgggtgcccagccgccgcagtctttcgaactgaggaaccctaggcccagcactcggcgacggcggcgcgccaccggcgacgggatcagcggcatcactcccctccttccccggcgcggcggcgccccgcacctaggccctagcactgcagcactcgacaacaggatcagcggtcgcgcccccctcctccttccccggcgcggcggcgccctgtagctgcagatctgccactgtccgcctgccggtcatggagcacctccggtggcgccccacagtgaacgagcgcgacttcattgagtgtgcgctccagtctgacctccgtgttgacggccgccactcctttgacttccgcaagctcaagatcaccttcggcagggaggatggctcgtcagaggtgcagctcggggagacacacgtgatgggctacgtgaccgtgcagctggtgcagccataccgtgacaggccgaatgaggggacgctggccatattcaccgagttctcacccatggccgacccctcctttgagcctgggcgtcctggggaattagcaattgagcttggccgagttattgaccgtggcctcagggagagtcgagctgttgacatggagtccttgtgtgttgttgctgggaagcatgtctggtctgtgcgtgtggaccttcacatcttggataacggagggaatctcattgatgcagctaatatcgctgcattggcagctttatctactttccggaggcctgaatgcacggttggtggggacgatggtcagcaagttacagtgcatgatcctgaggttagggatccacttcctcttacgatacaccatatgcccatagctgtaacatttgcatattttggtgaaggtaacatcgtggttcttgatcccacatacaaggaagaagcagtaatgggagggaggatgactgctatagttaactcaaatggggatgtttgtgccattcagaaagctggtggagagggtgtcatgtcaagtgttatcatgcagtgtttaagaattgcttcggtaaaggctgctgatataacaagcaaaataaagaaagcagtagactcatacaccaccgagaaagccctaaagaaagtaaaacgtttgccaacctcggttcctcagaaaattaatgtcactaatgtaactatggacggcaaaggtgatggtgaattggaaaagcaatctgtgcagatgcatagtgatgttcagcagataagcaaagatccaccaactatggtcaaggccagcagccgtgaggatgcccaaccaatgactgaatcatctaatgctgaggtgaacacatcaagtgctgtggctgctggagagtctgagtcccatgaaattggatcgccgaagagtctaaaagatgctatcaaaccaaaacataaaagaaagaagaagaaaagtgacaggagttagtttagttgcaagcctgtaattttgtatgccccagataaatcaacgacagtctacaacacctcaaactcctgattgattaggtttcatccggggtgccatacatgggttttttgtgtgttttcaatcgtgactggtgctagtagtgacaggcaaattttgtacaagctgtagaattgtattttaggaatggttcagttaagctttcagtcaactttgcagctagttctgtgatgcgtgatgtcccagcactcttacatttcattgtactgctcaccgttaatcttccattgtccaaacggtcgtaaggattgccatatttgttcc

SEQ ID NO: 25529 - DNA, 417 bp, Zea mays
  Clone ID: LIB3912-028-F5_FLI
cctcatgcggtggatgtcgcgtgcgaagcgtcgatcggccaagaggcagcacgccgccacgtctgccgtggggcccagatggaggccgccgcggacccggaggagcgagagcggaaggcggcgtttgagcggctggacaatctaggacggtgcatcgcggacgtggagagcagcggcgagaaggtgttcagagccctcgtcaacaccagagtctccctcctcaacattctcagcccagccttctgattcccgaatcatcagaacccagcaaactcgactgcattttgcaaccttgaatccattgtaaaaacctagattcttttgaaacgtctaaggattttttccttttgaaacgaacattaaaaaaatccttttgaaacgaacatctaagctttggaatttggatgcgtgtgcatc

SEQ ID NO: 25530 - DNA, 804 bp, Zea mays
  Clone ID: LIB3912-028-H1_FLI
ctccgcgcgcgatgcgccccgctgctgctgcagcttacttggtgacggtggaagaggtgaccgcgacgtggcgcgacggcgaggcgccggcctccgcgacgggccacgacgaggccccggcgttcgtgtcggaccagtggggccgcgtcacgttgtggaacgccgcgtttgtccgcgctgcatccgcggacgacggcgacgaggcggcggcgcccgtggtgctcggcggtgccctcccggcgtggggcacctgcgcgggattcacgtgccgcgtccgcgcccggcactggagcgcccggcgcgtcggttcccccgtggtggcgccctgcgatgtgtggcgtctggacgccgccggcagctacctttggcggctggacctgcaggccgcgctcactctcggcggctgcctgtgaaccgtacaccactgtcaagagcaagcaacgaatatgctgtgctactcctctacgtgcggagacgtgttgtattttattctatgagcgttatttactgacgtaaggtatggtttaatcgacggattgctatcctggtcgggcttaattaaggacgttgaagcctggtaaggtatactaacttagcgtccttcggaatgggagtgagttgggaggacttgaaaatgtaagaagaagaaaacaaagcatgtgatggatgcttctggatgtgcaagctcagtcttcattcttcagcagcgcggaaattggctctaataacattggtttatgttgacagtgctagcgaggacaatgagtcattcgatgtgaaataataccatctgttctttatgat

SEQ ID NO: 25531 - DNA, 1089 bp, Zea mays
  Clone ID: LIB3912-029-B9_FLI
cgcaccgcagcgtaaaccctagtccccggcggcgaccttgcggcctccgctgcgctctgactgcgtgcgtcggttaggttcttgggaggtgggggtgtctcggggattcgtcgtggcgtgcaccggcgtctgcccccacccgcgcctagccgcgaaggtgcgcgtttagacgaggagctgcggcggccaagaccaatcgaccatggctacccgtatccagtttgagaacaactgtgaaattggtgttttctccaagctgacaaatgcttactgtctggtagcgattggagggtcagagaacttctacagtgcctttgaggctgagcttgcagatgccatccctgtggtcaagacctctattggtggcactagaataataggccgactttgtgttggaaacaagaatggacttctattgccacatactacaaccgaccaagagcttcagcatctgaggaattgcttgcctgatcaagtggtggttcagcgcattgatgagaggttatctgcccttggcaattgcatagcctgcaatgaccatgttgcacttacgcaccctgaccttgacaaggagactgaggagttcattgcagatgtgcttggggtcgaggtgtttaggcagactattgctggaaatatccttgtggggagttactgcgccttctctaacaggggtggtttggttcatccccatacatccgttgaagaccttgacgagctctccacgctcctccaagttcctcttgtcgcaggaactgtgaacagaggaagcgaggtcattgctgcaggcatgacagtgaacgactggactgccttttgtggctcggacacgacagccaccgagctctcagtcatcgaaagcgtcttcaagctgagagaagggcagcccactgcgattgtggaggacatgaggaagtctctgatagacagttacgtgtaactggggggccagcagatgtgggtcagagtttgcctttgctaaaagatgtattgcaagctatagtcgaattatcagtagcacaacataaccctctgatatgttcgtggtttatccgtggtttctgaattgtagacttctgcgttgaagct

SEQ ID NO: 25532 - DNA, 666 bp, Zea mays
  Clone ID: LIB3912-029-D4_FLI
gggctgcttcacgcccactgattgcagatgtcgtgactgctctgtcctacttggcatcccagccatatgatcccaacgcagctcttgcttcaaggaagccaggcggcgatcagcgaagcaagcctggcgagaacggcagggcagtttccaggaatgatgaaactggaagctccggccacaaaacacctgccaaggaccgagaggactcacccagggacctcccagcgatcctgaacaaggaccttgaccgggagcgcatggtggccgaggcgaagatgtggggcgaccgggagcgcatggtggccgaggctaagatgtggggcgaccgagagcgcatggtggctgaggcgaagatgtggggtgaaaattggcgtgacaagcggcgtgcagagattgggcagggtagcctggattcagttactgggaacagctagggggcaattaagcgaacagaaacgtgacatccacccatgcatttcgtttgtttatttccaggtccattttcgttctggcggcggtcggcaggccctagggttgtacatttctaggtcagggaagagtgggaaagcggcagcgttgtactggacagtgaatgcatgtggttgtacatgtaaattctcagaaaagttttgtgagaatgaaaggacatatttgagttccacttgt

SEQ ID NO: 25533 - DNA, 892 bp, Zea mays
  Clone ID: LIB3912-029-H7_FLI
caacgagaagagcggcggcgcgggcggacaaggagcaggcggaggaggagctgtgccaagccacaatgggtatctcacgcgactcgatgcacaagcgccgtgccaccggtggaaagcagaaggcctggaggaagaagcgaaagtatgagcttggtcgccagccggccaacaccaagttgtcaagcaataagacagtgaggagggtccgtgttcgtggaggtaacgtgaagtggagggctcttcgccttgatactggtaactactcatggggaagtgaagctgttacccgcaagacccgtatcctcgacgtggtctacaatgcatcaaacaatgagcttgtgaggacacaaacccttgtgaagagtgccattgtgcaagttgatgctgccccattcaagcagtggtacctcactcactatggagttgacattggtaggaagaagaaaacccctgctgcaaagaaggataatgctgagggacaagaggttgaggcagcagctgaggaaacgaaaaagagcaaccatgtcacgaggaagcttgagaagcgcaaggagggacgtacccttgacccacacattgaggagcaatttggcagtggacggttgctggcatgcatttcttcccgccctggacagtgtggccgagctgatgggtacatccttgagggtaaagagcttgagttctacatgaagaagctacagaggaagaagggcaagagcgctgtagcttagagcattctcatggattgtcttgcaccgaaatgtgtgtcctgatgagtacactttttttttggttagtcgtctcaagttcagagcgttatgccatgttttcagacctgattagtacactgttttctaaaagcgattgagctctagtccaatgtattgataat

SEQ ID NO: 25534 - DNA, 1268 bp, Zea mays
  Clone ID: LIB3912-030-B8_FLI
gtaacgatcgttggtgcagtctttggattccttatcggaatctcgttcccgacagttaacataacaaaacttcactttccatctagcatcgtctcctacatagaggacaagaactctggcatctcagctcaagctatacttaaccatgcttggactgcggccaggaacgcaaggggaaatggctcccatccaatctcacttgacaacttcaaggtctatgtaccaacaaaccccaggggtgcagagagcctagcgccaggtattgttgtgccagagtctgattttcatcagcacaggttatgggggaacccagatgaggacttacccttcaagccaaagtaccttgttacttttactgttggcatttcacagaaagataacataaacagggctgtcaagaagttttcgaaggattttgcaatcctgttgtttcactatgatggccgggtgactgaatgggatgaatttgagtggtcaaagcgagctatccatgtaagcgtccggaaacaagcaaagtggtggtatgctaaaagattcttgcaccctgatatcgtggcagcctatgagtacatatttatctgggatgaggaccttggagttgatcattttaatggagaggagtacattaaacttgtgaagaaatatagactagaaatctcacaacctggtctagagccagataggggattgacatggcagatgaccaagagaagaggtgatcgtcaagttcacatggttacagaggagagagaaggctggtgctctgatcctcatgtccccccgtgcgctgggtttgttgaaataatggctccagttttctccagagatgcgtggagatgtgtctggcatatgattcagaatgacttagttcatggatggggtctcgatttcgctctccggaaatgtgtggagcctgctcacgagaaaatcggtgtcgttgattcccaatggattgtacaccaagtgattccttctctcgggaaccaggggcagtcggagaatgggagggcgccatgggaaggggtaagagagcgttgccggaaagagtgggggcttttccagacaagaatggcagaagctgagaaagcatattacgagatgatggggattacacctccgaatgtaacatttgtctcctaggataaaagtttcaacccacatttttttcctttgtgtccagcagtggctcttcgaatagagttagctattgatgaatgacacaagtagatcatacgtgacgatatatatacatatagatcctttgatcc

SEQ ID NO: 25535 - DNA, 1343 bp, Zea mays
  Clone ID: LIB3912-031-A8_FLI
tccacgacgacatgggcctcgagctctactacaactgagtcgtcgcccctctctccctatcgtcaggaccacatcaccctcaaggactacgagatccacgacggcatgggcctcgagctctactataactgagtcgttgcccctctctccctctcatcagctgctcctgccaagaagggtgatgccaagaccaggccttgaaggttgtcaaggttgtgaagtctgggccaggaaagaagaagaccaagaagattcgcacgtccgtgacatttcaccgccccaagaccctgaagaaggctagggaccccaagtacccaagaatcagcactaccggaagcaacaactttgatcagtaccaaattctcaagtatcccctcaacacagaatcaacgatgaagaagattgaagataacaacactctggtcttcattgtcgacctcaaggcagacaagaacatcaaggctgctgttaagaagatgtatgacatttaggccaagaaggtcaacaccctgatcaggcctgattgaaagaagaaggcttacgtgaagcttctcatgcatgggcttcgcctatgagacggccaagattggtgtcggcgtcgcctacatgggcgtcatgcgcctcaagcttgtcatgaagtccatcgtcctcatcgtcatggccagagtcctcggcatctatgacctcatcatcgccgccatcatctctgccgggatcaaccccaaggccaagcccaagccctacttcttagacggctacgcacacctctccttcaaactcgcatgcagccttgctggcctcgctgccggcatggccatcagcatcgtcagagacaccagagtcagcctgaaaatgaaaagccaattactgaaagcggagatgaaatctcttatgaaggagcaaaggcaaaaagtccaatatcattattatcgagactacgaaggagatcaattgactgcatctaaactgtgagatgtgtgcaagattgggtttgttgtatttggagttcctcatagaaaaatcatacatatgctctagagttcctcatagatttggtgcccatgatctgccatggatttgatttaagatttggggaaatcggtcgtgctcgcgctgcgagattcaattttttatgcctgttttattcacgagattgcaagaacgggactgctaggcaagatgagtatacctgaaatttaggtctagaaattcactgctatgagtctcaggaataggctgggttgaacttatacatgagatatccacatgtccaggtgcattgtctcaatttgattagaagtgtgtaatgttagttcttataaaaaagcaactcaaaaagggcc

SEQ ID NO: 25536 - DNA, 971 bp, Zea mays
  Clone ID: LIB3912-031-C7_FLI
tggagagtggagaactggagacgctgctgacctgacgaactgagcccacggacgagaaggaggggcacaccacgcaggagagcgcgcgcgcggatccacctcgatgttggcaagaccatcagcaccgcctttggtgactgctcaaactcctgaagtcggcatcttcattacagctcgcaacgtctcgggtgcactggtcgccaagcttcctggtaacaaaaacaattgtggaggaagatcgaatgtccggcagcagaatagtcgtcgggagtggcgggcgctctcagcagctgaccaagcgcaggcttctaccccggacgtagacgaggagtgcaaacgggtgctcactccattgggtttctccagcgaagacgccgagaagatgctgaagaaagcgtttggctggacccactcgccgtactggagcgaggagagggagaaggaggttccgaccgccgaggcggtagctggagtgctggactacatcaggagcctggggctgtcggacgaagaccttggcaggctgctgaagaagttccccgaggttcttgggtgcgacctcgacggcgaggtgaggccgaatgtgggcaagctggacagtgactggggaataaacgggaagaccctgcggagccttctgctgaggaaccccaaggttctgggctacaacgttgactgcagaggggattgcatggcccagtgcacccgctgttgggttaggttctgatgatgatggttttgttcttcgtcgccacatcgttgctcgggaacttgggacttggttttgcttgctggccacttttctgtaagctagcacctgtcgaatgtagcacaatcgctagctgctggatattgggttggccactgtttgttcttatgtacgtacaacagattcaagagctaaaccatgctgctgttgtctgtaaaagagttgcaataaatacggccagaattcctgaatggcctgtggt

SEQ ID NO: 25537 - DNA, 1633 bp, Zea mays
  Clone ID: LIB3912-031-D2_FLI
tgatgcaacacatcacacatgcatggccacggtatttatacaaggatccaagaagccttcgtgctcacagcatacctttcatggtagctagctagtggcgtactgcgctcgctaccactcaacacgtctcgaccccgaccaaaaatgccgagtcttgcggcgttcttggtcctcctgctcccgccgctgctgctttccgctgctggtgccgcagaggcagaggagcttatcggcttcaaggccacgctgaggcacgtggacgcggacgccgggtacacggaggagcagctgctctcgcgagcgctacgccgcagcagtgctcgcgtggccacgctgcagtcgctcgcggcgttggcgccgggcgacgcgatcaccgcggcgcgcatcctggtgctcgccagcgacggcgagtacctgatggagatggggatcggcacgccgacgcggtactactcggccatcctcgacaccggcagcgacctcatctggacgcagtgcgcgccgtgcctgctctgcgtcgaccagcccacgccctacttcgacccggcgcggtccgccacgtacaggtcgctcggctgcgcgtccccggcgtgcaacgcgctctactacccgctctgctaccagaaggtgtgcgtctaccagtacttctacggcgacagcgccagcactgccggcgtcctcgccaacgagacgttcacgttcggcaccaacgagacccgggtcagcctgccgggcatctcgttcgggtgcgggaacctgaacgctggctcgctcgccaacggctccggcatggtcggcttcgggcgggggtccctgtcgctggtcagccagctgggctcccccaggttctcctactgcctcacctccttcctgtctccggtgcccagccggctctacttcggcgtgtacgccacgctgaacagcaccaacgccagcagcgagccggtgcagtccacgccgttcgtcgtcaacccggcgcttcccacgatgtacttcctgaacatgacgggcatcagcgtcggcggctatctgctgcccatcgacccggcggtgttcgccatcaacgacacggacggcacgggcgggaccatcatcgactccggcaccaccatcacgtacctcgcggagccagcgtatgacgctgtccgcgcggccttcgcgtcgcagatcacgctgcccttgctcaacgttacggatgcctcggttctggacacgtgcttccagtggccgccgccgccgcgccaatcggtgacgctgccgcagcttgtgctccacttcgacggggcggactgggagctccctctgcagaactacatgctggtggatcccagcacagggggcggcttgtgcctggccatggcgtcgtcttccgacggctccatcatcggcagctaccagcaccagaacttcaacgtgctctacgacctcgagaacagcctcatgtccttcgtcccagcaccgtgccatctaatgtagctgtaacttgagtttccgtgtacctttatttcgtttccgatccgttgctatttatgcatagatgtgttctatggattggtgattggtgcttggtactttggtagggcttttaactaggtcggtgatctgtatcagtaaagcatactgtatttggttt

SEQ ID NO: 25538 - DNA, 810 bp, Zea mays
  Clone ID: LIB3912-031-F6_FLI
cacatggcgtgcaccttcctccgccgcgcgttctccctcaccgccgccggcacccacgcgaccccccgagttgccgccgccttcgcttccacttcctcctcatcctccgtcgtcgtgcctctgcgctccccactagaccaccgtcttctccgccacctccgctccgagatcacctacctcgcggagcgccgccctccccacgtgccgccgagtagcttcaagtcgttcgccgtggaggaccgcccgggggagcagtgggtgcgcctccgcgccagcgcgggagggggaggcgaggaggtgaaggtcgaggccaccatgttcgacggcgctgcggagcctgtcccggacgacgcgcccctcttccgccgcgtggagtcgctcgagcgcgggccccgcctccacctcagcctcatcgtcgaggtcgcccggggcgaccgcgtcctcggcttcgtctgctccgcctggcccgacgacctcgccgtccgccacgtgctcacgctcgcagctggcggtggcagcagtggtggtcgtcgtggtgggcgcgatttcgagaaactggggggcgaggagagggaagcggtgacgaagttcttgaaggagagggaggtggacgccgagctcgccggattcttgcacgactacatggcaaacaaggagaagatggagctgctccggtggttgaagactgtcgaatcattccttaacaagtaggataagatcgcacacagaaggtaatatgttggtgaatatgggtacgtccttgattatacgtaaatttaatccgagtcctagtagaaatgagttcaagtt

SEQ ID NO: 25539 - DNA, 767 bp, Zea mays
  Clone ID: LIB3912-031-F8_FLI
gaccacgctaccaggcactgacgccgtgaactagttagtcatagccccccccctgaaatcccagtctcccaagtcccaaccaaggagccttgtgcccatcccatccgtcgtcgtctggacatgcagggaggtgtgagctgcgtcggcgggcggctgggcctgaccatcgacccggctggcgacggggaggcccccgcggagcgcgtggggcggttggtccgcgagagccccgtggtgatcttcgcctggcgcgggtgctgcatgtgccacgtgatgcggcagctgctggcggccgtgggcgcgcacgcgacggtgatcgagctggaggaggccgccgaggaggccgcggcgtcggccgccgccgccgccgccgtgccggcgctgttcgtgggcggcgcgcccgtgggcgggctggacgggctcatggggctccacctcagcggcctcctagtcccgcggctccgggaggtcggcgcgctctgcggctaggccgggccggggcggcgtcgtcacttgctggtggtctggtctctctgtcgatacacgggtacggtacgttacgttacgtaatttaggggaagctgaggggggttggagcgaaatggccgtgtgacgtttgtatacagacgtcgttgctagttctgtctgtgctttgctttgctgtgtggcgctggggccgggtgaggtggttggctaaagttgaagacctatgtgagaaatgcctgggtgtaactgtaattaatacgtttgtcctgcacgagtttgtt

SEQ ID NO: 25540 - DNA, 878 bp, Zea mays
  Clone ID: LIB3912-032-D2_FLI
ctcccacgcgaaccctagcagtggttctccctcggggccccgctaagcagcttggttccaagctgtagaagcatctccgatcccatccgcggcgggttgaggccatcagctccggtttctgcagccggatttgggatccgcgagatgtcttggtccgcgcccgacgacatcctcctctccacctccctcgccggcttcttggacaagaaacttattgtcctgctaagagatggacggaaactgcttggcaccctctgctcatttgatcagtttgcaaatgttgttcttcagggtgcttgtgaacgagtgattgtgggggaacaatattgtgatgttcctcttgggctgtacgtaatccggggagagaacgttgttttaatcggagaattggatcgcgaaaaggatgaactccctgctcacatgacctgtgtttcagaagcagaaataagaaaggctgaaaaggcagaacgggaagccagagatctgaaagggacgatgaggaaacggatggagttcctggacttcgattaacaccgtcaccgcggccgttgccgctccccattgtggcggaatctttagtggcggcctgtgtgccatacatgcctggtgaccgcgccggcgcaccttggattgctggagggtttagcgaacagtttctttttaactagcagtgctgttttatactctcgtggccacagaccctttgagcgcctcctgatacagctttgtcaccactctgatcattgcctcgatgaatttatatacctgacgttttggattggatctgcgccaaaacgccatttctatgcagagagtctgtactcttatagctgagacagatttttttcctttaaacgatttgggattggatctgggcc

SEQ ID NO: 25541 - DNA, 2445 bp, Zea mays
  Clone ID: LIB3912-033-D5_FLI
cctcgttcccctccccttccgctcgagttcgtcgccgtcgccctgccctcgtatctcctcccacgacaccggtgacaaccacaggccaccgtcctgatcctcatccgggtgatccccaggcaggcaggtcggcgaggagggcagcaagaccgagccgtgcgggggctcgggacgggaacgggacaggaccccaaaatctcagatccttcctgctcgcccgcccgtgcccgtcggcgcgtcgttcttgccgtccgcgccccacctccgccctctcctcctccaggggaatcagatatgccacaggctgcgcgatggtgttgtgggtcttcggctacggctccctcatctggaacctcggcttcgacttcgacgacaaaatcctcggcttcatcaagggctacaaccgcacctttaatctcgcttgtattgaccacagaggcacaacagagcatccggcgaggacctgcacgcttgaaaccgacggcgaggcgacgacgaggccatatcatggtacaagcctacaaggagaaagtttatccaaaaaacaagttgaactgctgcagcatgagccagaagttggttatgaactaccatataaggttcccttccagagtctcccatgctatatcgtgaattttcccaagcaaagcacctgccaggcgccaatatgccaccggggtagccattaaaatacttaaaatcaactccaaggctcatcgaacgttatccagtgcttcaccgtgtttctgaactccctaaagcagatgttgtcatgttggtcagtttggtgttggtttaatttctacgggtgtcgtatatcagaggtaaacaatattagatgtttatttatttgtttggaggtatcagttttctatgaatgtacaactgtttgctttgtgctttatttagacttctaatttatatcgatatttatgacatgtgtttacctgttttgtaagtcaatcaaaaagtttgactagcaactaatggtgcctatacatgtatttatggagcttcttctggtcatatgtgtagtggatctctcctcctgttgttcccttcaatcatgtccaaggtcaagaaccattcaggtcataaacccctacgacaggggccacgagggctcatcttcgccactgcccctactcccaccttctgcatgtcctgctcggtgctgttccattccctagcgatgttctccggctaaagacgcttggagtttgtggtgtggtgacacttaatgaatcatacgagaggcttgttcccacatccctatacgaggataaaagaagtaggcgcaatgaggagtcatgttcattcacaagctctaacagagaaagttggggcagatgttcatctttaggtgcagccagtgatgaattattctcaggcaataataatgataagcagatatgagcccttgggcctccagttcgggcaacaagcatatggcaaagagagtgagggggcatgatattgttttccaattccaagatctaaggagcaaagactattaattatcataaacaagatttctaattggtgaaagctttttatatatagcagactgtgatgatgtgtagaggcaaaggatccttcagagttgaagcagggtaaaagattttgtgtcaagcatcgagccaaagattttgtgtcaagcatgaaggacattgaaacccggtttatgtgtatagttgaagcaggaaataaggtttctagaatgcttgaaaccaagaagatcttgcttgacatatgtgctaaaataccaggattctaggttctccagttaagctacctactgcccgattgtgtcagcacttcaagtgtgctgcaattgtgatgttattctcaaccatggatgaggacgttgttggactttgatgaacctagaactcttgcaccaacttgtctttttgttggaggtacaaaatacatggtgatccaaggtgaacctagagtggtcatccgaggaaagaagaatattttgccagtgatgacgtgtgtttagaggatgggatccttgcaattgtcaaacaaggagatgagagaccccttgaattgcttgctaaagcatatgctatcaaatcttttgacatagatccccagaacccctctgatgttgttttcacgttagaatgggaatcaatcggtgtcctaccttgtggcgagatggcgagaagaaagataatttttactaccaagggatcttaatcagaattctaggctcattcatacattcactacaatgccttcgaactcatgaacatttatctctggctctattgtggtgggttacatgaatagagtttttgcatgttcttcgttttatatggtgacatacttgttactatgtgacattgtttgatgaaacccttgcggcattgtattatttattttgttctatatagtcttaacattttatcaaataaaaatttatgtgacgtc

SEQ ID NO: 25542 - DNA, 844 bp, Zea mays
  Clone ID: LIB3912-033-F11_FLI
gtctcaactcttgagcagggaaaacgagagatccttggagtcagcaatggagtctaccgcgctaatgaccgcgagactaccactgctgacctctggctcccgttccaaacccctcccctttgcttccttcaccagggcggcttgccgtctcgcctccgcccccttctccggcagcggcagcgtcgtcctgctgtcgcgccggagccgcgactatgctggcgttggttccttggtctccgccgcggcggatcctggggatacggcggacgccggatccgagtccatcctgctcagcgtccaggggatgatgtgcgacgggtgcgccgcgagcgtgaagcggatcctggagagccaacccgaggttacttctgctaccgttgattttaaggaagcaagcgcagtcgtgtggacaacagatgaggccaaggggacacaaggttggcagaagcagtatggagagaagcttgctaagcaccttggcacttgcggatttgagtctcgcctacaagatgatcaacgaacgatcacgtgaagttacatgctagaagccaaagagtaaggtgaagccgaaccgatattgaagttcagatcagatgtcaccttaatggtcaatttataccaggatatatgttaaatattttgtctctatggattgcagttgtaggattagtctcggtgcttgtctggtggcataatactacatacctacctttcacatgatctttagctagattgtttcgaataggatgatgtcctaaaattgtaggtgtaggccactgttgcgaggaaggagtttgcggctgggctattgttaaatccggtcttcccgttgcttcgaagatat

SEQ ID NO: 25543 - DNA, 682 bp, Zea mays
  Clone ID: LIB3912-033-G3_FLI
tatccactctcggcggcgccgcatctctcctctcttcttgcccttccttcccccaacccacacagcctcactaggggtctaccggcggcggcaacgagatggtgcagcgcctcacctaccgaaagcgtcacagctacgcgacaaaatccaatcagacccgggtcgtgaagaccccaggtgggaagcttgtgtaccaatacaccaagaagagggcgagcggtcccaagtgccccgtcaccgggaagaagatccaggggatcccccacttgagacctgccgagtacaagaggtccaggttgtctaggaaccacaggactgttaaccgtccttatggtggagtactctctggaattgctgttagggagagaattatccgtgctttcttggttgaggagcagaagattgtcaagaaggtcctgaaaatacagaaaaccaaggacaagacagctgcaaagtagagctccaggaatggaagcctagacactgcgagaagtaattttggtggatggaaaatatgtttgccttgtgtcgagcatttagcatgtgagacatgcctgttgaagtgtttgagtttagagaccggaatccctttcacctttgaattgttgctatgtcgggacatctgctcccctagttgctttgttatgaattgagatcatatctgggtaagataatcttgtct

SEQ ID NO: 25544 - DNA, 1067 bp, Zea mays
  Clone ID: LIB3912-035-E6_FLI
tcgccagcaagcaccagcggctcccgctcggcgacgccgcggcgctccccgccagcctcccgcgctgcgacgtgtgccaggagaggccggcctcaggggcgaatctaggggggtttatcggggtcagccgaccccgataaattttataaatcctttagtaaaatactgttaaagttcataaaaatttatatgatatagcaaagctgctcttgacgaccccgatcatattatcggctagattcgctactggccggccttcatcttctgcgtcgaggacagggcgctcctctgccgcgactgcgacgagcccatccacgtccccggcacgctctccggcaaccaccagcgctacctcgccaccggcatccgcgtcggcttcagctccgtctgcggcgccagcgccgagggcctcccgccggcgccgcccaagggaagctccaagcccacggccgtcgtcagcgcgccagctgccgggacgaccaccaaaacaaggacggtcaaggacgcgctgccgcaggaggtgccgtcctcgccgttcctgccaccgtccggttgggccgtcgaggacctcctcgagctgtcggactacgaatccagcgacaagaaagactcgtctcttgggctcaaggagctggagtggttcgaggacatcgacctgttccacgcccattcgccagctaaaactgccatggcggagttcttcgcctcgccgcagccagtgagtaacgccgggttctacaaggcgaacggggcgcgcctgttcaagaagtcacggatggaggtgcctgacgacgacgacgaggactacttcatcgttcctgatcttggctgagaatgagatgagagatctctgcatgattctccagtcatgtgatgtgtgtatgtatgcaaaatatgtatgtatgccatcatggggtgcactgacgcttacgttggacatatgtaattatccagtcatgtgatgtgtatgtacgcaaaatatgtatgtatgccatcatgggatgcactgacacttacgttggacacatatgtaattataaaaggcagggccatgctttcagcctgat

SEQ ID NO: 25545 - DNA, 1109 bp, Zea mays
  Clone ID: LIB3912-035-F9_FLI
tcctccccctccctcctccatcccattccataccattccgccaaagaagaaccacagacgctcgctcccaactcccaagccaagccggatcccaaaatcggcacagcgcacccactccgctcagtcccttcgttcacccccatccatccagccagccatgggcggcaaggactgcggcaaccacggcgaggacgacctgcggcggtcgtgccggcgcctgctagcgatcctcctagtcctggccctgatcgtgggcgtgatcgcgctgatcatctacctggtggtccgccccacgcacccgcgcttctacctacaggacgcgtcgctccagcagctagacctctccaactccaccaccccgtcctcctccctcctctccacgacgctgcaggtgacgctggcctcgcgcaacccgaacgagcgcgtgggggtgtactacgaccggctggacgtgtacgcgtcgtacaagtaccagcaggtgacggtggccgcggcgctgccggccgtgtaccagggccacggcgacgtggacgtgtggtcgcccgtgctgtcgggccccggcgtccccttcgcgccctacctcgccgacgcgctccgccaggactgccaggcgggctacctcgtcctccaggtcaaggtcgacggccgcgtgcggtggaaggtcggcagctggatctccggccactaccacctcttcgtcacctgccccgcgttcctcgtcaccgccggcggcaacggcgcgcccggcgcttccgggttcaggttccagaccaccacctactgccacgtcgaggtttaaattaggagcgagaggaggggaaggaagcagagagccagagaccatggtggctacctctctagctgctgctccacctcctgccgttgcctggtgcggtaataactctctctctttctatctgtccgctgctggcgttactgctgctgcagtgatgcgggatgtaaaggaggggtaaaaaaaattcctttcgttctagccccttgtttttttcatcttctccttcacctttccatatactactagtatgctctgtcgactgttgttcaaaggaagcttccaattgtcaataaacattttggatcggaggatc

SEQ ID NO: 25546 - DNA, 1827 bp, Zea mays
  Clone ID: LIB3912-035-G4_FLI
cgacctgcgccgattctgcccgcgctgccggcgagccgacgccggcgccggcgcccgcgcccgcgccccccaagaagtggcagcggctgggccgcaactttgccggcgccatcgccgcgttcaagaacacgctgagcctggatggcggtggcggcggcggcggcctcccccgcgacccatcaccgcgagccgagaagccgccaccgctcctcctccgtggcctcgcgcagctctactcccgcggcgccgccaaccagcagctgccagaaaagctcgtcgctgacctccgccgccacttcgacgctctccccaacagctacgcacaggcaggatatgacatgaaagatgtcctcctgcatgcccgccttgcagagcaggcgacaggtgaggatcagcctgcagtgaacattgaggaagttcatggcagaggaagttgtgaagaaggcactgttttccagctaacatttgcttgcacagccccgctctcatggcagtcaatgtcaggatcactagacagcccttcgttctgttgcaagaagatccagatctttgagaagagagggctgacacttggcgtcgtcatgatacttgtgcagactgggaacgaggcgctcttcaagaaccaggttgagtccgcgctgaaatcggtagtaaagaagcaaagaaagaacagtggtggtgtgaagctaccatttgggctctgcggttgtcaagaagaaggatcgagaaacttcgatgaggagtcgatgtttgatccagatgatgaccgggtactcgacaatgagccggcgcacagaccacagcttcccactcccctaccacaggcatcagtcttcgtctcagtagatgaatggcaaaccattcgctccggtggcgaggagcttggtcgctggatgctgcgttctgaggagatcgagttcgttgattggtttggtgcgaattcattcaggggtgtctataagggaaagaaggtttgggtcaacaaactgagaggctgtgacatggggagtgcttacgatgtcgagattcgtcaggacttgctgcagctgatgagctgtggccaaaggaacatcctacaactccatggcgtttgtttcagtgagaaccatgggctatgcatagtaacgaggatgatggaaggaggatcggttcatgatattcttgtgcagagaaacaagaggctgtccctccgagacacggttaggatcgctctcgatgtcgctgacgcaatggccttcatgaacggctatggcatcgcgtaccgtgatctcaatgctcggaagatcctgctggacaggcaagggaatgcttgccttggggatatgggcattgttaccccttgtagtaatgttggtgaggtcaccgagtacgagacatctgggtaccgatggctggctccagagatcattgctggagatcctgaaaccgtctccgagacctggatgagcaacgtctacagctacggaatggtgctctgggagatgatcacgggagaggaggcctactccacctactcgccagtgcaagcagctgtcgggatcgctgcctgcgggctgaggccggagatccccagagactgtcctcctttcctgaggtcactgatgaacaggtgctgggacagttcccctttgaagcgccctcagttctctgagatcacatccatcctacagaggcagaatgttagatagttcttttttgcccccctccctctcttccttttccttctatatcatatgctatataccagtttggcttgggtgtctgcctaatcatgcaggaaactgcatctgagaaagtataatatatatgcgcagaggcttgttattt

SEQ ID NO: 25547 - DNA, 1242 bp, Zea mays
  Clone ID: LIB3912-036-C10_FLI
gatgctgccgccgctactccagttccactccacctcacgagtctcacacacctcccccctcctttttagggagagaaagcaacgaaacgccgagagaggcgtgcgagcgggagcaaggagatggagcgggcggcgccggtgaggagctcccacacctccacggccgacctactcgcgtggccgcagccccagggccccgccccagcaacgccgtcgccgccgcgccggcccggtcagccgtcggaggctatcaggaaggtggtgttcgggggtcaggtcaccgaggaggaggccgacagcctcaccaagaggaagccgtgctccgcgcccaagtggaaggagatgactgggagcggcattttcgctgccgggagcaatggagacgctggggaggcagctgctgccgcgaagcccgcccgaacctcctcgcgccaggcgagcagtactgtaagccacatctcgttcgctgaggatggaaccgatcctcccaaaaagcccacatcagtagctgaggtggcaaagcagcgtgagcttagtggcactcttcaaagcgaggcggatagtaagacgaagaagcagatctcaaatgcaaagtccaaggagctcagcggccacgacatctttgctgatactctggattccaggtctaacagggcaaggaacccatcgaacggcagcacagcctcacacgcacctgccaaaaatacaaacgccagcaccttctcgtttggagatgccaacactgacagcacgccaaagacggcaaggaagataaccggcaagaaggtcaacgacctcaccggcaacgacatcttcaagggagacgctccgccagcttctgcagagaagcatctgagcaccgcgaagctgaaggagatcactggaagcaacatttttgcagatgggaaggaaccaatccgcgagcgtgtgggcggaaaccgcaagcctcctggcggtgagagcagcatcgcgctgatttagcataatccgggactcagtgtcgacccctagaggaggatttccaccagtaccaggcagcaggctgttggatcgtcagtttggtgtcttgttcctgatcaaggtgcggcagtgaagagccccgttttagtcttgatgatgtttattaactgttggtgtgtgcatgtttggtttggctgtgagatacccatgccgtcctcatcatggcagtgtgtagtgtttacggttgatgtgtttttacaaataatagctcgagtctgaacc

SEQ ID NO: 25548 - DNA, 1121 bp, Zea mays
  Clone ID: LIB3912-036-D10_FLI
ttcactctaaagtagacgggtcccgttcgatttcgcccaaaaccatccaccggcatcggccggagagacagcatataggcaggcgcggtgagaggaatcggcatcagaggtactgtacgatgttccgggaggagcagctggacctggtgctggtgccgctggccctggcggcggtggccggctaccacctgtggctcctctgggcgatcctgcgccatcccacccggaccatcatcggcctcaacgccatcgcacgcaagcgctgggtcgccgccatgatggccaacacggagaagaacggcgtgctcgcggtgcagacgctgcggaacaacatcatggcgtcgacggtgctggcgaccacggccatcacgctggtctccgtcatcagcgtcttcatcggcgtcacgtctccggcctcctcctcttcctcgccgtcctccaaggcgccgcggctggtgtacgggagcaaggccggggaggtgttcgcggccaagtacctggccgtgtcgctctgcttcatgctcgccttcgtctgcaacgtgcaggccatccgcctgtacgcgcacgccagcttcctcctgggcggcctgccgcccgggcccggcgacgaggcgcgcgaggagttcgcgtcgtacgtggcgcggacggtgaaccgcggcagctacgcctggtcgctcggcctgcgcgccttctacgtctccctcgcgctcttcctctggacgttcggccccataccgatgctggcctgcagcgtgctcatgtgcggcctgctctacttcctcgacaccaccagcagcgccgaccacggccacgcgcacggccagcaacgggccggcgccgcccgaaaggatagcacagtctgatctcaatctacttctttacaagaatgccagctttgagaaactcgtatctcaaaacatataatatataatatcagctttgagaaaatgctatctctgtttctgtctcttctcttcactacatcttctttatttctgtagcctctacaacagatgtagtccctacagggatcaagtatgtaagggagaaaataccttgtcgttagaccgtgtgctcggcagagcgtgtatatagttgtgtataacaccgttttatactgt

SEQ ID NO: 25549 - DNA, 792 bp, Zea mays
  Clone ID: LIB3912-037-A2_FLI
ttcatgcttttccagaagaaagtttcctctaaaaaggctgtcacactggcagttgtgtcatttggagtcgctgtagcgactgttaccgatctggagttcaacttttttggtgcttgtgttgcattagcatggattgttcctagtgccgtgaacaaaatcctttggtcaagtttgcaacagagtggaaactggaccgcccttgcgctgatgtggaagacaactccgattacgatatttttcttgttgacattgatgcctttgctggacccccctggcctcttgttgttcaattggaacttcagaaacagctgcgctgttatcatctctgcattgttcggtttccttcttcagtggtctggtgctttggcactcggcgcgacgtcagctttgtctcatgttgtgctgggccaattcaaaacgatcgtcatcatgctctccggctacctgatcttcggctccgaccctgggatcaccagcgtctgcggtgccgtgctcgcactcggcggcatgtccttctacacctacctgggtctgaagaaagaccccgcgaccagcggcaaaaaagcaccatcgagacagaactccttcatggcgagacctaaggtcgctgctgacgacagtgacgacgcggattcagagcaagatgatactgtataggttggcgaaactgtcatctaggccacttaatgcaaagatcaatctgagctcagttaattctcggttggttgtaatctgtcggtgaccgagtccatttttgtacatagatgctacctttaagccttacggattgtc

SEQ ID NO: 25550 - DNA, 1678 bp, Zea mays
  Clone ID: LIB3912-037-B4_FLI
tgagcccgacgaacttgccagccagattcgtgaagcagttagtgaggtcagggcatggcaggttaaaaaggcccttcccttctattatccaaattcccagcgattgtgagtttcttgggtatcagccatgaggaaaatgaagtgccttgtggatcatttgtgtgccgaggagatccaacaccgggttggtgagctttggaaggcagccttgactgagtttgtgtctgtactatttacttgatgaatgtcctaataatttcagagtgatgagtaaaagctgggcctagtagctggttctgaacttctagtattccaccgtttagaattatctaaatgtaagcatattttatttgtgctgttactcgcaagtacctgttagtactaatcatttcttggccaattctggcttgcaacagagcagtggttgttttggttgtgcccagcctactccgataatagctgttgatgagcccacaaaaggtttaagaattcaagggcgctcagtaaaaagacacaatttatctgacgacttttggagttcaagcccgcacgaaatggagaacagtgccttgcaatcccgacacagtatgtcctcaatcagcactgctgcacaacctaatgatcagcatgcttctggaagtagcagctccccaaatgaatttgtaaatcaaggtaaattagttgccatatatacatgtccagaacacgtggtgcccatgtcgatttatggtgcactaatttacaatgtttggttatctgttccatgcttccttgagttttcacttttcagaaagcgttaaaccaatatttgtttgttggagttctgtttattcttattgaaactgcatttcagtatggtgtgtttgtgctccagaaaattcagcaaactggcaattttacaagatgcaatgcgatggacattttatgcaaattattacctagcatgactgtatgcagtatcagttcttagaactcatctatgctcctataatcggtaactaattagtgttacctgtctataatctagcaataagcaatctaaatcctttttggtttccaattttccatagcaggaaataatatattatgacagagagtctctcacgtataggccaactcctgaaattggtcacacacatggccagatgtaaactatttgttcttatggctcccgaattccaaccctatagggtaggcgccgagggagaaccactggtggttcattgcctcatttttatatgctaaagcaataaaaccactaatggttcattccctgacattatgtccctcatttgtacaaacataggtcttctactatggcaccagactagacagcagtggattggaaaacgaagacataattctcagggtcaacaaagtcaaggaccaaaaataagttgtaatgctacatacgagagcctgctcgggagctcgaaaccatttccacaaccgatccctcttggtgaaatggtgggtttcctcgtgatcagctgggagcaggaaggcctatacgattagagttggttattggaagtgtgctgtttcaagtcatgaatcgctgaaatgtacgcaacttctaggctgcgaaagcttgtgacctcatggatgtggactgtctcggagacaggatgacatccctcttatgcaaatgtaaaatattctttgttattttattact

SEQ ID NO: 25551 - DNA, 1137 bp, Zea mays
  Clone ID: LIB3912-037-C9_FLI
cgaccccctttcccctccctccttcctcggcctcctcgaccactccgacgcctacagcgcctccggcgagctccacctctccaccggcggcagcgaggggcgagggggctaatactgtaggcggaggaggagccgagccttgccgagccgatggggcagcagtcgctgatctacgcgttcgtggcgcggggcaccgtggtgctggccgagtacaccgagttcaccggcaacttcaccaccatcgccgcccagtgcctgcagaagctccccgccagcaacaacaagttcacctacaactgcgacggccacaccttcaactacctcgtagaggacggattcacgtactgtgtagttgctgttgaatcagtcgggcgacaaatccccatagctttcctggacagagttaaggaagacttcaccaaaaagtatggaggcgggaaagcagctactgctgcagcgaacagcttgaagagggagtttggaccaaagcttaaagagcacatgcagtactgtgtggaccaccctgaggaggttagcaagcttgccaaggtgaaggcccaagtctccgaagtcaaaggagttatgatggaaaacattgagaaggttcttgaccgtggtgagaagattgagctgctagttgacaaaactgaaaacctgcgttctcaggcacaggatttcagacagcagggcaccaacgtgcggcgaaagatgtggctccaaaacatgaagatcaagctgatcgtcctgggcatcatcatcgcgctgatcctcatcatcatcctgtcggtgtgccacggcttcaagtgcggcagcaagtgaggaggggggcgtgacttacagatggctggtgtgccctggcaccggcgaggagaaagaccatggggagggagttttgctctttgtggtcgtcgtgttgttgagtcctgcgctgattattcttggtgatcgtcagagggagttattcctgatgtcggtgttgattgctgttggttgggaagtgacggtgaaccgggggaagggggaggggttgtgtcgtgtaattttggatgctactgttgtgcatgtatagcttgtctgctaccctgttccatgctgtttgttactccgatgccagtagatgttacgtactactacgtt

SEQ ID NO: 25552 - DNA, 2214 bp, Zea mays
  Clone ID: LIB3912-037-G4_FLI
ctagtcctctgttacttctcccgccgccgccaatcccctcccgttctccgccaccgccaatcccctcccgtcctccgccacctctgctgagagcgagaagagatggccggcaagggtgatgggccggcaatcggcatcgatctcggcacgacctactcttgcgtcggtgtgtggcagcacgaccgtgtcgagatcatcgccaacgaccagggtaaccgcaccacaccctcgtacgtcgccttcaccgactccgagcgcctcatcggagatgcggccaagaaccaggtcgccatgaaccccatcaacaccgtctttgatgccaagcgtctcattggcaggaggtttagtgatgcctctgtccagagtgatattaagctgtggcccttcaaggtcattcctgggcccggtgagaagccaatgatagttgttcagcacaagggggaggagaaacagtttgcagccgaagagatctcctccatggttctcatcaagatgcgtgagatcgctgaagcttaccttggcagcacgatcaagaatgctgttgtcacggtccctgcctacttcaacgactcacagaggcaggccacgaaggatgctggggtgattgctggcctcaatgtgctgcgtatcatcaatgagccaaccgctgctgctattgcctatggtcttgacaagaaggcaaccagcgtcggtgagaagaatgtcctcatctttgaccttggaggtggtaccttcgatgtctccctccttactattgaggaaggtatctttgaggtcaaggccacagctggcgacacccatcttgggggtgaggactttgacaacaggatggtcaaccactttgtccaggagttcaagaggaagaacaagaaggatatcactggcaacccgagggctctccggaggctgaggacctcttgtgagagggccaagagaactctgtcttccactgcccagaccaccattgagattgactcgctgtacgagggcattgacttctactccaccatcacccgtgccaggtttgaggagctcaacatggacctgttcaggaagtgcatggagcctgttgagaaatgcctgagggatgccaagatggacaagagcagcgtccatgatgttgtccttgttggtggctccactaggatccccagggtgcagcagctgctccaggacttcttcaacggcaaggagctgtgcaagaacatcaatcctgatgaggccgttgcctatggtgctgctgtccaggctgctatcctcagtggtgagggcaacgagaaggtgcaggacctgcttctgcttgacgtcactcctctctctctgggtctggagactgccggaggagtgatgaccgtccttatcccgaggaacaccaccatccccaccaagaaggagcaggtgttctccacctactcggacaaccagcctggtgtgttgatccaggtgtacgagggcgagaggacccggacccgcgacaacaacctgcttgggaagttcgagctctccggcatcccaccggctccccgtggtgtcccccagatcacggtctgcttcgacatcgacgccaacggcatcctgaacgtgtctgccgaggacaagacgacggggcagaagaacaagattaccatcaccaacgacaagggccgtctgtccaaggaggagatcgagaagatggtgcaggacgcggagaagtacaagtccgaggacgaggagcacaagaagaaggtggagtccaagaactcgctggagaactacgcctacaacatgcgcaacacgatcaaggacgagaagatcgcgtccaagctggctgccgacgacaagaagaagatcgaggacgccatcgacgcggccatcagctggctggacgccaaccagctcgccgaggcggacgagttcgatgacaagatgaaggagctggagagcctttgcaaccccatcatcgccaagatgtaccagggcgcgggtgccgacatgggaggctccggcggcatggacgaggacgctccggctggaagcggtggccctggccccaagatcgaggaggtggactaagcggtttgtgtcagtctcgtgtgtctgctgcagtggctggctggcccagtcgctgctcgatttatcgtcgtcgtcgcggtgtatccgcgttagaaccttttgttggtgaacaatattatcgtggcacgcgttttaagtaatacggtattctggttcggtttc

SEQ ID NO: 25553 - DNA, 298 bp, Zea mays
  Clone ID: LIB3912-038-C6_FLI
ctcaagaacagcacttcaagtggaagaagtctgctgtcacagccttcccaggcctagtagtaatattcaatttaacaccttccatagcctctcttacactaagcgtgtgatgtcttgtgttgttactactacttaccacttgttgctttgcgagaattatgtaatttgcatgtactatactatactgtaccatttgatttatctgtgcatattactgctgttggtacgtgacaagtgcaggaaacaaaccactgaaaagaattaacagcttggacagtttgtgaggtgatcttgattt

SEQ ID NO: 25554 - DNA, 1621 bp, Zea mays
  Clone ID: LIB3912-039-A4_FLI
cggccatgactacatctcctgttccttcccaagccgaccacgttgccatcttcccgctcatggcgaaaggccacaccatgccgctgctggacctcgcctgcgtcctgcgcggccggggactcgcagccgtcaccttcgtcacaaccccgggcaacgccgccttcgtccgcgccgctctgcggcagggcggggccggcgacgcggccgtcctggagctggcgtacccggccagcagcgcgcccgcgggcggtgagggcgccgagggcgtcgcctcggcggcctccttcgctgcgttcgcggaggccacgtcggcgctccggccgcggttccaggaggcgctcgcggcgctgcgcccgcccgcgagcctcctcgtcgccgacggcttcctgtactgggcgcacgcgtcggccgccgcgctcggcgtcccgagcgtgtcgttcctcggcacgtctgcggtcgcgcacgtcgtccgggaggcgtgcgtgcgggacagaccgggagccggtgccgacgtcggcgcatccgctggcgccaccacgtgctacacggtgccggagttcccgcacctccagttctccctccgcgacctcgtgccgccgccgccacagatgatacacctggatgctaagatggcggcggccgtcgcggcgagccgcggcctcatcatcaacaccttccgtcaactcgaaggccgctacatagagcactggaaccagcacatcgggcctagggtctggcctataggccctctgtgtctggcccggcaatcctactcccccggcggcaccggcagtcaacaacgacacgacgccaagccctcctggatgcagtggttggacgacatggcggctgccgggaagcctgcagtgtacgtctcactggggacgctggcatccatatcacaggcgcagctgaaagaggtgtccgacgggctagacagtgccggggtgaatttcctgtgggctgtgcggcggcctgacaacgccgatgatcttggcacggggtacgaggaccgtgttgttggacgaggcaaggtggtcagagaatgggtggaccaacggcgggtcctccggcacccaagcatccgaggatttctaagccactgcgggtggaactcggtgctggagagtgtcgccgcgggtgtccccttggtagcatggccgtgcgacttcgaacagcctatgaacgcgaagttcgtcgtcgatgagctgcgcatcggcgttagggtccataccagcgacggagcggttggaggtttggtcaagagcgaggagatcgcgacggcggtcaaggagctcatgtttggggaggcaggaaaggcgatggcactgagagcgaaagggatagcagcacaggctcggctagccgtgtcagatggtgggtcgtcatggaaggaggtcgaggagatgattagtgagctacgtctacgtggggtagatatgaatggaaaagccaacggaggtacctgtgcaagcatactgtagtaccgtacaagggataactcaaaaagaaatggtgtgttggatctttgcactactttggttctgacttctgaacctctgctgtagctccttttctaaagtgctttttgtaaagaaagttctcctgtggccaccagagc

SEQ ID NO: 25555 - DNA, 1771 bp, Zea mays
  Clone ID: LIB3912-040-A11_FLI
aaatttgaaaatcacgcgagacggagagatctgggccgtgcgtcgcgaggaaaggctcggaacgggagggcgcgggccgtcggatgctcacagtcgcagctgccaccgacgcctacggctatttaaccccgcgctgccgacgccgcactcgcccccggcctcctccgcccgcatccccgatcccgctcgctcgctcgctcgccgccagttgtccaacagctcgaatcgtctcatacctcggcgaaaatgagagagatcttgcacatccagggagggcaatgtggcaaccagatcggtgccaagttctgggaggtcgtgtgtgacgaacacggcattgacactacaggtcggtacactggcacttctgaccttcagttggagcgcgtcaatgtctactacaatgaggcctcctgtggccgctttgtgccccgtgctgttctcatggacctagagcctgggacaatggacagtgtccgcactggaccctatgggcagatcttccgccctgacaactttgtgtttgggcaatctggtgctggtaacaactgggcgaaggggcattacactgagggcgctgagctcattgactctgttctcgatgttgtgaggaaggaagctgagaactgtgactgcttgcaaggattccaagtatgccactcccttggtggcggtactggatctggtatgggtacgctgttgatctcaaagatcagggaggagtaccctgaccgcatgatgctgacattctcagttttcccctcaccgaaagtatctgatactgtggttgagccatacaacgccactctttctgtccaccagttggttgagaacgctgatgagtgtatggttcttgacaacgaggccctctacgatatttgcttcaggactcttaagctgaccacccctagctttggtgatttgaaccatttgatctctgcaaccatgagtggagtcacctgctgcctaaggttccctggtcagctgaactccgacctcaggaagctggcagtgaacctaatccccttcccccgcctccacttcttcatggttggcttcgcgccgctgacatcccgcggctcccagcagtaccgggcactcacagtccccgagctcacgcagcagatgtgggacgccaagaacatgatgtgcgccgctgaccctcgccatgggcgttacctcaccgcctcggccatgttccgcgggaagatgagcaccaaggaggtcgacgagcagatgatcaacgtgcagaacaagaactcgtcctacttcgtggagtggatccccaacaacgtgaagtccagcgtgtgtgacatcccgccgaggggcctgtccatggcgtccaccttcgtcggcaactcaacttccatccaggagatgttccggagggtgagcgagcagttcactgccatgttcaggaggaaggctttcttgcactggtacacgggcgagggcatggacgagatggagttcaccgaggccgagagcaatatgaatgacctcgtatcggagtaccagcagtaccaggatgcgactgctgatgacgatgaggaggccgagtatgaggacgaggaggagccagctgatggcatgtgagggaaggctgttaaatgtgaagcctggtggttgcagggaccccgatgagttttgatgtcccctttcgtgttgtcgccatgttatactattacactagcataccaccctcgtggcccattccgtcgatcgttgctgttgatgcttgtgttttccttgttctatagaaccttccttccgt

SEQ ID NO: 25556 - DNA, 1916 bp, Zea mays
  Clone ID: LIB3912-040-A5_FLI
gccggccccggcgccgccgcgcatcctcctcgccggggatgcccacggccgactccaccagctcttcaagcgcgtcaaatcggtgaaccagtcaacggggccgttccacgcgctgctctgcgtggggcagtttttctcccccgagggtgctgcagagggctcaccggaggacgtcaccgactacctcgaggggcgcgcttccgtgcccatcccgacctacttcaccggcgactacggcccagccgcgccgcgattgctatcgaaggccgccgctggtgctcgcgggttcgcacccggtggcatcgagatatgccccaacgtcttctggcttaggggaagcaaccgcttcaccctccacggtttgtcggtggtttatttgtcagggaggaaagggttaggagggcctggctgttacagccaggatgatgtggatgccctacgggctcttgcagaagagccagggattgacgatctgttcttgactaatgaatggccgactggagtggtcagtgggtctgacacttccaatgtgcctaatcaggttttggatcccaatgggtatgatcctattgttgctgaattggttgctgagattaaaccaagatatcacattgctggcacaaaaggtgtcttttactcaagggaaccatatgtcaatgattctgctgctcatgttacccgctttattggacttgctaatgttggaaacaaagagaagcagaaatttattcatgcgatttctcctactccagcatctgtcatgtccagtgctgatatcaatgccaagcctccaaacgccactttgtcaccatatgttggttcagcaaaatcagttcctatcgaagaagctccaaaacgtgcagcggagaacatagattcacaatattggcgttatgatgtcaagcggcaaaggcatggggaagctggtgggggtggattgtgtttcaaatttgtatcctcaggatcctgtcaaagagggagtagatgcagttataggcatgatgaagaggcagtggagcattaccagagaaatgtctgttttgattttctaaacaaaggaaaatgtgagaggggcccagaatgcaagtttgttcacagtctttctggggagactgctctaagggatgcaagacctcctagtgaaagaagacgagtggagagcagttgctggttctgcttgtcgagtccagatgtcgagtcacatcttgtcattagcatcggtgaaggttactactgcacacttgcaaaggggccacttgttccaaatcacgttctaatgattcccgtggaacactgccccagtacattgatgatgcctccggaagcagaggcagaacttgggagatataagattgctctgagtaagtactttgagaagcaaggaaaaactgcagtctactttgagtgggtttcaccacgctctcaccatgcaaacctgcaggctgttcctgtaccattgtctaaagcagacgctgttaacaagatatttcatctagcagccaaaaaactgggatttgaattctctatggtgaatccagatggtgcaaaaactgctagagaatcattgatgtctcaatgcgaaagcaaatcagggctgttttatgttgagctcccggaaggtagaattctcttgcacatggtcgacagtaacgagaagttccctgttcagtttggacgcgaggtgttagcgggactgctaagcatggcggatcgtgcagattggaggaactgcaagatttcaaaggaggaagagattaaactggtggacgatttcaaacaaggtttccgcgaatttgaccctgcagagtgaaaacaatgctctgcgcctgtgtttttgttttgcaatttgtagtctatttttgaggtctcatttgaaatggacatatatgaagcacaagaatgtagtaacgttttcc

SEQ ID NO: 25557 - DNA, 1334 bp, Zea mays
  Clone ID: LIB3912-040-B11_FLI
cgagtggctgagtccacctctgatgctctgacctccgcctcctcctttctctcgtcgtcgtctccacgacacctcaaccccaatcagaacccggacccagatctctaaaaaatccccaatcccaatctgccgtacgccgttgcgatcatacctccaaatccgcccccaagtctgttcgatgcgaatagcacctgcgatttagcgaaccgtgcgctcgctaggtttagggtttcgagggtttgcgttagggtttgggcgcacgatggggcggtcgcgaggggtgctgagttccggcgacgacgacaccgggcacaggtcgaagcggaggagagtctcgtcgggcggggatgcgacggactccatttcagcctccatcgggggagctggagagggagggggcaagaaggcgctctatcactgcaactactgcaacaaggacatctccgggaagatacggatcaagtgctccaagtgccctgacttcgacctttgcgtggagtgtttctctgtcggcgctgaagtcaccccgcaccgcagcaaccatccttacaaagtcatggacaacttgtctttcccacttatttgcccggattggaatgcagatgaagaaattctcctccttgagggaattgaaatgtatggtctgggaaactggcttgaagttgcagagcatgttggtaccaagtctaagttacagtgtattgatcattacacatcagcatacatgaactcaccttgttatcccctcccggatatgtctcatgttaatggcaagaataggaaggaacttctagctatggctaaagtacagggtgagagtaaaaaagggactttgctgttacctggagaactcactcctaaggttgaatctcaattttctccctccagggtcaaggtggaagatgcacttggagaaggtccagcaggtcgatcaccttcacacatggctgttggtgcaaataaaaaagcttcaaatgtgggacatattaaggatggcgctactgtatcaaaagtcgaagagatatgctttctcaagaacgtctttttctgtaatttgagttctattaagaaatgaaatggtgatagtctcacgttacgacatgatgttcatgtagatagaagtgttggtgtgaagaagcccagatattctgcagatgaaggcccttcgttgactgaactgagtggatacaatgcaaagagacatgagtttgacccagaatacgataatgatgccgaacaagctcttgctgagatggaatttaaagaaactgattcggaaactgatcgtgaactgaaactccgtgtgctgcgtatttacctctccaggcttgatg

SEQ ID NO: 25558 - DNA, 777 bp, Zea mays; identical to SEQ ID NO: 22690
  Clone ID: LIB3912-040-E12_FLI

SEQ ID NO: 25559 - DNA, 541 bp, Zea mays
  Clone ID: LIB3912-040-F5_FLI
cattctcggcttcctcatccgtcccatcgaaccgcaaaccctaacctttcgattgccgccgcccgccgctcgctgctgcccgccgctcgccgcggccaatgatggcgaggggccgccgcggcccgggtggacgggggaggttcggcggcggcccgctgggcgacgagcggccagtccgtcacggcgtccgcgtcgaggagaacccgtacttcccattaccgcgtcgggcgtcgggctggggagtggcaccgccgtcgcggcacctgtgggtgggtggcctggcgcccagcgtcacggcgtccgacctgtcggagctgttcctccggtgcggcgacgtcgagggtgttgcccgcgaacccggccggaacttcgcgttcgtgagcttcctgcgggagggggacgctgtggccgcggtgcgggagctccagggggctcgcctggctggggcgcctgttaggatcgagttttccaagggggtcagtgttgaacatcctctgttcattatatgtttatttaatttgactccaagcaattatcggtg

SEQ ID NO: 25560 - DNA, 996 bp, Zea mays
  Clone ID: LIB3912-041-C1_FLI
tcacatccatctcattctactactgcctcagagaccaagctgctgcaaccggagaaggagatctattctacaaagtgaagtacttagcttgggacatggaaaccgtcgtgggagacctcatggcgaccgagctgaggcttggcctgccgggcaccgtggacgactgcagccagcaccagcagcagacccagctgaaggtggccgcgccgccgtccaaccctactaggggcaagaagcgccccgccgccgaggaggaggaggcaaacaagcgcgacgcggaggcagcacccccggcggccaagtgagtagctaatagatctgagcaccgaaacgttcagagtgaaccgaacgtgtgtctctcgtacgtacgttacgtggcgcccgtggtcggatggccaccggtgaggtcgtaccggaagctcgacctgaggatgtacaaggggtaccgggagctccgggaggccctggaggccatgttcgtctcctccggcagcgccaacaacaacaacaacctgtcggagttcgccgtcacctaccaggacaaggacggcgacctcatgctcgtcggagacgtgccgttcgagatgttcgctagcacctgcaggaagctgaggatcatgaagagatctgaagccacaggcctgggatcggcgagacaatgaagaaggtctgacgacgaccgagggcccgacaacgttcatgtcgatctcttctttttttttctttttgccccattattttattttgttcttcttgtccgagagaccccaagccaaaaggatgagcttggtgggtggcgcatcaatctacaaagcgcatgcatatacgcggatgtgtgtgcggctttggttctgtaagacgacgactagtagctaggtcttttttagcagcagcacagaagctaaggagatgcatgctgatgacgagcggttgtttcggcttagctctccgtatgctgtgcttgtacaaaccaaacaatacagttatcttcaccgt

SEQ ID NO: 25561 - DNA, 1982 bp, Zea mays
  Clone ID: LIB3912-041-E6_FLI
gatcctacctgttgccacatctagtggttcggcctttccatctgccgttcgcccagcgtgttctccctctagtgcggcaactgggcgaccgccgccgccgctctactccaggtgcccaggcgttcgtccgtaccttctcaggccttcatcgcgtccttcgccggcgacgatcaccgacaaggatggaaagaacaattaattccttgatgtacaaaggatctattcctgatgcaattaatcaatcaagaagggagaagaagctctttgtagtctacatatcaggtgaagatgaggcttccagtagtttggaacagtcatcactgattgatgaaaacgtggttgaagtgatcggtagatgttgcatcttattgcatctcaagcaaggcaatgttgatgcatcacagttttcagctatctatccccagaagtctgtaccaagtatatcagtgattggactgaatggagttctgctgtggaatcatgatggatatatcaactctgaaaatctgaaagaaagcattgagaaagcgtgggctgatcttcatctacaggagacagcagcgaccttgttgacagcatcacttgctacaagaaattctgaacctgtgaattctgctactactgttttgccagctcaagggggctcttctactttagaaaatccttctgatttatccagtcaatcaccagatgtttctggtgccagtgaagttgctcattcaactgatctgatatcacaagttcctaatagcaccgccctttatgaacctcttgagataaatgaaaaagaagggtcaaaatcaaactcggatgataaaactgttgagaagctaggttcaacaagtactgaatttgattgtgatttgcttgatatttcaaggaagtcaaatacggtcagttctgcagattcgaagggagaagacattacaccatcagcaaaaagaaagaacaaagatgatggaagtcacacttctattcccttggaggatactcctagtacactcactaataaaggagtttcttcccagtcacgcgtggaacaagacaaggcaacttcttttgtttctgtgaagtcagatgatattcagcttagtattcgtatgcccagtggaaatagactggagatcaaactaacaaaacaagatgttttaaggaaagtgaagaatttcgtggatgaaaaccaaggcaatgggcttggctcatatgacctttctctggtttatcctaaaagagttttctctgaacaagatatggaagcaacactatccgagctgggtattcaaaaccgtcatgcaatgattgttgttccacatcggcagtctggtcaggtatcaaggcgtcactcctcggcatcttatgatatgggtgtcaattcaggtgcggatgatgttggtggcaattcaggtgcggggggatactttggttacctgagaaccgtcctgtcttatgtgaatccactctcctacctgaggggaaataccaactcatcaaatacagagctacagtcaaatgaaggcctgcggcagcttagacatggatctggtccatggagtgagccacggcctcttggcaataggggccatgaagtgactgatgcagactctgcaaacacgctgcgaaggcggcctagaccatttggtgccaatatccacactctggggagcgaggatcatggtccgtctgatgaaagaaatgttttctggaacgggaactcgacagagtttggaggcgacgacagaaaataggttgtggcgtggctggcagggcctgggacgacactatcagacagaatcaaagttgcgaatagacagctgaaacaaatgcctcgacaggcttattgaggaataagtattgagattatagtgctgaaataatcgctgaattgtgatgtttacatttgtggaaacatacggtcgctggatccgtatactcgttgtatagtacatagccacagatatattaaatccgaactgcttggttct

SEQ ID NO: 25562 - DNA, 2281 bp, Zea mays
  Clone ID: LIB3912-041-F8_FLI
cgaagaatccggcttccctctcgtcgcgtcttccgctcgccgccgacctcgacctcgcctcgcctccacgtctccttcctacctcgcgccaagcaaaggccaccgccaccgcgcgtccggcggagccctttatcaggccgcgcccgctgctgggcgggacctctccctccctccctttccactccacctccaatcctcctccccgtccacagtccacagcagaacccgttgccgttgcaggcgtaagggggcgatcgcgcttgatttttagcgctctcctgtgagcctccggctgcggcgtcgcagagatgggctgtgccccggtggtgtgggccgcggtgtggttgcttgctgccgcggtggcagggttcgccgatcccggcggcctcgagcgcgcgtttccaatagtgaagccagactacgggcacacgaaactccaactcgcaaaagaaggtctggaagcaattcagaggatcagaactccaatagctgctgtttctgttattggcccctatcggtcgggcaaatcttttcttctcaaccaacttctctccctatcatgtgacaatggttttggagttggacacatgcgggatacaaaaacaaaaggtatatgggtatggggttcccccgttgaggtggatatcggtggctccaaggtgtctgttctatacctggacaccgaaggatttgagagtgttggaaaatcaaatgtatatgatgataggatatttgctctggcaactgttttaagttctgttctgatctacaatcttcctgaaacaattcgtgaagccgatatatcgagactttcatttgccgtcgaaattgctgaagaattctatggaagagtcaaggggcaagatgttgcttttgagccagccaaacttctgtggttgatccagagggattttctccaaggaaaatcggttcagcagatggttgatgaagctctccaacgggtacctaacaacaatggagacacaaatattgacgagctcaaccaaatcagagactctttggcggttatgggagataacagtacagcttttagcttaccacagcctcatctgcaaaggacaaagttatgtgatatggaggaccaggaacttgatccgttgtatgtaaagaagagggatcagttgaaagaagtcgttgcatccatgataaaaccaaaaattgtgcagggtagaactctgaatggaacagagtttgtatccttcctagggcagatagttgatgctttgaataaaggtgaaattccatcagccgggtcgctggttgaaattttcaataaggccattcttgaacgttgcttgaaggtgtacagtgaaataatgggcagagcaggtctaccagtgtcagtggatgaacttcgggagttccacgacctggcaaaagatgaagctagaaggcttttcaacaagcagcatttcggtaaacatcatgctgctcggtccatcctcaagcttgatgaagagattaaaaaggtgtacagaaacttgggccaagctaacgagtatcagtcatcaaagctgtgcgaagcacggttctcagagtgcgaagataaaatggaacgactccaagtcttgaagcttccgtccatggcgaaatttgatgccggattccttctctgcaatcgaagttttgaaacggactgtgtggggccagccaaggaaagctatcgacaccggatgtcaaagatgctggcaaggtcccgtgctcttttcatcaaggagtacaacaacaagctcttcaactggctcgccatattctccctggccatggttgtcgttgggcgcttcttggtcaagttcttcctgctcgaagttgctgcgtgggtgatgtttgccttcctagagacatacacgaggctgttctggtcgtcggagtccctgtactacaaccccgcctggcacgcgatcgtctcttcttgggaaaccgtcgtctacagccccgttcttgatcttgacagatgggcgttcccgatctgcgctgtcctgttgtttttggcgttttattggcgttgcctcggtggaaggaggggaattgcccggtcactgctacctctgtacaacggggcttattacagaagctccagtcgcacaagaacagactgatccctcgaaccatgcgcacaatcacaccattagcgtgcacatatagttgtatcatgcttattccaacactgcattcttcgattatgagtcaaaactcgggtgttgctgtaaatatgaaacccagaaggtttgtcaattgtataaatatatggctgcttgct

SEQ ID NO: 25563 - DNA, 1290 bp, Zea mays
  Clone ID: LIB3912-042-A1_FLI
agcggcttccgcgtctgggcgagggcttacccgcgagggacggcgcgacgcggcggcacttgagctagggtttaaccctccgatcccgttcctttcccggcgaggcgatggacgaggcggcgattgacgacttgatccggcggctcctcgaggcccgcggcgggcgcaccccgcgcaacgcgcaggtgactgacgccgagatccggcgcctctgcgccaccgccaaggacgttttcctctcccagcccaacctcctggagctcgaggcccccattaagatatgcggggatgtccatggccagtattcagacctccttcgattatttgagtatggtggctatccaccagatgcaaattatctgttcctgggtgactatgttgatcgggggaaacagagcatagaaacaatatgccttctcttggcgtacaagataaagtacccagaaaacttctttcttctcaggggaaaccatgaatgtgcctcgatcaaccggatatatgggttttttgatgagtgtaagaggagattcaatgtgcgtatctggaagatattcactgagtgttttaactgcctcccagtggctgcacttattgacgataagatcttttgcatgcatggggggttgtctcctgagctaaagaacatggatcaaatacgtaacatttctcgtcctgtggatgttcctgacgttggtcttctatgtgatctgttatggtcggaccctgataaagagattgttgggtggggtgagaatgacaggggtgtttcctacacctttggagctgacatagttgctgagtttcttcagaaacatgatctagatttgatctgcagggctcaccaggtcgtagaggatggctatgagtttttcgcaaatcgccagcttgtaacaatattctcagcaccgaactactgtggagagtttgacaatgctggtgcactgatgagcatcgacgactccctagtatgctcgttccagatactcaagccttctgaaaagaaaagaaaagcaggagctgagaacatgccaaagcccggtacacctcccaggaagataaaaataagtgttacccgcatttagccagattctcgttatcaaactggatttgagaagttgtgattaaatgctccccaaacttgttatggtaggttttttggtgagcttaacacggtgttaaactgtggagtgtggaccaccgtgcttatgtcttgctgatctgaagtcatgcaaatgtatcctggcgttttgccaaacaaaaaagatcatgctaacagaaacttctggattt

SEQ ID NO: 25564 - DNA, 1098 bp, Zea mays
  Clone ID: LIB3912-042-E2_FLI
ctccatctaaaatagcagcgacgagacgagcgagaatatctgccaattcaaaaccaaaaaggagaggaggggagccccggacggagaagagaacagaagaaaccccgcggccaccccttcctgcctatatttctctctctgtcttgcgcgacagggagagaccagcgccaacacctccggtttcttgattgggtggtgatcggtgaaggaaggagaaattaagatgagcctcttcgggcttgggagcaagaatcagaagacgttcaggcctaagaagaatgcaccgtctggcaacaagggtgtgcagctgaagaaacacatcgatgcaaccttaggaagcgggaatttgagggatgctgtccgattgccaccaggggaggatctcaatgaatggctagctgttaacagtgaacatcctgtatggtactctaatggagttctgcacaccagctacatgcccaacaatgtcagctggaccaaagtttgagtatagatgggccgatggggtgcagatcaagaaaccaattgaggtttcagcaccaaagtatgttgagtacttgatggattggatcgaagctcagcttgatgacgaatccatcttccctcagaaactcggaaccccttttccacaaaatttcaaggaagttgtgaagacaatctttaagcgacttttccgtgtttatgctcatatttaccactcacattttcaaaagattgtcagccttaaggaggaagcacatcttaacacttgcttcaagcattttacattgttcacttgggaattcacgttgattgacaaggctgagcttgcaccacttattgatctaattgaatccattgtttcagtttgttgacatgacatcaatgattatttggatcattttcttatttttggagagcaaggagttacaactaagtgtccagtatgagggtgagactaagaatggtcaaaagtttttttttgttatcttttaggtgtctgtctctacaatgggacttgtgcatgtttgtcttatgaagtcctgaagaaactatttagggctcaatgagataatgttgtgtatccttctcttgaatgactccataagttctgtttgc

SEQ ID NO: 25565 - DNA, 1056 bp, Zea mays
  Clone ID: LIB3912-042-G12_FLI
ctcttttgattcccctctcttcttgcaagagggtgtaagaaaaccaagccgccgccgggatactacactacccagctcctctccagtctcaacccagcccgcctctcgaacttccagaaccgtcctctcgctgcctgcggctgctatctctgtcatctagaggagagtgtaagggcactagatagagagtgatggcttctcctgatccatcggcggcagatgccggcaccgggggcgagtcgacgagccaggcggcggccgtggaaccgatccggatgccgacggtggaggagatcaaggggcaggacatctggaacaactgcgccgttcgcagcgtcgtcagtggcgtcatgggaggcggtcttggtgtgcttatgggactattctttggagctttggaaaatccgataatggcagagcaaatgacagcaaggcagcaaatagtatacacagcaaagcagatgggtagtagaagtataagtaatgccaaaacctttgcagtcatgggtctgattttctcagcagctgaatgtaccatagagaaggttcgggcaaagcatgacactaccaatacagcagtagctggctgtgtcactggaggagctttagctgtaaaaggtggccctaaagctacatgctttggatgtgtggggtttgctgcgttctcagtggcaattgaaaagttctttgatcggcatacttgaaatgggtgttgtgaatttgaacgctttttggccatgttcgtttgatcccaaaaccatagggattgaggtggattgaaagagattgaagaggattttgacttgtaggggatttgatcccctcaatccctatggatcagcacaaaacgaacagagccttagctgagcatgagcagcgttggcaggagaacctgattgtttgcaacatccagtcatctacaactcatgaaggactgtaacctaaattttttttttacttattcccagtttcttgcctggattcgtaattactgaactaccgaaacgcctaagagatctaccctgatcaatatcgatgcacgatgacattgaccag

SEQ ID NO: 25566 - DNA, 522 bp, Zea mays
  Clone ID: LIB3912-042-G4_FLI
ggagttcagagacaggccgctcgccgccgcgcccgccgccgccgccaaccgcacgcaggtgcccgcctgcaacatgaagctgcgctacgcgccgctgctggagctctcggacggcaccaggatccacggcgccacgctcgtggtcatcaagcccgtcggcgacgccggcgggaaggacctcgacgagctcggcgccggcgccttcgacgggcccctgagggaggccgtggccgcgctcggcaagcgccgcgcctacctgctcgagatgaacggcttctagtctgtgcgcctctctgctccatggcaatgggcattgttaattggccaatgggcaacggcaactagctagattgctcctccgctcgcttcacctcagctgtcagtcagctcctgtcctgacgatatccttgtggaaaaaaaacagtagtatagaatggagtgggcagcgccagccggccagcttcacagtgcattctgatgctatcatgaacggaaatgaagcagtcagtcacattttgaatc

SEQ ID NO: 25567 - DNA, 1599 bp, Zea mays
  Clone ID: LIB3912-042-H5_FLI
cgttcttccgtcctgctcaggcgttccgaccagcgttgctcgcttctcgtcactcccgccggctgctgctcttgtctacgccacggtagaatggctttcctcttcaacaagttccaagaggcaatcagaacaattgccaagagccccatgtttgctcgtgatccaaggcatcttcaatttgaagctgatgtgaatcgtttgtttctctatacaagctattatcgtctcggggagaatgctgacgagaaggacgctgaggagattattgacttggctagcaaagcttctattgctgatcagcagaaacaagtgcaggataatgttcattatgaacttacgcatatgtgccaagcaatggatagcattttatgtcctgatacaataaacgacccatcaaaaggaccttcagaagcacataatcattctcagcgtagtggcttaagttttgccgttggtggtgctgcatctgcaaacaagcaaagtgcaattatccctgctacacgacctttaactcgagcagaattgtcaaagaaattcagggatcattttgggtacacacttgacatcggaccatctggaattcctcataaagacgcaggtcaaggtttattcttatcaggacaagcaaatgccggtgctgtcctagccatctatcctggtgttatatattcacctgcttactatcgatatatacctggatacccaagaattgatgtttgcaacaactatctaatcacaagatatgatgggacaataattgatgcaaaaccatggtgttttggtggtgaaacaagagcattatgggatggttcagatttggtggattacaatgctatggcacctaaaggctcagagaacaactctgatcgggtgtggagaatgctaagcaagcctctagaaaaaggtgtaagggaaaattttggtgaagtgcttgaacgacgaaatccccttgcttttggtcattttgcaaatcatccacccaaaggttcaagtcctaatgtcatgatctgcccatacgattttcctttgacagagaaggacatgagagtatacatccctaacattacgtttggtggtcaagagaccattaggatgaagaggtttggctccttctatttcaagtctggaggttctgataatcaggctggtgattctctagtactgaagacgctagtgctggtgagcacaaggtccatatgtgatgaagagctctttcttaattaccgttacagtaactcaaaaagacgaccagagtggtacagccctgtcgatgaagaagaggataagaggagatggagctagtttagcacttctgtatcattctggttgtgcatttttttggctaacttttttagttctttcccccctggaaattgcaactgagcattggtaagctcctgagatcgagatgacagttttgacttaattcgtcatttggtattacatactttggtgtcccaattaccatcatgataaaagttaagctactcatgtaagttctactctcaggtcctttgtggtgcttaaaggattacatttgttactccttttatgtgtgtctatcccaatgattatctatgaaagataaataatttatgc

SEQ ID NO: 25568 - DNA, 1314 bp, Zea mays
  Clone ID: LIB3912-043-A1_FLI
cggcaaaccagcgggccgctcagacccttgcgcagtatgggacgacccggcttaatgtggacctgcttgatggctcggtatcctacccagagtccatgccggatcatgttgagggtagctcggttgtaaagcctctttcttacgaagaggagcaattgacaagggtattttacgagcagaagattcaggaagtatgcgctgcattcaagttccctcacaaaatccaggctacagcaataatatatttcaagagattctatctacaatggtctgtaatggagcatcaaccaaagcatattatgttaacatgtgtatatgcttcttgcaaagtggaagaaaaccatgtttctgctgaggaacttggtaaaggaattcagcaggaccaccagatcattctaaataatgagatgattcttcttaaaactttagattttgatctcattgtttatgctccatatcgatcgattgaaggatttattgatgacctagaggatttctgcagggcaggtaatggtccattccagcgtttgaaggagttgcgccaggctgctatatcccatgttgacaaaatgatgttgactgatgcacctcttctctatacccctgggcagttggcactggcggctcttcacaagtctaatgatcttctcagggtcgtcgattttgaaagatacttggaaattatcttctcaaggcaacattctgattgtccaatcgaacagtttgttcagtcgatcaacgaaatcaattacttagtcgaccagcttaatatacctactgtcaaagacatgagacacgtggaccgcaagctgaaacattgctgggatccaagctcacatgacgagcataacaagaagaaagaaaagaagtcaaagcacaaatcgaaaagaacatctaccgatgcccaactataggaagcatatggtccagcagtggctttgtgtaagagtacaacgggcctccaaatgatcgaaactgaactcaggcatctaagcacagcagctctaagacagctttctacaccagctgaggcatacctgaggtcaagcaattttgtgacgatgtgggctatggaacttcattgctccaatgggagagttgcagcaaagatacaaactaagagatgtaacattggatgcctaactccaaagtacggagaacttcaaattttatatggccgactttgtgtcagccacaattacttgagttccttttgttacggatgtagcattgtttattaagtttaaacgccgaatccaagatgatccacctgctgttgtgaatcgttttttaactgatcagtgattttgaatc

SEQ ID NO: 25569 - DNA, 1405 bp, Zea mays
  Clone ID: LIB3912-043-A9_FLI
gtccctgtccatgaactacaagtttgaggagctggcgcagacccaccccgaggtcttgttcctctacgtggacgtcgacgatgtccagccctcacccaattaagcaattttgatgagcaagacaatgtcccaaacacaatcgtgggagcagcgcacggacatgtacatgagccccttcgtacctatggttgcagtgcagtgacactcatctagtgatacaaaagcccccgtcattacctttgacttgtccgattgtactaagttgggccaataataccaggcccaaaggcctaggaggaagaagataagggtgcccgtttctctcctcgacgacgacattctcaactctgaaacggcgatgtcacggctactcccgcccgtgctctctcctttaccggcgttctcgctgccgccgccgcttcttcctcgcatccacatccgcacgtcggcggtgagaggcggtgcggcggagaacgcgatggcgtccgggacgacggcgagggagcggcgcctggtcaaggtgcgggaggagcgccgccgccgcgagtacgaccgggagcacacctaccccggatgggccaaggtactggagaacgcctgcagggatgatgaagagctccgcgccattcttggtgatagcatcggcaacccggagctcatgaagcaacggatccaggaaagggtgcgcaagaaaggcagggcccaattcaataaatccaagacaggctccattgttgcttttaaagtcagctttcgagactttaacccattgaattctttcatttggtttgagctctttggagaaccaacagatcgagatgttgacctgcttggtggtgtagtccaagcttggtatgtcatgggaaggctaggagcttacaattcttcaaatttgcagctggccaactcaatgatggactacgacccttcatatgattctgaagaagcttccacagtaatgccatcatctttccatgatatcagtgatgttgagttccaagacaattgggccagggtttgggtggaccttggaacctcggattaccttggcttggatgtattactaaactgcttaacacagttgagctcagagcacttgggtatcaaacaagtggtttttggaggcaagaaaatgggtgactgggaagagggcatgacgagctctgattatggatacaagcacttcaagatatgataaatttacaggtgacaagcaacggtggtgatgcaaggctggccgagaaatttgatcaagactgcatgcatctcgatgtgcccttgtatgtaaataaataaattgtcatgggttttattttatcgtcgtgatagcagtgaattttaactaacagctcaaggcaggctagcagaatagaaaaatataatatggatgcatgtcttgtttcag

SEQ ID NO: 25570 - DNA, 669 bp, Zea mays
  Clone ID: LIB3912-043-D1_FLI
acttggcctcgccttcccttgcgtgtttaccgacgccaccggccgcctgtatatcctcacccaactccgtccctctctcccggcccagatagatctttcccccgtcctccctcgccttcgccttcgccggcaggagatttccaccaccaccgccgaaccgccccgaccctcctcccctctcgcgctatggcccagactgttgtgctcaaggttggcatgtcctgtgagggctgtgttggagctgtcaagcgggtcctcggcaagatggaaggcgtcgagtcctacgacgtagacatcatggaacagaaggtcaccgtgaagggcaatgtgacacctgacgccgtcctgcaaactgtttccaagactggcaagaagacttcgttctgggaggctgaggccgtgacaagtgaatccgccacacctgccggtgccaccgcctgacaggttcgatgatctggaagtgcccggcaaggcggcaaagaaaaaaaatgtgaatgtatttagcttggatctgttacaaataattgcaaactgctagctcggtctgtacattttacagttgctattcgtgtactgtgatgttctcgtaagtttggggagatgataaaccaatatttgtatgatatatgtgtcgtgttccataaggtaaggttttgacggtgtgctatc

SEQ ID NO: 25571 - DNA, 1037 bp, Zea mays
  Clone ID: LIB3912-043-D12_FLI
ggggagcaagcagcgcgcgagagagacaggttgagatggcgatgccgtatgcctctctttccccggcaggcgccgccgaccaccgctcctccacagccacggcgtccctcgtccccttctgccgctccactccgctctccgcgggcggcgggctgggcgaggaggacgcccaggcgagcgcgaggtggccggccgcgaggccggtggtgccgttcacgccggcgcagtaccaggagctggagcagcaggcgctcatatacaagtacctggtggcgggcgtgcccgttccgccggatctcgtggttccaatccgccgcggcctcgactccctcgcaacccgcttctacggccaacccacacgtacaacgcttacggaataagatctctggcggacgagcacaaccagctgatcgcagaagccatcgactcgtcgatagagagccagtggcgcctccccagctcgtcgttcccgctctcgagctacccacatctcggggcgctgggcgacctgggcggccagaacagcacggtgagctcgctgccgaagatggagaagcagcagccgccctcgtccttcctagggaacgacaccggggccggcatggccatgggctccgcctccgcgaagcaggagggccagacgctgcggcacttcttcgacgagtggcccaaggcgcgggactcctggccgggcctctccgacgagaccgccagcctcgcctcgttccccccggcgacccagctgtcgatgtccatacccatggcgtcctccgacttctccgtggccagctcccagtcgcccaacgatgactaatggtgcgtggatcgtcgcgttctggccctttgtctgtcttccctccagtcctccacccaccgcgcagtagtagctgcggaaacagcccatgctcctgtatatttgtcggtcattttccgtgtcagatctgtgtaccaaaccaagcggcggcggccgtcgtctctccccgcctccgcctcgcctcatgtgggtgggtgaacatgagaccgttttgcttaggctc

SEQ ID NO: 25572 - DNA, 1184 bp, Zea mays
  Clone ID: LIB3912-043-H5_FLI
gatttagttaaaatttcaccatgtatgcatccctataaaaaatattatgcacattcaattttgttctagctttgcaactgagtaccgagtactagcataggaattttgttctagaatatgtatcggtagtatactctgctagtactcactaggtgtctcccgagaaatgagaaatgtgtttcttgttttgacacttggcactattggtcgagagtcaagactatgagctgaactgctgaaatgtctaatgttagcagtttctgcactggttcaattgcagcctgatttagaaatgctggggacagctggctgtgccatgcaaaataaaatgtgttagtaggtactttgaagggaaactcaaactttgtatttccagttaaccatgatttaacttgtggtcataggcgaacgcgagatcgggtgtcgctgtgaacgatgagtgcatgctgaagtttggcgagctgcagtcgaagaggctgcaccgcttcataactttcaagatggacgacaagttcaaggagatagttgtggaccaggtcggggatcgcgctaccagctacgatgacttcacaaacagcctccctgagaatgactgccgatacgcgatctatgatttcgactttgttactgcagaggatgtccagaagagcaggatcttctatatcctatggtattgcttgtgccctctcgtttgcatcccttgtcgctcacgctgcttcacagctgctcgctaacgagatcttttacctcttgaattgcaaggtccccatcctccgccaaggtgaagagcaagatgctttatgcaagctcaaaccagaaattcaagagtggcctcaatggcattcaggttgaactccaggccacagatgcgagtgaaatcagcctcgatgagatcaaggatcgggcacgctaggcgcaccgccatcgcgagtttcatggtcacgcatcatggactcgcctactactgtggatttgtacgccattatagacttggtgctgcgaaagactgctttggtgatttgtgggtttgttgctgtgtaaaaagatcctcatggcttccagaagaccatgaaggtttggatctatcatgtaattccttgttatctgccaattatgtatggactatggacatgtgttgcgctgttcaactcactacaaataagtaatcgatatattccctaccc

SEQ ID NO: 25573 - DNA, 876 bp, Zea mays
  Clone ID: LIB3912-044-F6_FLI
gtcgccgccgtcgctctgcccgcattcccttccacaacaccgagacgccaggatgacggcgcagactgcggaggagctcgccacccagatcgagcagcagaagctcgaggagcagaagaccgaggcagaggaggttgtggtggaggatgaggaggacgacgacgatgaggacgatgaggatgatgatgaacttgacggacaagaaggggatgccagcggcaagtcaaagcaaagcaggagtgagaagaagagccgcaaagccatgctgaagcttggcatgaagcccatcactggtgtcagccgtgtcactgtgaagaaaagcaagaatatactgtttgtcatctcgaagccagatgtgttcaagagcccgaactcagacacatacgtcatattcggcgaggccaagatcgaggacctcagctcccagctgcagacccaggccgcagaacagttcaaggcccctgacttgagccagatcacgagtccagagacttctggcccgggccaggaagacaatgacgaggaggtcgacgaaactggtgttgaggccaaggacatcgagctggtgatgacccaggcatctgtttcgaggcccaaggctgtcagggccctcaaggcttctaatggggacattgtcactgccattatggatctgacaacttagaaccattttttctctctccctttggagtgccatgctatgcagcttgagtgttatctgtggaccatatggttagagatgttagcatgatggcttcttctgtcaaggtcattcaaacacggtttcatctttgctggcttgctatatggcaatagcttatagccgctgtgtttctgtggttctggtgtttcagtaatgtcattcaatggctctgc

SEQ ID NO: 25574 - DNA, 1257 bp, Zea mays
  Clone ID: LIB3912-044-G1_FLI
gcgtagtccgtcgcctaccggctatcatcagcacgcaccgccgccgcctctcatctcatcgccgcgctgcttccccgcccgcccccggattggcgctgccgcacccagatcttccccacccaaatcgactccgccatcgtccggatccacgcagagccgtcgcggatcgacgtgctgccgccacagattgcgcgctgtcgtacggatcgagagacacccaccgcaagccttccgcgctggcgccgttcgggaagtaaggaggctacggagagggcacaagctggggggtgtcgaactccgtggagaacgcgcgggcggtggatgcctagctctggtagtctggtgggagggtgaggaaaatctagattctgagaagtatgaagagctgattgagttcatggagaaggtggctaagacagttgattctgaggagcactacgttctgtcaattgcttacaagattgtcatggaacccaatgtgcttcatggtgcatcatatcctccattgagtagggggaagaaggccgtgtcaacgtggactgtgtcactctcattgaggactaccataacaagattgaagttgaactcagcaagatctgtgatggaatcctcaagctccttgattcccaccgtttccgcctcattaacagctgcagagtccaaggtcttctacctcaagatgaagggtgattactacgggtaccttgcggagtttgaaactggatctaggagaaaagatgcagctagaataccatggatattgctctggaggaattggcccccacccatcctattaggctttggctggtgctgaacttctcaactcgcctgaccatgcgtccatgcttgcagtctcgccaaataggaccgtgagatgatgatcgagccagggatgtggtgccaaccacaagatgccgtggtggacgaccggaaaaatgatggacttacccagtggatgctcgccaagcgagtacctcccccagcaaacactatttaagtgttaaaataaaggtactccttaggatgattggttgctggtgtgacttggcctccatccctgccaccgggatagacggtcgagtgggttattgcttccgcaggagaggaccaggaggagtggcgtggccaggcttcaccatgttgctcggttcttctccgttagttatttccgctgcattaaaaattttggttattatttctaaaactccgataatgtaatcactaatgatacttattaaatttatggtattgtgtttt

SEQ ID NO: 25575 - DNA, 1401 bp, Zea mays
  Clone ID: LIB3912-044-H8_FLI
cgactcgcgcaagccgcgagcacgacactagtgacacatgagctggggacgggagcgagagattatacctaccttgtaagctccagcctattgctcgacaggcttcccagttaagagatacctttctcctgcgattaccgaaccactcgcttcttgtctaatgcccgtcgctgtcaccaattcagcataatgccagtgctgccgttgctgtccgcaaagccatcccctccctgcacgccccctcggcccggtggtgagtggtaggcggccgaagaattccagggtgggtggggagcgcccggaccggagacaaggaagatcgaggcatgaaggacctggtgtcgtgcttcagcgagcacgccgtgcggatctccgacgtggcctgctccggctccggtcccgccaatgcggcggcgggcgccccggaggccggaggaggagggcgggcgccagcggtgagcgcggtgaccaccgcgtaccggtcgcggctgtcggcgtccgggaaggagctgctcatcgacgtgacttggtcatggtctcgggcgcccgacgggcccgcgctctccgtcgccgtccacgaggcggacgccgtctcgcgccaccgcgccgccagcggcgccgcggcgccgcggcacctgcacaagaagaaggggagcgggacgttcacggcgggcagctgcgtggtgggcgtgttctgggactacgccgcggcgcggtacggcgctggctcggggcccgagccgacgtccgggttctacgtcgcgctgctggacggcgacgcggaggcgtgggtcaccgtggacggccgcaaggtcgtgcagctccggcggctgcggtggaacttccgcggctgccacaccatcttcctcgacggcggagcgccagtcgacgtgacgtgggacctgcacggctggctcttccacgcgggcgccgagtcgccccaaccgtcctccacttccccctgtgccgtgttcacgttccaggcgcgcggcgcgtcggagacaaagctgtggacggacgacgattgcttcgacgacggagaggaggcggacaagctgccggtgacgccgagcggtcggcaacagaaggcgggaggcggtggggcgtcggggtcggggcaggggttctgcctgctgatccaaggctccaggagcttttccatgagcacttaacctgtacatgccgttagagactttctatcgccattttttttcacttcttgcttggggtttgtgttgggattgattaggaatttaggatagacattcagctggttgactcttgttgattaatctgatgcatgacaaggggtgttgtgattgtgaatagttgggatagtgtcagagagagagagagagaggttgacacacagaattagaaagtgatgttgtctttccagtt

SEQ ID NO: 25576 - DNA, 715 bp, Zea mays
  Clone ID: LIB3912-045-B5_FLI
gcgccgcgcggagcggtttgggatgccagtactgatgtcagaggaggaaaagcgcagcagtcgcgccgagagatttgggactggctcttcaagtgtaaaggaggaagagaagaagaagtccagggctgagaggtttggccttgcctcgccctcttcttcagatgaggaagctaagaaaaaggcccgtttggaacgatttggtcagagcgcaaatgtcgacaaggcggaagaagaaaaaagaaaggcccgagctgcccgatttgcagaagcgtctggtggatcagcagctcgggaaaacggcaaagacagctcgaagccggacgcagccgctgttaccggcacagcttgatttgagcactctgccttggacgaggtctcagaaatattatctcctaggagactttggtgaagccatagcttttgtacaccactaaccgcatggacgggggcgtcctgtgtttcccagtcatgttcagtgatgtttaccgcgtatgactttattagttgctgggcacactggcagtgtagctagatttgctgtctggtttgtggatggtcatgtaccttcggttgccctctatttggtgacgatgatttcgtttccatgtacccccagttggactactttataactgttagaagacacaaggtcgccctcgtgtttgtaccccgtgtttttgttgctagaatgctacgcgacagggtgtttaaaccc

SEQ ID NO: 25577 - DNA, 808 bp, Zea mays
  Clone ID: LIB3912-046-A6_FLI
ctcctccctcccattcccattcccatcgccgcttccaagtcccaaccgttcccttctccgccctcgccgccggccaacatgatgcacatgaccttctactggggcaagtcggccacgatcctgttcgacggctggcgcacctccacgtggcccgactaccttctctccctcgcggccctgctcctcgccgccgctttctaccagtacctcgaggccctgcgggtccgcgtgaagctcgtcgcaggaggaggcgccaagccagccccctcctccatcatcccgccaccggccggctccgacccgcggacgccgcttctcgcgcccgccttcgcggccggcgccgggcgctggccggcgcgcctggccgtggccgcgatgttcggggtcaactccggcctcggctacctgctcatgctcgccgtcatgtcgttcaacggcggcgtgtttgtcgccgtcgtcgtgggcctcgcgctcgggtacctcgcgttccgcagcagcgacggggaggatctcgtcgtcgttgacaacccatgcgcctgcgcctaaagaaacggaaggacgaaccgagtgaagcatagccatacctgttggaagaattctagcttagatctgatcactggaaagagaaggcctgtcctctattgcgtcttttatgagttgtactctgtagctacctgtccctatgactgtgagtacaagtacagaaactacgttaccttttgttgtaaaagtgtatatccagttcttttaagattaaatatgaaccagacttgtctacaaatcgcagtaaaaaaattcaggttatatc

SEQ ID NO: 25578 - DNA, 1268 bp, Zea mays
  Clone ID: LIB3912-046-A8_FLI
ccaaaacgaccgcgcgcggcgccctcctcccgcggtgccaccaccaccaccacctcgtcggaccatcaccacgccgatcggcagctaagcagctcccgcccccagcaccgcgagctgcgatggcaatggacgcggccgtggccgtgaagagcggcggtggcggcgccggatcgaccggggtcaccgcggcggcctcgcagtccccgcaggcggcgactaacggcggcgagcggcggtcccggttccagcgcatctgcgtgtactgcggcagcgccaagggccggaagcctagctaccaggacgccgccgtcgagctgggcaaggagctggtggagaggggcatagacctggtctacgggggcggttccatcggcctcatggggctggtctcgcatgcagttcatgacggagggcgccatgtgattggggtcatcccgagatccttgatgcccagagaggtcactggcgagcctgttggggaagtaagggccgtctccggcatgcacgagaggaaggccgagatggcccgcttcgccgatgccttcatagcgttacctggtggctatggaactctggaagagctgctggaggtcatcacctgggcgcaactagggatccataagaagccggtcgggcttctgaacgtggacgggttctacgacccgctgctgtccttcatcgacatggccgtcaacgaagggttcatcaaggaggacgcccgccgcatcgtcatctcggctcccacggccaaggagctggtcctcaagcttgaggagtacgttccggagtacgaggtaggcctggtgtgggaggaccagatgccaccgtccgccgccgccgcgcacgggttcgccccggagcttgtggagcccgggatcacctcctcgtcctgatctggactggacggggacgtcggccgggcctgcctacctacgctaaccccagattctgaccgacggccagcccggcaccaagtagaaaggctatccatactagtaccacctaattaataccgtaatctactactactactactaacaaagaagattgttgggatcgaggatgacagctagctagcgtctgctcagtcagcagcatatcgtcgttagccgcgcagtgtgcagctgcgtcagctctgccattgctactgctccttttgggcttttgtgttgtgctctcctagaagtagggaggaaggaaggaaggcatgctatgtatattccccgggtatatggttgtggtatggcgattggatttgtcttgctcgc

SEQ ID NO: 25579 - DNA, 1194 bp, Zea mays
  Clone ID: LIB3912-046-D9_FLI
cccccgactcccgcggcgcaagcgcagcccacccaagcgccatggcccccgccgcccccgacgccgacgcctatgatatcccgtgggtggagaagtaccgcccctcccgcgtcgctgacgtcgtcggaaactccgatgccgtcgcccgcctggaggtcattgcccgcgacggcaacatgcccaacctcatcctctccgggcctccggggaccgggaagacgacgagcatcctggcgctggcgcatgagctcctcgggcccagctatcgtgatgccgtgctggagctcaatgcctcagatgacaggggtttggatgttgtgcggaacaagatcaagatgtttgcacagaagaaggtcaccctacagccagggcggcacaaaatcgtgatcttggatgaggctgacagcatgacatcaggagcacagcaagctctgcgaagaacaatggagatctattcaaacaccactagatttgcacttgcatgcaacacatcatcaaagataattgaacccattcaaagccgatgtgctatcgtcaggttctcaaggctctctgatcaggagatcctcggtcgcctcatgattgttgtggcagctgagaaggtgccttatgcgccagaggggctggaagctatcatatttactgctgatggtgacatgagacaagctttgaacaacttgcaagctacatttagtgggttccgctttattaatcaagaaaacgtgttcaaggtgtgcgatcaaccacatcccttacatgtcaagaacatggtgaaaaacgtgctcgatggaaagtttgatgaggcatgctctgcactgaagcaactttatgatctgggatactctcctactgacattatcactactctcttccgtgttgtcaagaattatgacatggctgaatatctgaagctggaaatgctgaaggaaacaggatttgcacacatgagaatctgtgatggtgttggatcatttcttcagctttctggtctacttgccaagtttgcgcttgtgagggaaactgcaaaagcaccatgaactcgttgtattccagatgataatagcttgtgtcatgctgtgctatcatggtaacctagttcagttaatagcgctgtcatgcgtggcttaatgtctacagacgtgatgtatctctgtaagatagtgctttctgaagaaacaactatcatgtttaccc

SEQ ID NO: 25580 - DNA, 719 bp, Zea mays
  Clone ID: LIB3912-046-F1_FLI
ggatggctcccatcccacgcctcgccgtgtccaggctttaagcacacgcacttgagctccaccgccactaccaccagtaccacaccactccgcgctagctgaggacggtacagcggcacagaggtgcgacgtacgacgacgacgacgcaggcgccacacatggcatcccagctctccgccgccgtgccccggttccacggcctccggggctacgccgcgcccaggtccgcggtggcagcgctgccgtccgtgagggtgggcaggaagaggtcgtcgtcgcagggcatccgctgcgactacatcggctccgccaccaacctgatcatggtgacgacgacgacgctgatgctgttcgcggggcggttcgggctggcgccgtccgcgaaccgcaaggcgacggcggggctgaagctggaggcgcgcgactccggcctgcagacgggtgaccccgccgggttcaccctcgccgacacgctggcctgcggcgccgtcggccacatcctcggcgtcggcatcgtgctcgggctcaagaacaccggcgccctcgaccagatcatcggctagatccctacgtcgccgttgttaagatcagactcagcagcctcgatcgcgccgccggccggcaggtgcaggtggtgactttgtaacgtgtgtgcgtgcgtacgtgtacattgcatccatcttggttccaatggacatatagctcctgttgctcctct

SEQ ID NO: 25581 - DNA, 830 bp, Zea mays
  Clone ID: LIB3912-046-G5_FLI
ctagggtttcaccagctcttaaggccgccgccgcctcggtgcctcctcgcttcgaagtgttcgtgcgaaggcgaccctccctccttcgctccttccgcgccgcctcccggccgtcgccgccatggtgaagtactcgcaggagccgggcaaccctaccaagtcggctaaggccatgggcagggatctgagggtccacttcaagaacacaagggagacagcctttgcgcttcgcaagttgtctttgaccaaggctaagcgataccttgaggatgttattgctcacaagcaggcaattcccttccggagatactgtgggggtgttggtcgcaccgcgcaagctaagtcgcgccactccaatgggcagggccgctggcccgttaaatcagccaggttcatcctggatttgctgaagaatgctgagagtaacgctgatgtgaaaggcttggatgtggacaacctctatgtttcacacatccaggtgaatcaagcccagaagcagaggcgccgcacctaccgtgctcacgggcgcatcaatccctacatgtcctcaccttgccacattgagctgatcttgtcagagaaggaagagcctgtgaagaaagaggctgacaacattgtcgcagcaaggaagcagtgaagtatatcagcatgctgatcgaggccattttgtcgaagtattatagccgtagctcttttatgtaccttttcaggcagccttgcctctcgagacgtttccggcaccgatgttttaaatctggattatctatgttctgtactgaactactgtgttggactgtaagttcagctcgtaatacaatagctcttaagat

SEQ ID NO: 25582 - DNA, 757 bp, Zea mays
  Clone ID: LIB3912-046-G9_FLI
tagaagcgaggccaggtgtcgcgccaccgaagctcggcgccgccacgtcttctctctgcgggcagcttgctttgatccttcccctgggttccagttccagcgtctgcttgcttgctaccacgcctcctcatctgctgccaccggcgtctctccttcccagctggggccctgagctgagagcagagcagggagcgaaactttgcgctgagattgagctgctcctacttggaaggcggcggcgtcggcaatggggtcggagacgttcgtggagatcctgctggccatcctgctgccgccggtcggcgtcttcctccgctacggcatcggggttgagttctggatctgcctgctgctcaccatcctgggatacatcccgggcatcatctacgccgtctacgtcctcgtcgcgtgaaagcacaacatggtgtggtaggtatgacgacgatggtgaccgtccgcccgcccgccgggagctggaatatatgagacccagacccagtgcttctgatccatccattccatgcatgcagtgatgcaggcatacgtacgtttagcccatgctgtatgtttgtgtcttgctttagttagctttagctagctgcttgcagcttagcttctctcagctcgtctaccggtccgttttgctgtgcccatggacatggatgggaagaaggaaccgtagcttgtatgcaagtgtgtactagagtccagagtttctactctgctactgattctgaatccagacatgttttctgag

SEQ ID NO: 25583 - DNA, 743 bp, Zea mays
  Clone ID: LIB3912-046-H10_FLI
atcaagggtgtcaaaacgacttactgaagaggctgaacaatactttgaagatttcctgtcgaatgttgaagatactgacttttcttcttttgatggagagagaagtgactcaagttcaaccaggaaagacctgttgttacttcatgctatgacagaaactccagttaagctcccagaagttgctttacctgcagaggcagatggcgttgtccttccctggctgcaatgggaaactaccaatgaccttcagacctccccgtgcaaaaccaaggcccagggagaaagtaccagaggcagcactagcaatcagactgcgagcagccgtgggagttggagccctggagaccatgccacttcatcagttgcctccaaagatagtttactgaccagatttggtgaggttgggatttgccgaagcagcttgtctgattatgctcgaaccttgtcgtttcacatcgacgactatttgcatttaaggcagagtgaggatctcctcttggagacgtggatgcagaaacaaaggatcgactctggcggcctagtcctgtgcagtaaatcgacgatattgtagagtgcagccaaataggtagttgatggggttgagctagactaataattgcttggatttttacctttagctgccatggctcctgccgcctagtgtgtatagatgcatgcattatagttaacagattggataagcttttttaacgcttcatcgtgattaagaaaatttgtttttt

SEQ ID NO: 25584 - DNA, 718 bp, Zea mays
  Clone ID: LIB3912-047-A12_FLI
ggcggttaaggaggttcagcaatcactatcgaaggccgcgaaagcagcgaggctggagagattcgaggtgccggcgaagatcgagctgctgcctgagccgtggacgccggagtccgggctggtgacggcggcgcttaagctgaagagggagcagataaaggccaaattcaaagacgatctggacaagctctaccactgaagaaaagcggggcttgcacccacgcgttcaggagcttgcgctgccaaaacgctgcctggatgcggaatggaacctactgacctgcacgagaccacgagtggtgtgtgtgtgtgtgtggatgtgtgtcggcgtcggtacagcaggagctgcttcttgtgtgatgaaaaataagccaaagtgttggttggaacgatcttgatttgtatagcttcacttaacttgcatgaaccctagctcgaaatcagttgaatctggatggaccggtcgataagagttgccgctatcggttttgatgcctcacgatggttgaagccgggcagccggcaattgtcggggcgttctctgagatggccatagtcgtcgcaatttgacctgtggatttagatatttgttggatatctaatccaatagataccagagccgggtatggatacatgtttttaccacagttttgatgtttttaccacagttttgatctgtggtcagactttaataaaatggctccctgtgctctgattg

SEQ ID NO: 25585 - DNA, 1003 bp, Zea mays
  Clone ID: LIB3912-047-H5_FLI
ggttttagctgcagcggcatcagggcagggagagagcgatagttctgttctactgcaggaagagcagggagcaagatggggtccggatctttcctcaaggtgctggccaataacttcgatgtccttgccgggccactcatatcacttgcttatcctctatatgcttctgttagagctatagagacaaaaaatcctgtagatgatcagcagtggctcacttactgggtgttgtactcatttatcactttgtttgagctaacttttgctccaattatcgagtggcttccattttggtcgtatgcaaagctgttctttaactgctggttggtcttgccttggttcaatggtgctgcctatgtttacgaccattttgtgcggccaatgtttgtgaaccgccaaatagtgaacatatggtatattccaagaaatgagaagctaggtaaatctgatgatgttctgtcagctgcagagagatatattgaacaaaacggaccagaagcatttgagaagctcatcagcaagtctacgaagtcttcgaagtcaaggaacacaaagcggttgaacttggaggatggagaggctgaaaatcgagctaaagccgagagagaatcgtggggcgaaaatcccttctacgacaaaaactacagatactaaaccagttcaaaatccactcagcagtttgaagatgaccttgctcacgagcctcatgcaagctttagttgcgtcggaccgaagacgacattcccatatttctgactctgaatattgtaccttgttacatccactgctactacataatgatgagttctagagcaattgtggactgtgtaaatggaggtagatgctagcgttaatcgtttatgtgctttttggatggtgtccttatcacccgttttactacatctttagcaaggagcgagccttgattttcagtttggctttcgtatttttgtaattgaatgctacttttagataactgaaatatgagggagttcgagcttct

SEQ ID NO: 25586 - DNA, 883 bp, Zea mays
  Clone ID: LIB3912-048-B5_FLI
cctcgcgcaggacatatattcagtgatggaacacaaggaggccggctgccagcagccggagggcccaatcctatgcatcaataactgtggtttctttggaagcgctgccaccatgaacatgtgctccaagtgccacaaggagatgataatgaagcaggagcaggcccagttggctgcctcctccatcgatagcattgtcaatggcggtgataatgggaaaggacctgcaattgctgcaactgtaggtgtggcagttcctcaagtcgaggagaagactatcgccgtgcagcctatgcatgtcgctgaaaccagcgaggctgctgctgttatcgcgaaggccaaggaaggcccaaaccggtgcgcaacctgtaggaagcgtgttgggttgacgggttttaactgccgatgcgggaacacgtactgttcgatgcaccgctactccgacaaacacgactgccagttcgactatcgaactgcagctagggacgctatcgccaaggccaatccagtggtgaaggcggagaagcttgacaagatctgaggcgggggcattgggtaacgaaaaatggttgcgatctgcaagaattcagcatgtctctttgctgctttatcattgaacttcccattcttgtcttgctgtcacgtcccctggggttcaatactatgatgcgcacagcatcctggcagctgcaagaattcatccccagtcgagtcacgaaaatggtttgcgtgttgactatgtcgtgtaagcttattcagttattcttggtggtttgggtcggtatcgtgtcattccccgtttaggtagctctgtaatctactattctcaatttctcatgtgtgttgccttccaatcagtaatagtaatcagcaattgtctgcc

SEQ ID NO: 25587 - DNA, 924 bp, Zea mays
  Clone ID: LIB3912-048-C2_FLI
caaaaacatttgcatttgtgtacgaaccatcctcgaatccaacgtcctctcctctccgtacttcctccgcagctacccccatcacattcccaaaccctccgtcgacccctcctcctcgatctacaccggcgatcggcggcgagcgatggggtgggcgacgcggttcctggcggcggtgtgcttctttgctgcgggtgtcctcttcgtccccgaggctctccttggttccccctccggcgcaggcgccgtcaccgccgccaagctggcccacgtcctctcctttgccacttcctggggcgccgccctctgggccacctttatcggcggcatcatcatgttcaagaacctgccgaggcacatgttcggcaacttgcagagcaagatgttcccggcctacttcacgcttatctctgcctgcgcagccatctcggtcgccgccttctcgcacctccacccgtggaagacggcgtccaccgtggagcgctaccagcttggattcctcctatcagcgctcggttgcaatctctccaacctgctagtcttcacccccatgacaattgagatgatgaagaagaggcacaagattgagcgggacctgagtatcggtgaggaagtgggatggtcaaagaatcagcaggtggctaaatccaaccccacccttgctgcaatgaacaagaagtttgggatgatccacgggctgtcatcactggccaacatcatgtcgtttggtagcttggccatgcactcctggtacctggccagcaagctggagctgtgaagaggagccaagacgtcttccatctccgcgttcttgtgaattttatcactatggtggtaatggtgcacgtcaggttgtcagatcgctagactaaactgtacgattgcgctattggcttcacaagataataaattgtactcctagtt

SEQ ID NO: 25588 - DNA, 871 bp, Zea mays; identical to SEQ ID NO: 25474
  Clone ID: LIB3912-048-D6_FLI

SEQ ID NO: 25589 - DNA, 762 bp, Zea mays
  Clone ID: LIB3912-048-H2_FLI
ctccatccatcctctttcccctcctcgcttcgcttcctcggcggattcctcctccctcgaccgtccccgtccccgtccccttccggcgcgcgagctcgcccgagatggcaaacgcgagatcgggtgtcgctgtgaatgacgagtgcatgctcaagttcggcgagctgcagtcgaagaggctgcaccgcttcctaactttcaagatggacgacaagttcaaggagatcgttgtggaccaggtcggggatcgcgctaccagctacgaggacttcacaaacagcctccccgagaatgactgccgatacgcgatctatgatttcgactttgtcactgcagaagatgtccagaagagcaggatcttctatatcctatggtccccatcctccgccaaggtgaagagcaagatgctttatgcaagctcaaaccaaaaattcaagagtgggctcaatggcattcaggtggaactgcaggctactgatgcaagtgaaatcagccttgatgagatcaaggatcgggctcgctaggcatcatgatcatgcatcatggactcggcctactactgtggatttgtatgccattatagacttggtgctgtgaaagactgcttgatgatttgcgggtttgttgctgtgtaaaaaaaggtcccatggctcccagaagaccatgaaggttcggatctatcatgtaattccttgttatctgccaattatgtatggactatggacatgtgttgcgctgttcaacttactactacaaataagt

SEQ ID NO: 25590 - DNA, 1092 bp, Zea mays
  Clone ID: LIB3912-049-F3_FLI
gagacgagacgagacggggggaaaaacactgcgcaggcacaggcagggagagacgtaaagccgccgcttcgtgcgcgtcgacgtcacctcgccgccggggcccgtctcgccgcggggtcccttagagctcccttccgtcgccggactgggcggtcgccggacggatcgggaagcgacgacctgaggggactggctgggatggccgggaagaagcgcaaggcggaggcggcacgcctggaggagacggaccgggcgctctacggggccttccggggcgccgccaactcgctctcgcagctctacacgctcggcatgggcgcgcagaaggcctccttccacgccggcgaacgtcacgccatggaaaaactttatgaatggatcctgaggcagcacgaaaatggtttgaggctaacagttgctgatgtagcctcccatatccagcatgagattcagtatggaggtgacaatgcatcagcctctccaaggtcacaataccctagccaaagcactgcaccgacaatgcacattcccaacacaagcaaccagcaaccatcgccaagcttatttgcttcaggaaaccctgggttgacacagtccaagaattccatggtcttttcaagcgcattatccagccccatccggcggagcctgcaaccttaccacctagagcaggacggggatgcagggtacttcgcgaacggtgcaagccgcgatgtgaaccccacggcttcgaatgattcgtccatggacatgcactcggacagcccagctcatgactcctactgagcagctcccaccatggaaccagcctcaagaacagcacttcaagtggaagaagtctgctgtcacagccttcccaggcctagtagtaatattcaatttaacaccttccatagcctctcttacactaagcgtgtgatgtcttgtgttgttactactacttaccacttgttgctttgcgagaattatgtaatttgcatgtactatactatactgtaccatttgatttatctgtgcatattactgctgttggtacgtgacaagtgcaggaaacaaaccactgaaaagaattaacagcttggacagtttgtg

SEQ ID NO: 25591 - DNA, 1050 bp, Zea mays
  Clone ID: LIB3912-049-F6_FLI
ttccactcccaaggaaaaaagagagagaaaaaaaggtagtaggcggcaatccaacggcgggggcctccgcccgcctccggcatggaaaaatcgccgcgggggccggcgaggggggcagcttcgtcatttccggcgccctcctcctttcctttatctctctccccacgcccccacgtttcgccccccatttcgaagcccaccgaattccctgcgattcctctcccctcgcctcctcgtctccccctaggggatcgtcggagaggaatcgcaaagagggccgtctcatccgagttaaggaagccatggagcacaaggaggctgggtgccaggcccccgagggacccatcctctgcatcaataactgtggcttcttcggcagcgcggcgaccatgaacatgtgctccaagtgccacaaggagatgataacgaagcaggatcaggccaagctggctgcctcctctatcgacagcatcgtgaacggcagcgacgccgtcatggagccggttgttgctggcagcaacacggtagtagctgttgcccaagttgagttgcaaacaatgaacgtgcagcagcccgctgatgttgccggacccagcgagggggtggcggcgatctccaaaggggggaaggtagggccgaaccggtgcagcgcctgcaggaagagggttggacttacgggattcaactgccggtgtgggaacttgtactgcgcactccaccgctactccgacaagcacgactgcaagttcgactaccggactgctgccagggacgccattgccaaggctaatccggtggtgaaggcagacaagctcgacaagatctagggggggttccctacggttgggtatcaggaagattgtaaaccgcggtaactcgtcatgcggaactgctgccttgccccccgcgcctttctcttccatgtttgctgctacaatcttgttgttgggcattgcagtgcacggtgcacacttgtgtagcccgcctcgagaattcctgcctctgcatctggtcagttctaaaatgatttgcatgttggctatgttgtgt

SEQ ID NO: 25592 - DNA, 935 bp, Zea mays
  Clone ID: LIB3912-049-F8_FLI
ctcccgtctctctcgtctctctctctctccctggatcccgcccgccactggccgcccccactcgcccgccaccgccaccccggccccgaccccatccaccacggctgcccccgcccccggccgccactcccgccggcgcggccgcccaagcccacacccgccatgggagtcgggagctcagatcgggagggacggggtaggtagggttcacgagcgagcgagggtgctgccgtcgggcgccggtgtccaagtagcaagaggagagatggacgcgttcctacagagactcaagcggttggacgcgtaccccaaggtgaacgaggacttctacaagtggacgctctttggcggcatcgtcacgctcgtcgccgccgtcgtcatgttgcttctcttcatctccgagaccaggtcatatttttattcagcaacagagactaagttagttgtggacacatcaagaagagaaaggctacgagtaaatgttagtactttttaaacgaaataaactgtctgtaggctattggctgatcttggtgtttcttggggaaaagagtacgagcactctcaataatgtaactcagcaaatgtcatttgtacatatatattagacacctccagctaccttgccaacgcaagaacgagaagacgagttagactttgtcaaaaccctcttcactagtggaggtatcgaccatcactcgtcactgtaacccgatggtgatcggcaaccatgagcttccatgttattgtgttctgatacttgagacgtttattatgattatgtatgagatattgtctcttattagtactggatgatgagatgtgtcttattatgactacggatgagacttttgtgatgtaattgatgagactatggatttaaaaattgttatgtgattgtgtgtgagatattttatgtgaaaatatgttgttct

SEQ ID NO: 25593 - DNA, 645 bp, Zea mays
  Clone ID: LIB3912-050-F5_FLI
gagagcatcgccggagttggggtcggcgcgccgacgaggaacaaaagaagacggcggtggggcggagatggggagtcctctgggcgggtggccgtcttacaacccgcacaacttcagccagctcgtcccggccgacccatccgcacagccctcgaatgtcacaccagccacttatgttgcgacccacaggactgatccgccacccaatcaagtgataacaacggagtcgaggaacatcctgctgaggcacttctaccagaaatccgagaagctgaggcccaagagacctgccccggacaacctcgctccggagaacaacaacagcaacaacaagcagcccaggggaccggtcggcgacgtcggtgggcagtcgtcgagcgcgagaagctgaagccacagctggtggccgtccactcctccccctgcctgcttgtttctcatctctgggtttcgtcatgcagaggcagaggcagatgcagccctgtgttgtcctcttcgctcctcacgtctgtacgtacgacccaaagagctactaacctaatctgaagttagggttacatacatggatatcggatagatgggtgtacataagcacctgagagcagtgttgtgttatcctaaatgctaaacggtaaacagtcgttc

SEQ ID NO: 25594 - DNA, 1106 bp, Zea mays
  Clone ID: LIB3912-052-F4_FLI
ctcgcaacttgcagtaggtgacaggtgttaacaggagctggctgagcttctcttgcttctgcaagtagtagctgtagccgccctgtaggcagagagaggagagacgacgtacgtgagggagcgagcgagcgacgacagcatcaggcaggcgttgacggccatggcttcctccggcagcggtggcggctcgccggggtccccgtgtggcgcctgcaagttcctgcggcgcaagtgcgcggcggagtgcgtgttcgctccccacttctgcgccgaggacggggcggcgcagttcgcggccatccacaaggtgttcggcgccagcaacgcggccaagctgctgcagcaggtggcccccgccgaccggagcgaggcggcggccaccgtcacctacgaggcgcaggccaggctgcgcgaccccatctacggctgcgtcgcccacatcttcgcgctgcagcaacaggtggcgagcttgcagatgcaggtgctgcaggcgaaggcgcaggtggcgcagacgatggcggcggccgggccgcaggggggcagcagccctctcctgcagcggtggccgctggagcctgagtcgctgtcgacgcagagctccgggtgctacagcgacatgtactgcggcttcggcgaccaggaggaaggcagctacacgagatgaataatgaatggatcattcgcgcgcgcgcgcgcacgcatcgacacagatactttcttctattagcgccaagagacaacaacaaccgagggcctcaactttcttgttggtttgcagtgcgttttgttcagttcagcagctagctctccggtttggggaggagcttaatttcgatgagatttcgtgcgatccataaacttgtatttcttgccggttcgagctgtaaaatggaagtgcagctcatcatcatgtgtgtggttattaaacggaggcacaaatcgaggataatttcatattccctaaaccctaaatggatttcattgattagttggggcgatagtgccgggtgttaattagctatcaaaatttttttgatgcatatacatgtgggggagaaagaacaggcggtacgtacggaaatcaaataaggtagaattggaagctt

SEQ ID NO: 25595 - DNA, 825 bp, Zea mays
  Clone ID: LIB3912-052-F7_FLI
gaccgaggaacacaggaagctcgtcttcctcctctggctgtgagatcctatccccctctcgatttcccctgcaattactcacgctcccggattgatctcgccggtgtagccacgggtattacacagtgttgaagcgatcagcgtcttcaccaaggacggcatcctcaaagtcaccggcacggccgtgtgcgtctccggcgccattctgatggccctgtaccgaggcccatccttgatcgcccttcttagaagcatgcccaccgcatggacgagcgctccctaccaccctgctgctaccccagccgtgctcgagcagggtgtagaagcatggcagcttggcgtgctgtgcctcataggaaactgcctcttggtggctgtctatctagtcgtgcaggctccagtgatgataaagtatcctgcgagcttatccgtgacagcttactcctattttttcgccacaacctttatggtgctaactggagtatgtgcgactagtggtttacacgagtgggcgctgacaaaagccgaggtcatagctgttctgtatgctggaattgtcgcatcttgtctgagctactcgatcatgacatgggcgaacaaagttcttggaccttctttggtcgccctctacaatccactgcaaccagccttttccaccgccctctcaactgttttccttggcgacccagtttacctcggaaggtttggtttcgcacactgcccaatgatgactactaagccaattctgctgtttgaacattgttattggattattcctcaaactagcatccattcctttctttgaaacgaagcagcattgactat

SEQ ID NO: 25596 - DNA, 967 bp, Zea mays
  Clone ID: LIB3912-053-C2_FLI
gcatcctcgtccaggaccaggaacccggggtcatcctgttcgacatcgggttagcccacaagagcctgtcgaggtcgctcttcgaggacccgccggactgcaagccgtcggcctccggcgggatgagcgccgcctccgccgccaggagggagggcacgcaaggtgttactggactacggttgaggcgagagatggcagcagcaggcagcgaccagagtcaggagcagaggtgaggaggaggaggaggagctctgagacgacaacacccgagacaatggcgagccagttttccgctttataaaatcctgcggtgagtgagtgagtgagtgagtgagagagagagagagagagagagtgccgccgccgccgcaacaagaaatacaacagctgcagcttcctgcagaggttggaatgtatctactaagatgtgggtacctttttgcagttcttttttctcgcttcttttcttctcttttagcccaagctcctctcttgtccatgcactgtgtgaattaagtttgtcagtcagtcaattgttgttataaacaaagcacgcaggggagaaaaagaacaagggaaagagttggctgagaagccagttgggggatccgcggactgtggtctggcctagaatgatagatttttgttctcgtcagggataaaattcttctggtgagggtttgttgcatgtgccagctcagcggggagtgagctgggcacagcacatcctccatgtgggcttgtgttggcttggctggttgttggttggttcacttcttccgtggattgataagtatatatatataatattatgctaggtttggttaggccttatatatagcactattaaagaatatagaagttgcatttctttttatgtcttgatgaaaggtatctctgtcaatctgtctgtcaagtagctgtattggaatttttaaaaaatatatatatatggctgtattccttt

SEQ ID NO: 25597 - DNA, 1607 bp, Zea mays
  Clone ID: LIB3912-054-B6_FLI
cgatgccgaaggcagtcggcggggcggcggacgaagaggagttccgcgccgaggtggaggagcgcctcatcaacgaggagtacaagatctggaagaagaacacacccttcctctacgacctcgtcatcacccacgcgctcgaatggccctcccttaccgtgcagtggctccccgaccgcaccgagccgccggggaaggaccactccgtccagaagatgatcctcggcacgcacacctctgacaacgagcccaactacctcatgctcgcgcaggtccagctgcccctcgatgacgccgaggccgacgcccgccactacgacgatgaccacgccgacatcggtgggtttggcgccgcctccggcaaggtgcaaattgttcagcagataaatcatgatggagaggtcaatcgagctcgctatatgccccaaaattcatttgtaattgctactaagacagttagcgcagaagtatatgttttcgactatagcaagcacccatctaagcctccactagatggtgcatgcaaccctgatttacggctgaagggacataattctgaaggatatggcttatcatggagtatttttaaagagggacatttgttaagtgggtctgacgatgctcaaatttgcttgtgggacattaaagcaaatagtagaaacaaaagtcttgacgccttgcagatttttaagcatcatgatggtgttgttgaagatgttgcttggcacttgaggcatgagtacttatttgggtcagttggtgacgattatcatcttttgatttgggacctgcggtctccagcccctactaaacctgttcagtcagtggtggcgcaccagggtgaggtgaactgcctggcttttcacccgttcaacgaatgggttgttgcaactggttctactgacaagactgtcaaattatttgatcttaggaagattgatacttctctgcacacctttgactgtcacaaagaggaagtttttcaagttggatggagtccaaagaatgaaactatacttgcatcctgttgtctgggcagaaggctcatggtctgggatctaagcaggatcggccaagaacaaacaccagaggatgctgaagatggtcctccagagctcatgttcatccacggaggccataccagcaagatctctgatttctcctggaacccctgcgaggactgggtggttgctagcgtcgctgaagacaacatcctccagatatggcagatggctgagaacatctaccatgacgaagatgatctgccaattagcgatgagccggcaaaaacttcttgaagcaacacagcacaaaaggaatcttaacttctatcgactgttggtgttcctagatcggaaccctgctcgccggagaatcttcatcgagtgagagttggctgtaggttgcttccgtggtcgtaactttatgcttgacgggttcgtcgtttcttcgaccgtctgtatgtgtattcggcgaacctttagcaatatacatatcccgattgactagatctgtacgtcgcagttgtgttttgtagtattgttttgcagccagtaggatcatgttcgtgatgtgatttgtaacgggaacaaaataatattcactcc

SEQ ID NO: 25598 - DNA, 1533 bp, Zea mays
  Clone ID: LIB3912-055-E4_FLI
tcgcgcagcggtctggtctctctggtgggtgcccctcttcgccggtggccggaaagggtagtggagtgggaccgctcaaggagaggccggcgtccccaagtctcacttccgccgtccgcttcccccctgggatcgagggaggaaggaaaggaggtgcttcacaatgaaggccctcattcttgtcgggggtttcggaacccgccttcggcctttgactctgagcttcccgaaacccctcgtggattttgcaaacaagcccatgattctgcaccagatcgaagctttgaaagaagttggggtcacagaggtggttttggctatcaactaccgcccagaggtaatgattaatttcttgaaggactttgaggataagcttggcatcacaattacatgctcccaagagactgagcccttaggaaccgctggccctcttgctctagcaagggacaagcttgcggatggatctggccagccattctttgtcctcaacagtgatgtcataagcgaatacccatttgctgaactcatcaaatttcacaagtgtcatggtggtgaggcaacaattatggtcactaaggtggatgaaccatcaaaatacggtgttgtggttatggaggaggcaactggcagggtggaaaggtttgttgagaagccaaaaatatttgtgggtaacaagatcaatgctgggatttacttactgaacccatctgtccttgaccgcattgagctgaggccaacatcaattgagaaagaggtcttccctcaaattgcagctgatcaacagctctatgcaatggtccttccaggtttttggatggatgttggtcagcctagggactacattactggcttgcgtctttatctagactcgattaggaagaaatcagctgccaagctagctactggagcacatgttgttggcaatgtgctggtgcatgagagcgccaagattggagaaggttgtctgattggtcctgatgtcgccattggacctgggtgtgttgtggaggacggcgtgaggctttcccgctgcactgtcatgcgcggcgtgcgtatcaagaagcatgcttgcatctcaaacagcattatcggttggcactcaactgttggtcaatgggcacggatagagaatatgactatcctgggggaggatgttcatgtgtgtgatgaggtgtacagcaatggcggtgttgttctcccacataaagagatcaagtcaagcattctgaagcctgagatcgtcatgtgagctctccagttttagctacagtacattcttaacttctttgacgaagggaggattgcagatccccttttataaacgatattgcttggtatcttcgatctaatgcaaacagcttcatacttggtctcttgttaaactattgacaatgtatcttgttttttgttgaaaagtttagtacttgagtgtcaatcatacgtattcgcttgctaaaaactattgacaatgtatcttgttctttgttgaaaagtttagtacttgagtgtcaatcatatttcagagtcattgtg

SEQ ID NO: 25599 - DNA, 1601 bp, Zea mays
  Clone ID: LIB3912-055-G9_FLI
gacacacacccatgccgccgccgccgctcgcgcgccgcctactcctccagccgctgccgcgcggcgcgcgcgccctccacacgaccccggccccgcgccgcggcccgggggtgctggcctgccgcctggcgtcccgcgccgtggtccgcttcgcggggcccgaggcggcgcgcttcctccactcgctgctcaccaacgacctcctctccgccttctccgcggccggcgcgtcgtcgccgcagcggtacgcgcccacgccgaacgcgcccgcgcggggccccgcggcgcccgcctacgccgcgctgctcacgccgcagggcaggttcctctacgacctcttcctctaccggcccccgccgcggtcccagatgctcgaccgcacaggatccgcgccggagaccggtgaggcccccgaggggcacccgcacccgcaggaggtactcgcagacgttgacgccgccgaggtggacgacctcgtcgcctgctttaagagatatcgtttgagatccaaggttgaaatagacaatgtaagtgagaattttgcatgttggcaaagatttggacatgatgtagtgcacactgaaccttctactcaagaacctgaggctcaatccattgggtggggacaaggtgttgaccatgctggcgagtcagctgcgcaagggaacggtcatggatggcaatggctcaaagatcctcggttggactaccttggttacagaggaatttttccagctgacacgataccacccctagttgagtctgacaaagaagcagatgaacgccattatcaactttggcggatagaaaatggagtcgcagaaggttcgactgagatcccaaaaggcgaagcaatcccgctggagtacaatcttgctggcttgaacgccatttcgttcgagaagggctgctacatcgggcaggagcttatcgctcggacgcaccatcgcggtgtcatccggaagcgcctaatgccaatgaagttcgtcgacgggaatgggcaaggccgtcgctccaggctcggaggtcgtggacgaggcttcaggcaagaaggtcggggcagtgagcaccgctctgggctcccgcgggatgggcctgctacggctcgaagaagcactgaaaccgggctcggccctccgcgccggcggcaacagggacgtgagggtccaggcgatcaggccggactggtggccagccgagtggacgcaggtgcttcaggaacagcgcgcagccgcttgacagcagcggagctgtatgtagtactggaccccaaacacaaaccctgcctgtcgtcagttagtcgcctcttggaagaggacccaaacaaaccccatagctaaccgttttcagcttcggtttttagtcttgttgtctggtgtatcaaggcggagcctgttttttttcctcgcagaagacgaggaaggcaggagggcctgtttctcttcctctctgcctgctgctgtgttcagctgcggcatctcgttcagaacgagatgagcaaactgtgtgagtgtgtgtgtggcccaaacacgcagtgtgttcgaataagtttatctgtactacactgaataataagtttctctgtcttgatgatcttgtac

SEQ ID NO: 25600 - DNA, 442 bp, Zea mays
  Clone ID: LIB3912-055-H10_FLI
ggtttccttcctcctccagtgctgtcatcgccgccgccgccccggtttccttcgtaagcccgtcgtcctccgtccgcgactctgcgcgagaagcgagagtatggacacccaagtgaagcttgctgttgtggtgaaggtgatgggaaggaccggctccaggggtcaggttacccaggtcagagtgaagttcttggatgaccagaaccgtctcatcatgaggaacgtcaagggaccggttcgcgagggagacatcctcacactgctcgagtctgagagggaggctaggaggctgcgttgaggcggaatagtgtattggtagttttcgtatggagttggatgtcatctaattgtgctatgtttgtcaaactttggtatgaccttcaaaacacctgccttgtatgattatttgtgagcctggtgataagattgcagtttggttttt

SEQ ID NO: 25601 - DNA, 556 bp, Zea mays
  Clone ID: LIB3912-056-A11_FLI
cgctccgtcgctcgcctcacgcctccggcgccacctccaccatggccccgaagaaggagaaggccccgccgccatcgtccaagccggccaagtccggaggcgggaagcagaagaagaagaagtggagcaagggtaagcagaaggagaaggtcaacaacgctgtgctcttcgatcaggccacctacgataagctgctctccgaggtgcccaagtacaagcagatcaccccatccatcctatctgagcgcctcagggttaatggatccttggcacggagggccatcaaggatctgatggcaaaggggctcataaggatggtctctgttcattctagccagcagatatacaccagggcaaccaacacatgaggggtgttttgcgtcttgcggacgttatcagtctagacgacttgatgttgctattatatcaagtttaatttaatcgtggctcgatcaatcttactgttgtgttgaatgtcgaatatttttgagattattgtactattttaagatcatgttttttataacatttaagaccatgttgccatccaaatttt

SEQ ID NO: 25602 - DNA, 1417 bp, Zea mays
  Clone ID: LIB3912-056-B4_FLI
gcgggatggagttcctggagcccaaggacatcgactggagcagggtggtgtcgcagtacgtgcgcgacgagacctacgagggcatcgaggccccgcactgggccgacctctccgaccccaacgccggccgcgccgccgtcgacgacgaggcctggttttgccgccccgattgccagcatccgaagacggccgaggatttcttcaagctgagccccagccccaagggcaagctgctgcgatcggtttccgccatgctgccgttcgccgaaagggacgccaacgccaccaacctcagggacggcagtagcaacctcaagtggcggggtggcggcgccgttgctgcctccacgccgccgaagccaaaggcagcgcccaagaagaggttccaggaggatagcgagaaccatgaccctgcgctggccacgccgcccccacggcaggcgccaagtaggccgccgttcggcgcccctcggtggaacaagaatgccaaggaggccatcaagtccagtgcggagaagcggccggacaatgctgagaaggaggcgctgctcaataagcacgtcccgccgaggcagctcaagagcaccctctcagcgaggaacctcttctctggaaaggatatacttggccagatttcggagttctacgatgagctgaagcggatggttggtggtggcgtcggccggcctgtcacagacacacaggaggagcacagctcagacccagtgaatccgagctatttgatggagaaggtggctcctgatgagacagtgaaggaggaggcgagacaagaaacggcgaaaaagagtccaagcccaatgaagggaaagaaagtggggctgaaggtggaagcagggaagcaaaggtctccctctgtgctgaaggaggtgagggcaacgccgccgactccacagcggtttctatccccatcgccaaaccgcattaagaatgttaaacctggagggatgtccacagcaggctcgccactcaaaaaggcaccaaaggagaaggggacacctagtaaggacctggagagcaaaaaagatgctgtgaggcaaccctttggtgttaaggatatgaacaatacaagagcagcgtgtgatgcagaagggagctccagcagcatgttttggttcttgaagccctgcactttccttgtggagtagcgtcataacactacaattttttaacgagcaacacttgatatagttagaatccattacttcattcatttccaaattttctctgttcctatttgattgattcatttcatgggtactctatacgggaagtaaacaaaaagaatcatgtatagtcatacaggttgaaagtcttctccatatgtataattcgagatatagcaaaacgtggttctgctgctttgtcgtttgttcaaataaactgcatttttttgtcc

SEQ ID NO: 25603 - DNA, 750 bp, Zea mays
  Clone ID: LIB3912-056-D6_FLI
tgctctagatccgttcatcctggtggttttgtgaggtcgaaagcggcgagcgaattagaagatgctggacaagctgtgggacgacgtggtggccgggcctcgcccggagacgggcctggagaagctccgcaaggccaccaccgcccgcccgctcgtcatcaacaaagacgcggacggcggcagctacaagcgggcgcagtcgacgccgtcgaccccgacgacgccggtgacgccgtcgtcgtcgtcgtcgtcgacgacgccgcgcggcgccggcaacgtgtggcgcagcgtcttccacccggggagcaacctggccaccaagggcatgggcgccaacctcttcgaccggccgcagcccaactcccccaccgtctacgactggctctacagcgacgagaccaggagcaaccaccgctagatcgggcgagatggacagtgaagaggcccggtgtctctgtcaggccatgtttgctggtccttgtggttatctaaaacgcatgcatgctctattatagctagtcatcactatatatatatgcttgtgtttgtgtattgttgttcttgttctgctggtgtttgaggataaagactccgccgtttaagttgacctatgttatggagtgagtgatatatatatgccgtcactcctagtatatagtagtgactagttggtatgtgtagtactgtactatcttttctccatatgcatgttttgccagcgcgtaatgaatggaatgtgtactgctagct

SEQ ID NO: 25604 - DNA, 805 bp, Zea mays
  Clone ID: LIB3912-056-E7_FLI
cgtctgtcgtctcgtctcgtccacctccccagcggcgcgtgaagcttgaggcaatccccgccctctctagccctgcgcaaccagttcggttccatggccaacagcaatctcccgcgccgaatcatcaaggagacgcagcggcttctcagcgaaccaggtgtctgactagttccgcgcgagctctctcggaattttgccattttgcaccggggattagcgcgtcgccgtcggaggagaatatgcggtacttcaatgtcatgatccttggccccgcgcagtcaccctatgaaggtggagttttcaagcttgaactattcttgcctgaggaatatccaatggctgccccaaaagttagatttctcacaaaaatttaccatcctaatattgacaagcttggtaggatatgcctcgacattcttaaggacaaatggagtccagctcttcagatacgtacagttctactgagcattcaggcacttctgagcgccccaaacccagatgatcctctctcagacaacattgcgaaacactggaaatccaacgaagctgaagctgttgagacagcgaaggagtggactcgcctgtacacaagtggggcatgacagccaagtgttgttccagatgtaacaacacttccatagtttggggtcgattgaacacccctcttgcttggtgtgcgcaaatttgtgaaatgttgcaatggggtaaaaaacaaaaagctccaatcatgctttgtacttgtggctgtagctccgttcgctgcagtgcccatgaacatcaaagcaggtgttgctttgtccgttcc

SEQ ID NO: 25605 - DNA, 1174 bp, Zea mays
  Clone ID: LIB3912-056-F10_FLI
cctagcagcacttgtgtccggcggccttgtgttcgtgggggatgtgtggcatattagctagctgataagcggccggccgaagagcaagcgcagtgagaagaagaagctcggatcggaggaggtcggcatggggaggggacgcgtcgagctgaagcggatcgagaacaagatcaaccgccaggtcaccttctccaagcgccgcaacggcctgctcaagaaggcctacgagctctccgtgctctgcgacgccggggtcgcgctcatcatcttctccggccgcggcaagctctacgagttcggcagcgccggcgtaactaaaactttagaaaggtatcaacatttctgctacaatgctcaagattccaacaatggtgcactctctgaatctcagagctggtaccaggaaatatcaaaactgagggcaaaattcgaggccttgcagcgcactcagagacacttgcttggggaggaccttggcccactgagtgtgaaggaattgcagcagctagagaaacagctagaatgtgctttgtcacaggcaagacagagaaagacacaacttatgatggagcaagtggaagagcttcgcagaacggagcgtcacctgggagaaatgaacaggcaactcaaacacaagctcgaagctgaaggctgtagcaactacacaaccttgcagcatgccgcctgctggccagctcccggcggcaccatcgtggagcatgacggcgccacctatcaagtgcatccgcctgcccactcagttgctatggactgtgaacccactctgcaaatcgggtaccctcatcaccagtttccgccccctgaggcagccaataatatcccaaggagcgctgccacaggcgagaacaacttcatgctgggatgggttctttgagttcttctgttaatccatccatcagatggatccatgttgaaaccaataaaaggcattcagtgccatatatatcatatgcatatccgtgctcaagtgcttgatttgccacgacgttggattgcatcgttctgtgtgtaatagctaatttagaacggcacatctattctattctatgtggttgtggtgtggcacttatactgtttattcatttggaccatgaatcggggtagtttgtaaaaacacatctatatatgctgccggtgcatagaattcaaagtt

SEQ ID NO: 25606 - DNA, 683 bp, Zea mays
  Clone ID: LIB3912-057-A1_FLI
atactattcgtaatcggatctgaatctaattacaggtgtatatgcatgtattatgatttatgcctactaacttctattgctttgcaaaaaaaaatactgggtgtacatgtgtacactatacatccatgctctttactgagtccgcccctggtctgatcgattcttgcttgacgccgcctggtccatggatgaaccgtgtcacctacaattgattctgggatccggcttctgatttttccgtgtgagttttcaggccaacgggacctgattcatggcgaagcaggcgtacgccacgagcagtctcgtggtcgggtacgcgctgtgctccagcttgctggctatcatcaacaagtatgccatcaccaagttcagctaccccggactgctgaccgccctgcagtacctgacctcggtggttggagtgtgggtgctcgggaagctcggcttcctctgccacgacgccttcaacctccagaccgccaagaagtttgcgccggccgcggttgtcttctaccttgccatcttcaccaacacccacctcctcaagcatgcaaacgtcgacactttcatcgtgttcagatccctgactcctctcctggtggctatcgccgacaccaccttccggaagcaaccgtgcccttccaagctcacgttcttgtccctcgtgatcattttgggaggcg

SEQ ID NO: 25607 - DNA, 738 bp, Zea mays
  Clone ID: LIB3912-057-C6_FLI
cctagcaagcaaaccaccggagcagcggcgctcgcgcgggcggagccatggcggacgacgattacaacgaaatcgacatgggctatgaggatgagcctccagaacctgagattgaggaaggggccgaagaagagcttgagaacaacgaagatgcccctgatgatgtcataggtggagagggtgaagataaggaacaggaaaagaccaagcgtgagcgcaaaacaacaaaatatatgacgaagtatgaacgtgcgcgcattcttggtacacgagccttgcagataagcatgaatgctccagtcatggttgagcttgagggagaaactgaccctcttgagattgcgatgaaggagcttagagcgcgcaagatacccttcacgatcagacggtacctacctgatggaagttatgaagactggggagtagacgagctcattgtggaggactcctggaaacgccaggttggtggagactgaagatgctgatctacttggcatggaaaggatgtgtagttacaggtcttcgttgcctctgagtggatgctgaacagtgaatgaaccaagacgaaacgatgctatgctagatgttaccttgacgtctgtggttgccttggaactctggaaccgtgatggctggtggacggtggttgagttatgcttgttcgtttcagtttcagacatgctgtgcagatgattcgtaaactgactcgtctttcattcatttggaagggtttatcgt

SEQ ID NO: 25608 - DNA, 1592 bp, Zea mays
  Clone ID: LIB3912-057-E8_FLI
gggaaatgtggaaagatggactgtatgttgaaaacgctgcctgatcctgcccatcggcctacgcagtgctggaacacattgatatcaggttatgcaagatatggctatttcaaggaagctgaggatacattcaagcacatggtctcagtggggcaaaagccagactatgtgacatttgttgctctcctctcagcttgtagtcatgctggtctaatagacaagggcatggattactataactctatggcacctacatttggtgtttctcctggaattaaacattgtgtttgcatagtggatctccttgggcgtttggggaaatttgcagaggcagagaaatttattgatgaaatgccagtcttgccaaatgatctaatatggaggagtttgctgtcatcaagtagaacccacaaaaatctggatattgggaggaaagcggcaaagaatctccttgaactggacccatttgatgactcggcctatgttcttttgtcaaacttatatgctacaaatgcaagatgggtagatgttgacaaattaagaagtcacatgaagactattaagttaaacaaaagacctgcctgcagctggcttaagttgaagaatgaggtgagcacctttggtataggtgaccggagtcatatgcacgcagaaaagatctatgtgaagttggatgaaatcttgctaaagctcagagaagtaggttacgtcgctgatacctcatctgcactacatgatacggatgaagagcaaaaagagcataacctttggaaccacagcgagaagcttgcgttggcatacgggcttcttgtcgtgccagaaggatctacaataaggatattcaagaatctcagggtctgtgcagactgccatttggtatttaagctggttagcatggtttttcatagggagattgttctgagagatccttacaggttccaccaattcaaacacgggtcatgctcgtgttcagatttttggtgagatagtcataaaaccaaatatgaatcggtccctgcctgtcaatttctctacttgttcttctgatgtatcatgtgcgacctgtcgctggccaagcaaggcaaactcttggacgttgtccaggcgagcactggagcagcagcacctcacccaacggtgagggaggtggttgccaactactactcccccaaccgtcatcgccgatggctcccatcatcggtcagaggaagaggagttgctgctgcaaggcagattgtacttcggtcttacgatcatgatgaagcgcactgcgtggcagcggtagctggtgcacggcaatggtagcatggggctcatgcttgacaccgactgtccatgatgcaaagggacgactaatcgaccttccttgacatggctttggctccgcagcctcatgacaggtggagggcatgctcgttatcacttaaacggctacacaacatggtcacctgcttatgcaggatactaaacgggtggcaactctccgttttgtttggtttaaggttaaagtaggatgatacggggtgacactgtccccttgattttttagaatatgctgtcacaaaatttacttcggtatttatctcgttttc

SEQ ID NO: 25609 - DNA, 610 bp, Zea mays
  Clone ID: LIB3912-057-F4_FLI
aactgtggtttgattagctgctcctgccaagaagggtgatgccaagacccaggccttgaaggttgccaaggctgtgaagtctgggtcagtaaagaagaccaagaagatccgcacgtccgtgacatttcaccgccccaagaccctgaagaaggctagggaccccaagtacccaagaatcagcactaccggaaggaacaagcttgatcagtaccaaattctcaagtatcccctcaccacagaatcggcgatgaagaagattgaagataacaacactcttgtcttcattgtcgacctcaaggcagacaagaagaagatcaaggctgctgtcaagaagatgtatgacattcaggccaagaaggtcaacaccctgatcaggcctgatggaaagaagaaggcttacgtgaagcttatgcctgactatgatgctcttgatgtggccaacaaaatcggcatcatctaaagttaccgcgtcaggcatctgctgtgctctatttccatgtgaaaccagagtttttgtagctatggctcagtggctccatgaccatgtcttatgcacacttacgaatttgatatcatccaagtcacaggttgtgctcatcaatacttggat

SEQ ID NO: 25610 - DNA, 670 bp, Zea mays
  Clone ID: LIB3912-058-A11_FLI
ggccgccgtcctcgaggagagcttcaaggagcataacacactcaaccccaagcagaaggcggcgctggcgaagcagctgaacctgaagccgcgtcaggtggaggtgtggttccagaaccgcagagccaggacgaagctgaagcagacggaggtggactgcgagttcctgaagcgctgctgcgagacgctgacggaggagaaccggcggctgcagcgggaggtggcggagctgcgcgtgctcaagctcgtggcgccgcaccactacgcgcgcatgccgccgcccaccacgctcaccatgtgcccctcctgcgagcgcctcgcctccgcgtccgcgtccgccgaccaggcgggccgtgcagggccctgctggggccctctccccgtgttcgtcgacggcccagcccggaggccgtgatccacgaccacgatatggcatgagatggatgcgcttgctaatcgctaccgctagctaagtagctagtgctaattagggctggatcttctttttttctttgtttggttcttattatactcgcaggctattacagcttagtagtgtttattagtccgatatgataaaaatcttcgttgtttggcagtgttttatttgctgaaaaatagataacgatgtcttatgtctttgtactcataagtgatgcaaaattgtctt

SEQ ID NO: 25611 - DNA, 1017 bp, Zea mays
  Clone ID: LIB3912-058-E10_FLI
ccgtcgtcgcgtgccatcctagggtttctttccccgtcggcgcctccccagatttggccgccgccgccgctgacccaggttgtcttgatggcgcccgctgtagaagccgtgaaggagacaggcaccttccagaaggttcctgccttgaacgaaaggatactgtcatccatgtccaggaggtctgttgctgcacacccttggcatgatctggagataggtcctggtgctccaaccatattcaactgcgtcattgagataccaaggggcagcaaggttaaatatgaacttgacaagaaaactggactgatcaaggtggaccgtgtgctgtattcatcagttgtttaccctcacaactatggattcattcctcgcacgctttgtgaagacagtgatcctttggatgtactggttataatgcaggagcctgttatcccaggctgtttcctacgtgcgaaggccatcggccttatgccgatgattgatcagggagaggcagatgacaagatcattgcagtgtgcgctgatgatcccgagtacaggcattacaatgatatcaaggagctcccacctcaccgcttggctgaaatcaggcgcttcttcgaggactacaagaagaatgagaacaaggaggttgctgtgaatgactttctaccagcgagcgccgcttatgaagccatacagcactctatggacctgtatgctacatacatcgttgagggcctgaggaggtaggattctgatggctaggaaaggtggggaggatgttgacgaaaaactgggagaccatttaccgcatggaacgagtaccgttattattttatttgtgtcgtgtatactgctagtagtgaaccctcaatcaaagaccgaaatcccctggggagtcggagtcggtagtaggtgaagctagtaacaaggttggcgaaatattattttctggcctgactgcctatatatgttgtacgtgattggtatcgtaatattcattcgcttttgtgatacataattcgttattggatc

SEQ ID NO: 25612 - DNA, 1723 bp, Zea mays
  Clone ID: LIB3912-058-E12_FLI
ccaaaagagaagagggcagacacgagggagcgcgtggggggagagggcatggtctctctcgtcccggcagtcccgtctcaagcaaaagctctctcctcttcttccgctcagtgcaccaatcactgcaacatactggcctgaggtcattgagttggtgaaagggaaggagggggtatcatgggcatctcatccaagtggattaaatccttggttggcataaggaagcaagaaaaagcgcagaatgcagaaaagcaagaaaaagggtggaacgctgagagcagtgaaactaagagctctgctaatcaatcactgcacaaacggaaacattctttggatcccggagctgcacttgcagtcgaagaaattacagtacaaagtgaagcattgactgataacaaaagcgcacaaatggtttcaaattcatttttttcagacagtacaccgcttgatgtgcacatttctcaggctgaacatcatagtaacgaagatttggccgcaactgttgtccagtctgcgtttcgagcgttcttggctaggcgtgctttacgagctttgaaaggaatagttctacttcaagcccttattaggggccattctgttagaaggcagacagcagagacgcttcagtgtatgcaagcgctggtaaaagcaaaagctcgtgtccgagcaagacaagttcgtgttgccttagaaaatcaagtggcacggaaaaagattcctgaacaagatgatcatgagaaccatgtccgagaagtcgagggaggctggtgtggcagtattggttccatggaggaaatgcaagctaaagcactgaaaagacgagaagctgctgctaagcgtgagagggcaatggcatatgctttgactcatcagcggcaagctggttccaagcaacaaaattctttgagcctgcaaggtcttgaacttggtgagaaccactgggagtcaaattggttagacaggtggatggctgtacgtccatgggagaacaggttacttgactgtaatgccaaagagagtctgccaacgcatgaagataaggatgaggaagcaaattctcagatcacaccaaagggtaaagtgtcaacttcaaatactcctggtctgagcaagaagaaaggtgttaaccacaaaaagtcatattcagatgttagttgtacttcatttgcacgaccagcaaatgtattaccatccacatctttaggatcatccaaacagaaggcaaaggctgtgggtgaagtttttgaggaagtcagctcccagccaacagatataggttctaaggatgtgcacaattcaaaagataagcttgtgcaagtgaatggaccagccaagaagcggttatccctcccaaataatgttggcagagaatcagggaagggaccaacccgcaggaattcgcttaacaggtctgctccaaaagcacgggcggactctcctaaccagggtgatgagttagaggcctgataacacattcctccaatttgacgtcggcaagccatcctaaagtgtgcttctccaggttgcccataacgtaacattcccaaacgatatcatgcagctagatttgggttgtgattcatatttctgttgtgtaatgctgtggtgtgttgtgccttgtgtggccttttattccgcatcgccaattttcttatgtttccagcttccctgtaagttgttctaactgctgaaactaaaagaaggaaatgtgctgtattgtgtt

SEQ ID NO: 25613 - DNA, 576 bp, Zea mays; identical to SEQ ID NO: 15439
  Clone ID: LIB3918-003-A7_FLI

SEQ ID NO: 25614 - DNA, 920 bp, Zea mays
  Clone ID: LIB3918-003-D6_FLI
ggcaatttcgccctcgattcgaccccgattcgtccgcccgcgaccgggattccctccgccaagcgcggatctgaacgctgcgctccgtgtcgccgctcgaatccgccatgaagggggccaaatccaagggcgccgccaaggccgatgccaagctggcggtgaagagcaagggggcggagaagcccgccaagggcaggaaagggaaggccggcaaggaccccaacaagcctaagagggctcccagcgctttcttcgtgttcatggaggaatttcgcaaggagttcaaggagaagaaccctaagaacaagtctgtcgctgcggtggggaaagctgctggcgacaggtggaaatccctgagcgagtcggacaaggctccctatgtagccaaggctaacaagctcaagctcgagtacaacaaggccatcgctgcctacaacaagggcgagagcactgcagctaagaaggctcctgccaaggaggaagaggaggaagatgaagaggagtctgacaagtccaagtcggaggtcaatgacgaggatgatgaagagggtagtgaggaggatgaagatgatgacgagtgatggagctcctcgagacaatggaccgtgcttcatccaacaatggagcggctacacaaggccccgtggcgatcacaaaaaaggagcctatatccatgtactagaattattcagtttcactccacatcgtgatgttttatttttacttttgtcgtgctataacggatagcgctcctcgttggcgccactggcgggtggttctgcctctggtctggtgtgtttgtgtgtggtcacacttgccagccagcagaggcgcctgcttgtacctagattactgtttccattgtcgtcatcatcggctaacattgtcataatgtcagtttgggtaatgttagattaagt

SEQ ID NO: 25615 - DNA, 1113 bp, Zea mays
  Clone ID: LIB3918-010-E5_FLI
cgccgtagggttcaacggacccatccaaatgcccgaaccccatcagcgcatcccttttcgcctgcctgcacacgccgccgccggcaatggccgcctgcgacgacgacgtcgccccgtcaaccgcctccgcctaccttgacccctcttactgggacgcgcggtttgggaaggaggagcactacgagtggttcaaggacttctcgcacttccgccacctcctcgcgccgctcctctccccgtccctctcggtcctcgaggtcgggtgcggcaactcgcggcttggcgaggatctcctgcgggagggcgtcgccggcggcatcacctgcgttgacctgtcccccgtcgccgtccagcggatgcgcgaccgcctcgccgctctaggcaccaaaggcgtggatgctgtggtggcggacatgcttgatctgccgtttgagcaagagagctttgatctcgtcattgaaaagggcaccatggatgtgttgtttgtggacagtggcgatccatgggaccccaatcctacaacagtggaaaacgtgatgaaaatgcttaatggtatccacagggttttgaagccagaaggcatctttgtatcaattgcctttggacagccacactttcgacgccgattttttgaagctcctgagttcacatggtctattgagtacagtacctttggcgacagcttccattatttcttctacactcttaagaagggcaagaggtcactggagtccagcagttaccaaaacacattaccatcacctgttgctccaagaataaatatggtccacgaagagctcgagagcgaggattttatattcctcacaaaccttgatgggttgtgagtggctgcttaaacaagcatctggctaacagcctaacacatcaaaagggtgaccaggccagcgttggtgaccctgcagtgatgtttttttcctgggcggcaaatgagaatgatgcctgtaaaatgtgtaatttaggatagatttaaattttgagctttgttgtctagtaatactataatactctatattactgcaggctagaggtctgtatgatcttgtaaaaattagtattactttccttttgaaatctaatgcttcgacttaactt

SEQ ID NO: 25616 - DNA, 1529 bp, Zea mays
  Clone ID: LIB3918-010-F1_FLI
gcatgcatgcatctcttcttaaccacctgactaatactgcctctttgtgctttatttctccacatactactaccgcacaaacgctgtcatggcagcgcttgtggcgatactaatgcacctcctggtcccggcgctgctgctgatgagagtcgtggcagtggtggcggccggggcaccgccgttctcgtgcggcggcggcggcccgtcgctggggttgccgttctgcaacacgaagctccccgctgctcagcgcgcggcggacctagtgtcgcggatgacacccgcggagaaggcgtcgcagctcggggatgtcgccaacggggtgccgcggctgggcgtcccctcgtacaagtggtggagcgaggccctgcacggggtggccatctcgggcaaggggatccacatggaccggggcgccgtccgctccgccaccagcttcccgcaggtgctgctcaccgccgcgtccttcaacgacaacctctggttccgcatcggccaggccacaggcaatgaggctcgcgcgttctacaacatcgggcaggcggaggggctgaccatgtggtccccgaacgtgaacatcttccgggacccgcggtggggccgcggccaggagacgcccggcgaggaccccgcggtggccagccggtacgccgccgcctttgtccgcggtctgcagggcagcagcagcaacacaaaatcagtgccgacggtgctgctgacatcggcgtgctgcaagcacgccacggcgtacgacctggaggactggaagggcgtgacgcggtacagcttcagggccaccgtgacggttcaggacctggcggacaccttcaacccgccgttccggagctgcgtggtcgatggaaaggccagctgcgtcatgtgtgcctacacgtccgtcaatggcgtgccgtcctgcgccaacgccgacctgctcaccaagaccttcaggggaagctggggactcgacgggtatgtcgccgcggactgcgacgcggtgtccatcatgcgcaattcacagttctatcgcccgacggcggaggacaccgtcgcgaccacgctcaaagccggattggacatagattgcggtccctacgtccagcaacacgccatggccgccatccagaaggggaagctgacgcagcaggacgttgacaaggccgtcaagaacctcttcactacccgcatgcggctgggccacttcgatggcgaccccaaggcccacgtgtacggcaacctcggagccgcccacatctgcacgcaggagcacaagaacctagcgctcgaggcggcgttggacggcattgtcttactcaagaacagcgccggcgtcctcccgctcaagcgagggtcggtcgcctctgccgccgtcatcggccacaacgccaacgacgttctcgccctcctcggcaactactggggcccaccgtgcgcgccgaccacgcctctccaagggatccaggggtacatcaagaacgtcaggttcctggccggctgccacaaggcggcctgcaacgtcgccgcgacgcccc

SEQ ID NO: 25617 - DNA, 1547 bp, Zea mays
  Clone ID: LIB3918-304-D12_FLI
tagagtgcattaacaccttgaatgaaggactcttgttgcatcatgcatctgctggatgccctaaaccacagtggtcaaaatacctgagttttcttaaaagcaggaggttttcagagcttacaaaaccaaaatactggaagggtgaacaggttgacagcataatgaccatgcaacatgttgcattgtccaaggcaaacaatgaatatccaaaaatacacacccttttctctaccgaatgttcatcatattttgactggcaaactgttggacttatgcacagttttcgtttaagcggacagcctggtaacatcacgcgcttattgagctgtacggatgaggacttaaagaactataaaggacatgatcttgctcccacacattatgttccatctatgagccgacatccattgacaggggactggtaccctgcaattaacaaacctgcagcagttctccattggctcaatcatgtgcagactgatgctgagttccttgttatcctagatgctgatatgatcatgagaggccccatcaccccatgggaatatggtgcaaaacgtggccatcctgtttctactccttatgagtacctcattggttgtgataacatacttgcaaagatacacactcgcaatccctccgcgtgtgataaggttggtggtgtcattatcatgcatatagatgatcttcggcgttttgctctactgtggcttcacaaatcagaggaggttcgtgcagacaaagctcactatgcaaccaacattactggcgatatatataattctggctggattagcgagatgtatggctactcttttgcagcagctgagattaacctgcgatacatcattaggagggacataatgatatatccaggttatgttccactgcccagggcaaaatacagggttttccattatggtttgagatttggagttggtaattggagctttgacaaggcggattggagaaacgctgatgtagtaaatacatgctgggccaagttccctgaaccacctgatcctgctacgatcacgaaacaagatctagatgcacgggagagggatcttctcagcattgaatgcgggagagctttgaacaaagccctatacctgcaccataagcgcagaaattgcccccggctagacaccattagcagcacatctaagaaaactgatcaagtttctgcttctaacaaaattgtgagtgttgcacaaaagtcaagaagtataagtagaggaaacatcgaatccatggacgagggaaggttgaagactgtcaagaggactgcagcttctgtacaacctctacatagatcaaggagactggccaggtcttctaggatgtggataattgctgtatgggcattatcaattgtggtgttcctattagtaatctccatgtttttcactgagcaaaggagaaacgcttcgagatctagggtttctagaagtttaaaggctcatgtctgagtattctctttttctaccgacacaatttctgactatagagcagacaatattcacaaactgttactttgtggacgt

SEQ ID NO: 25618 - DNA, 1279 bp, Zea mays
  Clone ID: LIB3957-001-A2_FLI
cccagcgtccgcccagcgtccggtcctttgcctcctcactccgtcaggctcgtcgccacagggttttgttcctaactttttagcttcaatttttgtcttgaatggcaacacctctggatgttccactggatgatttgattaagagcagagctgggaggggaacaggaagaggcaggggacaaggagggggtcgaggcagaggtgatggccaaaggttggctcgtggttcgtggcgtgggcgtggtactggcaacttccgtgaaaggggacttggggtgtcttcgcggaggccacttggtgttaatacttggtcctcatcatttgctattgccaagtcattcaataaagcaaaggattttgtgtggagacatgatctctttgaggatagcatggtagcagctgggctttctgggatagaatctggaacaaagctttacatttcaaatttgcactatggagtgacaagtgaagatctacaggagcttttttcagaaatgggtcatttgaagcactgtgctgttcattatgacagttatagacacccaactggttcggctgaggtgatattcaccaggagaagtgaagctctcgcagcactgaagcgatataataatatgcgccttgatgggaaggccatgaagattgaagtaataggagcagaattgggtctatcagctgctgccgtaccccagattagtgttgttcctggtgcaagcagaagagggcagagagaagttgttatgatgcctggtggaagtgggtttggacaaggtgcatctggcccatctagttcgcttcctgggtggaagcgtggaggctttgttcgaagaggacaagggcgtgttagttttcctcaaagagggcgagggcaagtgcgcagccgtggccgtggccgtggccgcagtagctttgttcagagccgtggacgtggctatgtgcgcaggggtaatgcagagaaatcagccaaacaattggacaatgaacttgacaactacaactctggtgcgatgaatgtcgactaagttaatccatcgtgacatcattcaatccaacctggaagttggaactatgttgaagctaagcttgttttctgtcggtattctgtcaaatgtgcacacttctgtcatgctctagtggcatcagttgaagattagatattccattattcctactgcaatagtcttgtgatatcagaatttgctgtaattgaatgatgaattatgttttcaaccgttgaaaggtttgctgtcaaaatttcaatattatcctagttattgtc

SEQ ID NO: 25619 - DNA, 558 bp, Zea mays
  Clone ID: LIB3957-001-A3_FLI
agcgagcacaatgcccctccgccgccgccgccgccgctacccggtgtagcagtgacgatgagctctccaggctctcctgagccgccaggctccgacccgtgccgctgcctgttcgccggtgccgggcactcgtcgagggcgtcatcagaggctcctcctaggcacgagcccgaccaggagaatcaggtggcgtctgggccatcggtggacgggggtgctaacagtaacggcatgccgctgtccgaagttaaccccactccacccgagagcaacagccagacagtgaggaagcagcagccagggccctgcaaatagcagctgcctggagtcggcgaggcgagatcgctgttctgcagcggtctgctgcaggacgagcaaacacctgtacagtggcagatggctgtctggctgctgtaggttggggtttgatgagggtatggtgtaaatatgagaaatcattcagatttgttgttggaaaccaaacacacttcatctgttcagttcagtattgatgctgaaaacagcaaccccccgtggtatgcggatacgggataccac

SEQ ID NO: 25620 - DNA, 618 bp, Zea mays
  Clone ID: LIB3957-001-C4_FLI
ctccgtctctccctctcccctcccgtctgacgcacatggcctccatcgccggatcttccgccctctccttcgccaggcccgtcaaggcaatcaacacaaattctctagctttctcaccgttgaggaagggcaacacattcctccgcctgcaaccaatgcctatgagatctgtttcctgcgctgccaagaaggatacaacagacaaggtttgtgagattgtgaagaagcagcttgctcttcctgaccatactgaagtttgcggtgaatcgaaattctctgaactcggtgcagattcactggacacggttgagattgtgatgagtctcgaggagcacttcgatattagcgttgaggagtccagcgcacaaacaatcgccacagttgaagacgccgcggacctcatcgacaagcttgttgctggcaaagcgtagttctgtacctcctctatcgttgtcctaccactctaggtctatcccttgatctaggtttctatggtctgaagatttgtgattttctccgcactgttgttgctatccccgtgtcgtaataatacgagatgttttaagcggttgaacattacggtggtgtaatcagagtaatctgttgctgttaaggtgc

SEQ ID NO: 25621 - DNA, 549 bp, Zea mays
  Clone ID: LIB3957-001-C9_FLI
aaccagtttcagagagtgtctagccgaagtaaggcagctcacaaaccttctgctgagcagccagcctgagagcttcgcgaaccctgcaaccagggagcagagctacggagccttagaccacaagaaggtggcgataatttgtgacaagttcaaggatgcccccgacagcctgttcgggagcctctcaggccggggcacggtgcagagcgcccggaagaagtccctggatgtgctgaagagaaggctaaaggattttagctagctggtgagctagatcatttagacaagctagtagcatagtacccctgttttagtgccagtcgtatccatttaaaatttcttttccgtctttctttattccctctttaatcgacttcccgtttcatgcgccgaagagaaggctgaaggattttagctggggttagctggtgagctagatcgttaaataagctagtgctctgtttagggaagaagacaagtggttcggtgtgtaaagccatttcaaatttctttccatccttatttttactcccttaatttgcttcctac

SEQ ID NO: 25622 - DNA, 1771 bp, Zea mays
  Clone ID: LIB3957-002-A11_FLI
gcggcaagctggccaccgcgtcaccgcctctactgctctacagccccaggttccactgctaaacgccggtaatggcccaggctccggcgcgcgccgcttccgccgtacgtctcttcgacgcgcactgccacctgcaagacccccgcatcgcggccgtcgcccctgcccttatacgagccgccggcgcatccggcgtcgcacgcttcgctgtcaacggcacctccgagaaggactggcacctggtgaagcagatggccgaggatcacccagccgtcgtcccctgcttcggcctgcacccatggtgtgtacccgagaggtcgccggattggatgaatttgctccggcggttcttcgccgaaaccccggaggcggctgttggggagattggtctggacaaaggttcacatggaaaaaccatcaacttcggagaacaggttgaagtgttccagcgacaactcgaactagctaaggaattggcgagacctgtttctgttcattgtgtgcgggcatttggtgatcttctggaagtattgaagcaaactggacctttcccagcaggcgtgttgttacattcttatatgggatctgcagaaatggcgtctgcccttgcaaatttaggctgttacttttcactatctggcttcttgacaggcatgaaatccactaaagctaagcacatgctgaagtcgattcccctggataggattcttttagagacagatgcacctgatgcatttccaagattggacaatgtttctgtatcaccagtccatgttcacagttcagatgcagatactgaaaagcatcacatggattcagagtcacaggctgctaatgcatcaaatgagtccttgaaccatccagaaaatatccatattgttttggagtatgttgcatcactccttgaaatgccagagtcagaattggcggagctgagttacaagaatgctaccaagctgttttcttatcctggctccaaagttcaacatgaacctaaagacatctaaatcgggttcaacactaccttactcactgggtctcccagacacaatgtttgagaaactgaaatggttgtacatcactgttaatattggtgaaataaaacagataccgaatcaaagtagtgcaactggtttccttcaaaaaaaaaaaagtctctgattttttgtttgacgagaagtacagcactagttagcaacaagacatccaaatcagtggtatccattgttttcatgttgccattgaatgatgaaccgtagagaaaacagccagcgttcctttttcctactggggcagtagtttttggccctgaaggttacaagagagagagagacgctgattttgccttaaaaatagtaacctgaaaacagtctgcgtaatgaggatttagttgatagtacctctagttttttatttgatgctggttagttcaattttgtactaaaaatcgtcaaataaaatcagatggagtactacattgtaggtttcagtggcaacgtctgagttctgacttgataacctgttagcagagttgacttgcatccctacaggctacggtctacagggatgggctggttctggttgtaacgaaacagagcgagaggagggacatagggcatgtttgttcagcttttttgtgaccagcttttccaagaatttggctgtatagagaatctggctgtatagagaatctgagtatcattaggattacgtgcggaggaagataaagttgtccatgaggctcagatctataaagcgacggattactact

SEQ ID NO: 25623 - DNA, 768 bp, Zea mays
  Clone ID: LIB3957-002-D11_FLI
gtgcgaaggcgaccctccctccttcgctccttccgcgccgcctcccggccgtcgccgccatggtgaagtactcgcaggagccgggcaaccctaccaagtcggctaaggccatgggcagggatctgagggtccacttcaagaacacaagggagacagcctttgcgcttcgcaagttgtctttgaccaaggctaagcgataccttgaggatgttattgctcacaagcaggcaattcccttccggagatactgtgggggtgttggtcgcaccgcgcaagctaagtcgcgccactccaatgggcagggccgctggcccgttaaatcagccaggttcatcctggatttgctgaagaatgctgagagtaacgctgatgtgaaaggcttggatgtggacaacctctatgtttcacacatccaggtgaatcaagcccagaagcagaggcgccgcacctaccgtgctcacgggcgcatcaatccctacatgtcctcaccttgccacattgagctgatcttgtcagagaaggaagagcctgtgaagaaagaggctgacaacattgtcgcagcaaggaagcagtgaagtatatcagcatgctgatcgaggccattttgtcgaagtattatagccgtagctcttttatgtaccttttcaggcagccttgcctctcgagacgtttccggcaccgatgttttaaatctggattatctatgttctgtactgaactactgtgttggactgtaagttcagctcgtaatacaatagctcttaagat

SEQ ID NO: 25624 - DNA, 582 bp, Zea mays
  Clone ID: LIB3957-002-F12_FLI
gtcggcgtcgacgagagctgcgctaggtgatctcgactgcttcctcgtcccccatggcgacggcgctcaaatcgttcctgaacagccccgtcggccccaagaccacccacttctggggccctgtcgccaactggggcttcgtcatcgcgggtttggttgacatgaacaagcctcctgaaatgatatctggcaatatgacagcagccatgtgtgtgtattctggactctttatgaggtttgcatggatggtacagccccgaaattatttgcttctagcatgccatgcttccaatgaaagcgtccagctctatcagttatctcgctgggctaggtctcaggggtacctggagaagaaagaaccagaggccaaacagtaaaaagggtatccaacactgcagtcatttgttcaataaagaaaatatgctgtggaaaacattcattctgttgccaatgcagtttttttgtatgtttgcaaaatatgctgaggaaatttcatgatacctagcgcagttacaagcgtctgcttacttttatgtgcatttgtcaagacacatttgttttttacattgctaccttcctact

SEQ ID NO: 25625 - DNA, 573 bp, Zea mays
  Clone ID: LIB3957-003-E5_FLI
gaggccgcccagaaatctccacaggacatgggtatccgtgaagcacttatgagagctgaaaagcagcttaagttgagcaaaagaaaagactggtataaaatccttggtgtttcaaagacagcatcagctgcggagataaaacgcgcctacaaaaagctggcgttgcagtggcatccagataaaaacgtggataaccgggagaaagcagaaaacatgtttcgagaaattgctgctgcttatgaggtgcttggtgatgaagacaaacgtgtaaggtatgaccgtggagaggatgtggaggagatgaatatgggaggcgggggtggcttcaatccttttgggggaggcggccagcagtacacgtttcaatacgacggtggcttccccggcggcggcttccctggaggtggcggctttcagttcaactttggataaactgtgccatgcaccatgacattttcttgccactggaattgttttaggaattcttaacggcagctggtagctattcttaggcaggctgagactgttctactatgttacataataatgacaagtgttacgattttttccttc

SEQ ID NO: 25626 - DNA, 870 bp, Zea mays
  Clone ID: LIB3957-003-H6_FLI
gtccgccgtcgtgcgctcgctacccctctccctcgaggcctttgccggcgaagagcgcccagtcgcccaccaggatgaagtttgttgctgcctatctgcttgctgtcctcgctgggaacagatccgggagctgagcaggtcctgctcacgtggtggccgcggcagccgcggcgagggtggcgactcgggttcttcttcttcttccaagtgggagatcaaaccgtccagcctcacggacaagaagccgacccattccaacagccacggcaggcactacgagatcaccggcgacgagtgcccgcacctccggctgctcgacatggacgtcggcctggcaaacatcgcccgcggttctatgatggcgccgagctacaacacccgtgccaacaagatagctatcgtcctcaagggccagggctacttcgagatggcgtgtccgcacgtctccggcggccggtcgtcgccgcgccgtgagcgcgggcacggccgagaggaagaggaggagcgggaagaggagcaaggcggtggcggtgggcaaaaggcgaggagctacaggcaggtgaaatcccgcatcagagagggctccgtcatcgtgatcccggcggggcacccgaccgcgctggtcgccggcgaagacaagaacctcgccgtcctctgcttcgaagtgaacgccagcttcgacgataaggtgttcctcgcgggcacgaacagcgcgcttcagaagatggataggccggcgaagctgctggcgttcggggcggacgaggagcagcaggtggaccgtgtcatcggagcacagaaggacgccgtcttccttcgcgggccccagagccacagggtctcgtcggtgtaagtgcatgcttgagatgt

SEQ ID NO: 25627 - DNA, 929 bp, Zea mays
  Clone ID: LIB3957-004-F11_FLI
cacaagtcacacagccacacttgaaccgcagcccgcagcggagggagcttgcacgggccaacgcacacataacacaagctcgtcgtcgatggcgcggtgggctgcggtgctggcgctggccgcggccacggccatcgccgtggcgtccgtggcgggcggcgacatgaacgcggacaagacggagtgcgcggaccagctggtgggcctggcgccgtgcctgcagtacgtgcaggggcaggcccgcgcgccgccgcccgactgctgcggcggcctgcgccaggtgctggggaagagccccaagtgcctctgcgtgctcgtcaaggacaaggacgaccccaacctgggcatcaagatcaacgccaccctcgcgctcgcgctccccaacgcctgcggcgccacccgcgccaacgtctcccactgcgctcagctcctgcatattcccccgggctccaaagacgccgccgtcttcagtcccggcagcgacaagggctccactgccgctccagccaaggacaactcgacggcgacgaccgactcccgcgcgctgcaggcgaccaccggacgcggcgtgtcctcctcggcggcgaccgccggtgctgcactcacggtgctgctcgccggctacctcctcctgctcgtgccagagctgtcgcctagctcgttctagaccctctgtcaagttgtgccaccagtaggatttgatatgttgttgttctttctagtacgtgacgtgacagacaatttgctgctggtgtccttgttgttgtagtagttgcactgcgtgttcctgttatgctatgggtacgagatgttagggcatgggttaagctaagctaaggcgatgggggatcagtaccttacctctcatctctggctgctgatcctttttgttcttggcactgctgttttatctgaacatttgatcagcc

SEQ ID NO: 25628 - DNA, 899 bp, Zea mays
  Clone ID: LIB3957-006-C3_FLI
agagttgagctcacatggagcaggacaaaagaaccaaggtgctgtgcctgcatggcttccgtacaagcggcgcttttctgaagaagcagatcagcaaatggcacccttccatacttcagcagtttgagatggtcttccctgatggcgtcttcccagctggtggaaagtcggagatagagggcatatttccaccgccgtacttcgagtggtaccagttcaatatggaattcactgactacacaaatctggacgagtgcatttcatatctatgtgattacatggtgaaaaatggcccttttgatggcctgctcggattctcccagggcgcaacacttttggcccttttggtaggctaccaagcacagggcaaggtgctgagtgatcatccgccaattaagttcgtggtctcaatatctgggtgcaagttcaaggacccaagcatctgtgatgtcacttacaaagacccgatcaaggtgaaatcagtgcactttattggagagaaggactggctcaaggtaccttcggaggagctggcttctgcctttgatgagcctctcatcataaggcatcctcatggccacactgtccctaggcttgacgatgtgtctgtgaaacagctttctgaatggagctcgtgcatcctggaagaccttgagactgcaatcgttcctgaggccttagattcgggcaacccatctgataaggaagctattagtgcagaattcgcagaaaacctggtgactgcttgaggcttgtccactttcgtggcatggttggtttggttgcatttgaaacttgtaccgtttctactgagtagtgcgtggaacttgtttgatcgcatgtgtatttgcattggcaaaacaataaagcgctatcttctgaatcaaatggattcagac

SEQ ID NO: 25629 - DNA, 1133 bp, Zea mays
  Clone ID: LIB3957-006-C6_FLI
ggggagaaaggcgaactcgaattgggggaagagagcgagagacgaatcgcatcgagccggagaggatcgtcagagacagggaggagggcggcggaatcggcgccggcgggaggcaggcatggaggacttgagcgtggaggagctcgcctccaacctctccacctacaaagagcagctacgcgaggtcaagaagcttatcaaggagaagaaggatgatgctggaatttctgaatatattgatatggagaaagagcttcaagaggtcataacgttaaccgaagagattttggcaactgcaaagcaaactgagagtgcccagaatgttgcaggtctatcaccgccaagctattcagctggagtgcagtctgagggactggatgacctttcacattcccataagtttgccgttggtactagagttcaagctgtgtggagtgaagatggagaatggtataatgcaaccgttgaagctttgacaccaaatggatactatgtagcctacgatggctggggaaacagtgaagaggtggacccagataatgtgaggctgcttgaggaagaagcagctgatgccttgggacaagctgaaaaggaagctgaagctacaaaaatggcaataaagaggaaaattgaacaagcagcaacatctgattttcaggcgcgtagcttgccggccaaacttcgtatcgaaccaagtgaccctgaggatgttaaagctgcaaagcgtaagaaaatacatgctttcaaatcaaaatcccgctttgagcagcttgaatttgcccaaaacaaaaggcagaatgcatggcagcagtttcaaaccaaagggaaagccaaaaaggtggggttcttctccggtcgcaagaaggagagcatcttcaagtcaccggacgaccacagaggtaaggtgggtgtcactgggagtggcaaaggcctgaccgacttccagaggagggagaagcatctgcaccttaaaggtgggtccggggatgcagcggatgatgacgaggagtaaactgaagaaccgagcttctgtttgtatctcgccgaacagacatttccatacctgttctttagcgccgacatggcctcgaggggactcttgacttaaaccagaaaatttcaatgtttgtccc

SEQ ID NO: 25630 - DNA, 1462 bp, Zea mays
  Clone ID: LIB3957-006-G8_FLI
gacaaatttagggggaaccgctgaagacagtctcagcagcagcagcagctgctgcctgctgctgtctagtccatcttcatcctccccatcgcccgactggatttctcccccgaattcgcacctcccccctcacttcgctgtgtctcatcaacgccggcatcaccgcgaggactgggccagctctccctccctttctcctccctccgccttcattgctgacggcgacgactgggcgagctctaccgccgctctgcgctaggtgcccaggtcttcctcgggcacttcaccggcgacgagcacccatcaggagcgaaatggacgaggctgttcctgctttggctaccggccaagcttcaaccgacgccgtgacagagcagcctgtgaatgtgtacatatgggacatggatgagacactcattttgctcaagtcacttctggatggctcatatgctggggcttttgatggcctcaaggatcatgagaaaagtactgaaataggaaagcgatgggagaacctcattcttgaactctgtgatgagcacttcttttatgaggagattgagaactacaatgaaccctatctcaatgccttgaatgaatatgacgatgggagagacttgacctcatatgattttgaggctgactgttttagttcaccatatgatgatgcgaacaaaaagaagcttgcttacaggcatcgtgctattggagagaaatatgcaaagggtttggaaaaggttctggacggacacatggtcaaagtctgcaatgatcagtacagtttgactgacaaatatactgatggctggctgtcttcagctcataagttactggaagaagcattgggcaaatcagcatcagcaccttcagccaactcttcaagcatcaactgcatagttacatcagggtcactgattccaagccttgccaaatgtttgctgtatcacctggatgatgtggtctcatctgagaacgtctacagctcatgggaagtgggtaagctgcagtgcttcaaatggatcaaggagcgcttcgacggtccaaacgtccgcttctgtgcaatcggtgatggccacgaggagtgcagtgctgcgcaggtcatgaaatggccattcatcaagatcgagttccgccctgaagcccatcacaggttccctggcctagacttgcccacagtgcagacctacatggatgtgatatacgagtcatcgagcaaagatggttgaccgacgattgatgtcgattctgttttctcctctgacctccaccacccatggagctattgtttgaggaaactgtaagcaaagagatgtcgtgggaaaggaacgtgtcgtcctccctagatctttcaccttggcgaattaggaggcaggtgtgataaataagagtcttgctagttcgtcgtcgtcgtccatgttgtcatagatcctgtcttgtgtgttcatgttactgtgatgcaggc

SEQ ID NO: 25631 - DNA, 593 bp, Zea mays
  Clone ID: LIB3957-007-E11_FLI
acagagagagagagaccgacgcgccggcagatcccaagctcaccggagagggggaagagggcgaccgaaggcggcgatgggtttcatcatggacttcgcggagaatctgatcctccgtctgatggaggacccggacaagcgcgaccaggttcggcgggagcatgtctacaagatgaaggagcggtgcgagcgcactaaggcggcgtggagcctccctctgcgcccctacggcttctggaccttcgaccgcttcaactcgcagctctcctgggatccccagatcagccaggccgccggccgtcgggacccctacgacgacctcatcgcccgccactctggctcgccgccgtcttcctgaacacccgttccgatccttgcccagaaggtctacttgggcatcaataagaaactctttcccctcaaactgattgtggttccatcctcttctgtctggaaaatgttgtcaccaaactaccctatttcctgttccagtttggcatggaagtataagttgtgtacttctattctcaagttgttgtctttgtattatgaaatgtttccaataatcagcagtttttgatgtatggtcgtgg

SEQ ID NO: 25632 - DNA, 540 bp, Zea mays
  Clone ID: LIB3957-007-E2_FLI
gacaagagccgccgccgccgccgccgccgccgccgccgcgcaaagccgcttcaacgacgtcactcctcggggcgcaaccatggtggccgcaaagaagacgaagaagtccacggacaacatcaacaacaagcttcagcttgtgatgaagagcggcaagtacacgctcggctacaagactgtcctcaggaccctcaggaattctaagtcaaagctagtgatcattgctaacaactgtcctccgcttcggaagtctgaaattgagtactatgctatgctggctaaggtgacagtccaccacttccatggaaacaatgttgaccttggaacagcctgtggaaaatacttccgtgtctgctgcctcagcattatcgatcctggtgattctgacatcatcaagactacaccgggcgagcagtaaggatggcacaacagctgtactcggcatctgaattcttagtagctgatgattttgatgtacttgtcttttatcgtgttccgtcagaatttatagagttcttggcaacattgtgtggattgaac

SEQ ID NO: 25633 - DNA, 268 bp, Zea mays
  Clone ID: LIB3957-007-F5_FLI
cacctccctgtcccagccctagggctcgtagcggatcgtgagggatgattttgtgtggtgtgtcgcaggtgtgaaatgcctttgttgtcccaatattcctaccgtgttgggggtggtcgcttgctcgcgtccacgtctttcacatgaattggttactgtggtagttgtagttctggatacggtaccaaaacaaaagtattgctgtcaacaatctgcaacagccgggaaaacagtcgaaaacctttgcaaataatacctgctgccgtgg

SEQ ID NO: 25634 - DNA, 948 bp, Zea mays
  Clone ID: LIB3957-008-B7_FLI
cggctgcgggccagcagctgcggcaggacgaagagggcggaggaggagggcgtcacgcggagaaggagctcgtcggtgacccaataacccacgactcggtcgtctcggcgaagctgtacgaggacgtgccggcgacgccgatgatggcgctcaaccacatctcccgcctgtgcgaatccgtcgacgcgtccgtccggttctacgtcaaggcgctcggcttcgtgctcatccagcgcccgccggcgctcgacttctccggcgcatggctcttcaactacggcgtgggtatccacttcgtgcagcgcgacgacgcgcggcgggcccccgacgtgaggccggaggaggcggagctggaccccatggacaaccacgtgtcgttccagtgcgaggacatgggcgccatggagcggcggctgcgggagatgcgcgtgcggtacatgaagcggaccatcaacgaggaggaagggtcgcccatcgaccagctcttcttcagggacccggacggcttcatgatcgagatctgcaactgcgagaacctggagctcgtccccgccggcgccttcggccgcctcagactgccccgcgaccgccacaacccgcccgtgcgcatggtcgccggcagcgacgagtagagggggagggggctttcgcgtccacgtgaccctccgccctacaaggccagcaccacaggccgggggaaatagtttgtggctcatataatcgccgcgggcgcttatgctggattctgggccgagttccagttttgaattcgaatttgtgctagttttggtttgcttcggttatcaggagattcttagcaagatgaaccgtggaataactatggaactaaaccgtggaagatgaattctcaaacaggtctaaggggttgtttggtttaaggggttgtttggtttcatgggaataaactttagtctctcccttttagtc

SEQ ID NO: 25635 - DNA, 379 bp, Zea mays
  Clone ID: LIB3957-008-G5_FLI
cgccgccgacgcagcagcaggagacgcgccaaggagagcccgcaaggaggcgactatgagggccaagtggaagaagaagcgcatgaggaggctgaagaggaagcgccgaaagatgaggcagagatccaagtaggctgatggggattgtggatggtggtgtcggcatagttgtgttacgtttcttcgatgcgtgagttcatggagagatgtcacatcctagttcgtcgtcaccgtttgccatgggtccaatggctcgtcttggaaacctgcacttcagtaggccatctatcgtggtttctagctatatccagagttttgtgctaagacaaatcagtcagtcgttttgtgaacctattatgatggagctttatttgctgct

SEQ ID NO: 25636 - DNA, 984 bp, Zea mays
  Clone ID: LIB3957-009-A8_FLI
atgccgccctgagcgccactgcacagacgcgcagagacagacattgcgactttgcgagagacaaaacctcccagataacgcccgcgcgctccccgatggcgtcgtcgtgccagaacgtggagattcccggcaagccgacggagacggggacggcgctgctggagacggcgacgggcaccatccaggggttcgcgccgctgagccagatccaccagcacctgtgcgcgttccacttctacgcggacgacatggggcggcaggtggaggcgcaccacttctgcgcgcacctgaacgaggacgtgcggcagtgcctcatcttcgacgggcccggcgccggcgcgcgcctcatcggcgtggagtacatcgtctccgagacggtgttcctgacgctgcccgacgccgagaagccgctgtggcacacgcacgagttcgaggtgaagggcggggtgctgttcatgccgggggtgcccggcgtggtggagcgccgggacctggagaaggtgtgcaagacctacggcaagaccatccacttctggcaggtggaccgcggcgacgcgctcccgctcggcctcccgcagatcatgatggtgctcacccgcgagggccagcttcggcaggacctcgctgactgtgtggagaagaagttcggtgtctccttccagaaggagagggagaaccgggcgtacatgagcggaccggagcatggtatccacccgctagcgaacgctaccggcaagggcctgaggaccgagatccgtgaggtcgatttgccggcgagtactaccgccggcgccgggagggtcttcacttgatcgccgtatcgtgtgttgccgcggcgggtctgcgtaatgtagactatatagacggtgcttggtttggtctgtagttcgtgagtacgtgctcaatcgtttgtgttctcttaagacacgaactactgttcatatgaactttgaattttcgcataataagagatggcgctctact

SEQ ID NO: 25637 - DNA, 829 bp, Zea mays
  Clone ID: LIB3957-009-E12_FLI
cagtggcaaaaccactatttactaccagcttcgggatggatcatcacatcaaggaactgttacttcaatggaagaaaacagtgatacttttgtgctgcattcggagcaagaaaggaaagacaaagtaaaacctgtgcatattattgatgttcctggtcatgctaggctcaaacccaaacttgatgaagtcctgcctaaagctgctgcggttgtctttgttgttgatgctcaagatttcttgtctagcatgcaagctgctgcagagtacctttatgacattctgacaaaggcaactgtagtgaagaaaaaggtccctgtgcttatattctgcaacaagacagataaagttaccgcccactcgaaggaattcatcaagaagcagttggagaaagaattgaacaagcttagggaatctaggaacgccgtatcgtcagccgacatctctgatgaagtccagcttggggtccctggagaggcattcaacttcagccagtgccagaacaaggtggctgttgcggagggtgctggtttgacaggtgatgtttcggccgtggaacaattcatccgtgaacatgtgaaggcataggttgttcttattgtttttggggctccaaatggctatcctgatgagataagatgtacattgcgtcaatgtggttgttacctttcatgcatgtacaccttcatccggtgctctgaagttgcttagagacagtgaagcacagtcatattttgaactggttcagctgaccttgttatagaggcattgcatgttgcactgcttatgcctgacagtcatcggatatgaacagagcatgttgaaactgcc

SEQ ID NO: 25638 - DNA, 648 bp, Zea mays
  Clone ID: LIB3957-009-H5_FLI
ctcatctaggcgtcggtcagagctctctcgagctcgccagcggtggttggtcgtcgtcgtcgtcgtcgtcgatggggaggccgccgtgctgcgacaaggcgaacgtgaagaaggggccgtggacgccggaggaggacgccaagctgctggcctacacctccacccatggcaccggcaactggaccaacgtgccccagagagcagggctcaagaggtgcggcaagagctgcaggctgaggtacaccaactacctgcgtcccaacctgaagcacgagaacttcacccaggaggaggaagacctcatcgtcaccctccacgccatgctcggaagcaggtggtctctgatcgcgaaccagctgccgggaaggacggacaacgacgtgaagaactactggaacacgaagctgagcaagaagctgcggcagcgcgggatcgaccccctcacccaccgccccatcgccgacctcatgcacagcatcggcgcgctggccatccgcccgccgcagccggcgacctcccctaacggctccgccgcctaccttcctgcgccagcgctcccgctcgtccacgacgtcgcgtaccacgccgccggaatgctgccgccgacgccggcgccgcagcggcaggtcgtcatcgcgcgcgtggaag

SEQ ID NO: 25639 - DNA, 796 bp, Zea mays
  Clone ID: LIB3958-001-D12_FLI
ccgatcagcgagcgggcctctgggagaggtagggagccatggggaggtcgccgtgctgcgagaaggggcacaccaacaagggcgcgtggaccaaggaggaggacgagcggctggtggcgtacatccggtcgcacggggaagggtgctggcggtcgctgcccagcgcggcgggtctgctgcgctgcggcaagagctgcaggctgcggtggatgaactacctccggccggacctcaagcgcgggaacttcaccgacgacgaggacgagctcatcatccgcctgcacgccctcctcggcaacaagttcgtggtctctgatcgccgggcagctgccgggccggacggacaacgagatcaagaactactggaacacgcacatcaaacgcaagctcctggcccgcggcatcgacccgcacgcgcaccaccgcccgcaggcgctgcaccacgtggcagcagcagccctcgtcccggcccccgccgcgaagccgaagccgaagccggcggagtcgtccgacgacggcgggcgcagcagctgcagctgcagcggcagcggcagcagcgcgggggagccgcggtgccccgacctcaacctcgacctgtccgttggtccgccggacgcgcccacctcgccgccgccgccgtgcctgtgccaccgcgcctgggaagcgtgcggctgccaggcaggctgacggctgaggcagcaagagttcagattttttttttgttaggcagttgaaacaaggctagtgtgaaccgagaggagatcagtagctaggacactgtctcagagaaagaaag

SEQ ID NO: 25640 - DNA, 383 bp, Zea mays
  Clone ID: LIB3958-001-E5_FLI
attcgtttctcgcgagccatcgcttcggcatccggaagaaatggccaagtcgaagaaccacacggcgcacaaccagtcgttcaaggcgcacaagaacggcattaagaaacccaagcgccaccgccagacctccaccaaggggatggaccccaagttcctgaggaacctgaggtattctaggaagggcaacaaaaagagtggtgaggctgaagctgaggagtaggaaggaaagcatggctttgtttcctctgtttttagctcagttccacctttaggacctggggttttgctaaagatggaacttaagttggtgttactgtatgatggcaaggaccttttgctgccgaaggttatgttttgaagttcatgctaccttttaaatt

SEQ ID NO: 25641 - DNA, 1208 bp, Zea mays
  Clone ID: LIB3958-002-F11_FLI
aaaaaatatggtcttgcgtgaattctatgactatgctgctgctgcagaagtcaacagtgagcaccccctggcaaaagcgatagtggagcacgccaaaaagttgcgtccagaaggaaaccacatgtggccggaagcaagggaatttatttcagtaaccgggcaaggcgtcaaggcggaggttagtggcaagagtgtcatcgtggggaacaaaggcctcatgctgtcctcgggcattgatatccccttggaagcttcagaaatcctcgtggaagaggaggggaaggcaaggacagggattatcgtggcagtggaccgagaagtggcgggcgtaatctctgtatccgatccgacaaaaccaaacgccctccaagtgatatcgtacctcaagtccatgaacgtggagagcataatggtgaccggcgacaactgggggacggctaatgctatcggcagagaggttggcatcgagaagataatcgctgaagcgaaaccggagcagaaggccgagagggtgaaggaactccagctgtctggaaggaccgtggcgatggttggcgacgggatcaacgactcccccgcgctcgtctcggccgacgtggggctggcgataggcgcggggacggacgtcgccatcgaggctgccgacatcgtgctcatgaagagcaacctggaggacgtggtgaccgccatcgacctgtccaggaaggccttcttccgcatacggatgaactacgtctgggcgctcgggtacaacgtcgtcggcatcccgatcgctgcgggggtgctcttcccgtccaccgggttccgcctgccgccgtgggtcgccggcgctgcgatggcggcctcgtccgtcagcgtcgtctgctggtccctgctgctgaggtactacaaggctccgaagattgccggcacagctaaagaaatttgaattactaccctgtaggcaggtatcactggccggcactgctgctgctgctggaatgggaaggttgtggctggctggctgctaagtgctaacaatcgctgaaacagaagtctaaaaagaatcgctggaacaagcaagctgtacatatgtgttacaagtatatatacggcgatgctaagtgaaagtggtggtgtaacgtaagtactactactgatctgccatcgttgcatggatgtataccgtttttcttttcctctcgaaatgaaaagtggtcctatggcac

SEQ ID NO: 25642 - DNA, 1108 bp, Zea mays
  Clone ID: LIB3958-022-H9_FLI
gatgaattgggatcacatgagaggccacaaacctcaccccacctatattatcccgtgccccttgtctttcttcctccacaagcagcgaaatccaatctagaagctcccctctccctccctccctctctctctctctcttcgccgtccgaagctccgcacccaatctaatcgacacctcaccgagatgggccgcaagttcttcgtcggtggcaactggaaatgcaatggaaccacagatcaggtcgagaagattgtcaaaaccctgaatgaaggacaggttcccccttcagatgttgtcgaggtcgttgtcagccctccttatgtcttccttcctgtggtcaagagccagctgcgccaagagttccatgttgctgctcagaactgctgggtgaagaagggaggtgctttcactggtgaagtcagtgctgagatgctcgtcaaccttggtgttccctgggtcattcttggacactctgaaaggagagctctgctgggagaatcaaatgaatttgttggagacaaggttgcgtatgccctgtctcagggactaaaggtcattgcatgtgttggtgagacccttgagcagagggaggctgggtctaccatggatgttgttgctgcacaaacaaaagcaattgctgagaagatcaaggactggagcaacgtagttgttgcctatgaaccagtttgggctattggaactggtaaagttgccaccccagctcaggctcaggaagtgcacgcctccctgagggattggctaaagaccaatgccagccctgaggttgctgaatctactaggatcatctacggaggctctgtaactgctgcgaactgcaaagagctagcagcacagcctgatgtcgatggttttcttgtcggtggagcttctttgaagcctgagttcatcgacatcatcaacgcggccaccgtgaagtccgcttaagatgctacgctgaagacgaacatacttttttttttgctcaactgtgctatgtaagctagtagcttttgcgcaggagcagagactgttttgcctgcccccaacttctagcttgagcttgctaataatgtttacctctggacgtatcaataatggtgcttatgt

SEQ ID NO: 25643 - DNA, 2542 bp, Zea mays
  Clone ID: LIB3960-011-F10_FLI
cgaccaatcccgcctcccccgcccacggccgcgcctggagcggcgggccgcgcgcggccaccctcgcggcctcgccgtctcgacgccaccgctgggagcgcgatgcccacccgcgcaccgtgcgcaccctcccccacgtgtcccccctgccgcccgagggccccgcctgtcacccaccgtccccggggtgggcagccgaaagcgacgcgtgaagcgctctgccctgcctgctgccctcagcgctcgcctctcgtcacgcgccccctccacaacccccgatgcgatgggtgcccctgcccctcgatagccgcgccgctctcctgcccccgttccccatttgcatcctcgtccacctccctgccctagcaccgtcctcccctattcgacccaacgccgccgccgcctccgccgccgcataggcctcgccgcggcctctgctccgccccgcggcctccggaggttctactcgcgcgcgatccgccgctgcgtccgttgctccgccatcgattcggtggcgcgtggagtatgtctctggtgcaagagtgctgaagatgaaggagaggagctctttatgcgaaagtgcagccgatggaaactggggtttgaaatataaaaggaaaagaagcaagttaacagttagcccatctaatgagaatgaggctacctcaccaacatctgactctcgaatgagccatggttccaccaaaaagaagttgaagcatgacaataacatttctccatcagccaagaagataagagggcacgatgggtattttttcgagtgcgtagaatgtgatcttggtggcaatttgctatgttgtgatagctgtcctcgtgtttaccacttggaatgcctcaatcctcctcttaagcgtgcaccccctgggaagtggcaatgtccaagatgccgtccgaaaaaagttagcttgaagctgttaggtaatgcagatgttgacacttctaaacgtgaaaaaagtacaaggacatatgcaagtacggcatcagatagtccaccttcgcatacaaaagtctcctttaagaccaggaactccacacaagacaaaactggattaaacgaacaaggaaaagagtcatctggtggcacaatgaatgggggtgaaaccagtacgaagaataatgaagttgagaaaaagaagacactgatattacatttgaagaagcgttcaaccaaggaattgtcagagaacactaaaccctcgaagtcagaatttgttgaactttcagaagagaaaattgtaaaacatggaagtgttttgaaactcaagaaacatccacatcgtatggacttgtctccaagtaaatctaaaaccaggaggcaaagtagccagagagagagtaaaagatctggcacaaaaaagattaaatattccatgtctgatgatgacagtgtttcctcatcagaaccatcgacatctcttgataacagtgaatcaccaccaaaaagaaaacactcagatggaaaagcaccttcatccagtaccaagaaagggaaaaagaaagtgaaatttgttgagaaaaagcactctgaggagcagggcgtggtaggtgacaaaatgatgactacccaggaggatcagcaggtcgatcgcatcctaggctgccggcttcagatgagccaaatcaacccgccgtcccatgcttcattggagcagtttgaatcagctaatctccaggtggatggtatggttcttccacatgcttccgctggcattcctaataggcctcatgatggaacagagtcttctagaaatggtacaattgaggatatatgtgctgatgaatcagccaatcatagtggtcacaatttagaaatgcgaaaggatacggacagtaaatcccatgaaaaggagtcacataagcgagaacaagtcaagaagatattatcagtatgttctggtgatgagaccaatataatgagagatgatcaagtagtcagagaaaatgtttcagcttccaaaaaaggtgaagatgagacatctgatttgccagcagaaaaggatgataccatacttccagtcaccagagcttgtacaatgatcaggaccaatcaagatcatacagatgaaagtaaacagcatgggaaaatagaacaaataacaaataaggactacaatgatgctggatatgagttcttgatcaaatgggttggaaaatcaaatattcacaacagttgggtttctgaatccgaggtaaaaatattagcaaaaaggaaactagaaaactacaaagcgaagtatggaatgagtttgataaacatttgcaaggaacagtggtgccagccacagcgagttattggtcttcgtgcttctgtagatgaagtggaagaggttttaatcaaatggtgtggtcttccttatgatgaatgcacttgggaaagatcagatgaacctaccctgatgaaatatagccatttggtcactcagttcaagaattttgaatgccaggctttggataaagatgtggtaaaagattatgcaaatgcaaggaaccgacatgagcttaatgtgttagttgatcagcc

SEQ ID NO: 25644 - DNA, 1342 bp, Zea mays
  Clone ID: LIB3960-011-G8_FLI
cggaacggaatccgggcatccgggaaagcagccctaatctcaaggccgcggctgcgagcgctgcttcccacctcccaactccagaagtcctccctagacgccgccagccgcgcgcacacccaccgagagctcctcgggctttctttctccgttcctccctcgcgcgctcagggtttcacgatggaggccgaggcggcggccaagagggcgcgggagggcggggaggacgccaccgcgccggtggcgggggccgaggcggtggtcgccggtgctggcgagcaggcgggaatctccgccgtcatcccaggatggttctccgagatcagccccatgtggcccggtgaggcgcactccttgaaggtggagaaggttctgttccagggcaagtcagactaccaaaatgtgatggtttttcagtcctccacgtacgggaaggtgcttgtcctcgacggagttattcaggtgacagagagggatgagtgcgcgtaccaagagatgattactcacctgcccctttgctccatcaaagaccccaagaaggtgttggttattggagggggggatggtggtgttttgcgtgaggtttcacggcatatctctgtggagcagattgacatctgtgaaattgataagatggtggtagatgtctccaagcaatttttccctcatctagctgttggatttgaagaccctcgtgtgtcattacacattggagatggggttgccttcttgaaaaatgctccagagggtacatatgatgcagtaattgtggattcttctgatccgataggtcctgctcaggagctttttgagaagcctttcttccattcggtggccagagctttgcgtccaggtggagttgtatgcacccaggcagagagcatatggctacatatgcacatcattgaagatattttcgtcaattgccgccaagttttcaaaggctcagttaactatgcttggacaacagtacctacataccctagcggagttattgggttcatgctttgctccaccgaagggcctgctgttgatttccagcaccctgttttcaacatcgaggaggatgaacattctacgaaatcaaaaggaccccttaagttctacaactcggagatccacacggcatcattctgtttgccctcttttgcaaagagggtaattgagtcaaaggcaagctagacgtgaggatacttcaccaagtccagtcgattgggttaagtaccttaggcgcaacacaaaatttgttgtcgtgtgaaaatgggatgcctccctcccccaccccccacttgatgaataagcacatgagatgagatgcaacggttatcggagttgtcagtct

SEQ ID NO: 25645 - DNA, 1717 bp, Zea mays
  Clone ID: LIB3960-018-D8_FLI
caaatcgtggagtggaaaccctactcgtccccttccgcagccggtactcaaccccaaccctatcctgtccgccgccgtcgcccggcgcctcctcccccacctagaaacccagaggctctaatcctagttctttctgtgcagtcgccgcccaattcccccacccaattcccactctccgctcgacagatccatacatgatgggagaggccaaggagaacgacgtttatgaggaggagctcctggactacgaggaggacgacgacaagacggtcgatggctccgctgctaagcccaccggagaggtcgcaaagaagggctacgtcgggatccacagttccggtttcagagacttcctgctcaagccagagctgctccgtgctatccaggattgtggttttgagcatccttccgaagtgcaacacgagtgtatccctcaagccattcttggaatggatgtcatctgtcaagctaaatctgggatggggaaaactgctgtttttgtcctttcatccctccaacaaattgaccctgttgcgggtcaggtagcagcacttgtactgtgccacacaagggaactggcttatcagatatgccacgaatttgagaggttcagcaaatatcttactgaagttaaagttgctgtcttctatggaggtgttcacatcaggaagcataaagatttgttgaagaatgaatgccctcatattgtggttggcacgcctggtaggatacttgctcttgccagggataaggatctctccttgaagaatgtgaggcacttcattcttgatgaatgtgacaaaatgctggaatcacttgacatgcggagagatgttcaggagatcttcaaaatgactcctcatgataagcaagtcatgatgttttcagcaacgctcagcaaggagatccgtcctgtatgcaagaaatttatgcaagatccgatggaaatatatgttgatgatgaggcaaagttgaccctccatggtcttgtacagcactatataaaacttagcgaggcagagaagaaccggaaactgaatgatctcttggacgctcttgatttcaaccaagttgtgatattcgtgaagagtgttagcagagctgccgaactgaataagttactttgtgaatgcaacttcccatcaatctgcattcattctggaatgactcaggaagaaaggctaacaagatataagaacttcaaggaaggccacaagagaattcttgtggctacagatttagttggcaggggcattgacattgagcgtgtcaacattgtgataaactatgacatgccagactcagctgatacttatttgcacagggttggaagggctggacgttttggcacgaagggacttgcaattacctttgtttcctctgcttcggattctgatgttcttaaccaggtgcaagaaaggtttgaggtagacataaaggaactgcctgagcaaattgacacctcgacctacatgccatcataaatgggaaggacaactgagaagagaggaggataggggagtgagcagccgtctggagatggttacctttgaactatccgatctggaggatttgatttgcctcctttgtgtactttaaaaagggcagccaggatgatgatctgtattttaagacaatgctgtctgtttgggtttaggattttgctttgtcgaaaactagcacacttattgtactactgagcagcatatttgttttc

SEQ ID NO: 25646 - DNA, 428 bp, Homo sapiens
  Clone ID: LIB4014-055-D3_FLI
ccagcccctcggataccacttggccactcccgctgaggccactcccactgcgtggctgaagcctcgaggtcaccaggcggaggcgcggagatgcccctgcatcagctgggggacaagccgctcaccttccccagccccaactcagccatggaaaacgggcttgaccacaccccacccagcaggagggcatccccgggcacacccctgagccccggctccctccgctccgctgcccatagccccctggacaccagcaagcagcccctctgccagctctgggccgagaagcatggcgcccgggggacccatgaggtgcggtacgtctcggccgggcagagcgtggcgtgcggctggtgggccttcgcaccgccgtgcctgcaggtcctcaacacgcccaagggcatcctgttcttcctgtgtgcggccgc

SEQ ID NO: 25647 - DNA, 619 bp, Glycine max
  Clone ID: LIB4-01-H1_FLI
aataaactcacccactaagcactacacaaatcacacagagttgcaagagaaagataaaagaagatggcgactcttgattccgacgtgcctatggttcccgccggcgagccctcgagcagcgccggtccttcttccaagaagcccaagcgcttcgagatcaagaagtggaacgccgtcgctctctgggcttgggacatcgttgtcgataactgtgctatctgccggaaccacatcatggatctctgcatcgagtgccaagccaaccaggctagcgccactagcgaggaatgcactgtggcttggggagtttgtaaccatgcttttcacttccattgcatcagtcgatggctcaagactcgtcaagtttgtcctctagataacagtgagtgggagtttcagaaatatggccactagaattatgatgtggttgagctcctcggacatttggaccatctatcctagattttgaatatttactgttctatctgttattttcgtttgcttgtgtactgaatttattatgttcaagaaatcagcttgtctgatggaatttgatatacgccgtggtaacatgtaaagttttactttaatgttttatgtatttcatatgcttcctttc

SEQ ID NO: 25648 - DNA, 1077 bp, Zea mays
  Clone ID: LIB4071-001-A1_FLI
ctcccatcgaccatcgctgccacataccaaacccacttcctgtggtcttcggtgtcttccccgccgccgccgtcgctgccgtcgtgcatcacactgtccctcttgttgtgatatctatgagagagagaaacagctcgatcgatcaagaacaccaacgaggctctagctccagatcgacaatgccgttcgcagcctcaaggacgtcacagcagcagcacagccgtgtggccaccaacgggagggccgtggcggtgtgcgcgggtcacgcgggcgtgcccgacgaggtggcgcggcaccacgagcacgcggtggcagcggggcaatgctgcgccgccatggtgcagtccatcgcagcgccggtggacgcggtgtggtcgctggtgcgtcgcttcgaccagccgcagcggtacaagcgcttcatcaggagctgccacctcgtggacggcgacggcgccgaggtggggtccgtgcgggagctcctgctcgtgtccgggctgcccgccgagagcagccgcgagcggcttgagatccgggacgacgagcggcgggtgatcagcttccgggtcctgggcggcgaccaccgcctggccaactaccgctccgtgaccaccgtgcacgaggcggcgccgtcgcaggacgggcgcccgctcaccatggtcgtcgagtcctacgtggtggacgtgccgccagggaacaccgtcgaggagacgcgcatcttcgtggacaccatcgttcggtgcaacctccagtccctcgagggcacggtcatcaggcagctggagatcgcggcaatgccgcacgacgacaaccagaactgattgccgtcggcccggccggctgcacgccgtcgtcgcagttgggctgccggtttctttggacgaggcttcatcgaccatttatgatatattttctttcgtcgttggtactgtatactctcgcgaaaataagaagttggtactgtgaactgcttaaagtttgaggttgtttgtcttccctttcttaaactctgtcaataatgaagtattgtaagatacagcatcaataatattaagaccagtaaagtagtatagttaatat

SEQ ID NO: 25649 - DNA, 1468 bp, Zea mays
  Clone ID: LIB4071-001-E5_FLI
gctgcgactaaaaaccatctttggggcccttcgccgcgatttgcttcgcttctcggactaggttaagttgccttttcgattctcagaaaaagactggctctgcactcggataattttaaaatggatagtgcacagcagcccactggggaattgaacaattcgttcgatactcttatggtttctggaggtgaccagagtcgacagcctcaggatgctggcaatgaaacgagcttcacgaattggaaagacctccccatggagctgctcctgcgtatcatttcactagttggagatgacaggatagtcattgtggcctccggtgtatgcacaggatggcgtgacaccttggggtggggggttgcaaatctttcactatcatggtgccaggaccgcatgaatgacttggtgatatcactggctcacaaattcacgaagctgcaagttctatctctacgccagatcaggcctcagctagaagacagcggcgtggaggccgtggcaaaccactgccacgacctgcgcgagctggatctcagcagaagcttcaggctgagcgaccggtccttgtacgccctggcgcacgggtgccctcagcttaccaggctcaacatcagcgggtgctccagtttcagcgacgtggcgctcgtgttcctctccagccagtgcgggaacctgagatgcctgaacctgtgcgggtgtgtgagggcggcctctgacagagcgctacaggccatcgcctgttactgtggccagctgcagtcgttgaacctgggctggtgtgatggcatcactgacaagggggtgaccagcctggcttcgggatgccctgaactcagggccgtcgacctgtgcggctgtgttcttataacagatgagagcgtggttgcgctggcgaacggctgccttcacctgcgctccctgggtctctactactgccagaacatcacggaccgcgccatgtactccctggccgccaacagccgcgtgaggagtcggggccggggctgggacgcgacagcgaagagcggcggcggtggcaaggaccgggagcgggacggactggcgagcctgaacatcagccagtgcacggcgctgaccccgcccgcggtgcaggcggtgtgcgactcgttcccggcgctgcacacgtgcccggagcggcactcgctcaacatcagcgggtgcctcagcctaacctccgtgcactgcgcctgtgcgctgcaccctcaccgggccgggcgagtcatcctctccaaccacgcctactgaacgcaatgcgtgaataggcggcgatgctcagatgtgtggataggccgttcaaccgtgagcgacggtgtccgctgtttatgtgaggtgcttgttttgtgtttaggcgtcaaggcgtgtacttggggtctctactctctagggaaccgtgtagaagcaaccgagttgagttcatcgtctgtaaaaacatggactgtatctgact

SEQ ID NO: 25650 - DNA, 1571 bp, Zea mays
  Clone ID: LIB4071-006-F1_FLI
ccgactttatgcagatgctgcgcgaagtgcagaggaaccccagcagcatcagcatgtacctctccgatccccgcatgatgcaggtgctcagcctcatgcttaatgtcaagatccagagacccgaggcctccgagccatcgcagtctaccccaccgccgccgccgcagcagcagacatctcctcttcagacgaaagccagagaggtggagccggagcccgagccagagccgatggatttcactgatgaggaaaaggagcgcaaggagaggaaagctgctgctcagaaggagaaggagttaggtaacacagcttacaagaagaaggacttcgaggcggcgatccagcattacaccaaagccttggaacatgacgacgaggatatttcttatttgactaaccgggcagcagtctatattgaaatgggaaagtacgatgaatgcatcaaggactgtgataaggctgtggagaggggaagagaacttcgtgctgatttcaagatgatctcaagggcactgacaagaaaaggaacagctctagtcaagcttgctaagacctctaaggattttgatattgccatcgagacctaccagaaggctctaactgagcatcggaacccagacactcttaaaaagttgaatgaggctgagagagcgaaaaaagagttggagcaacaagagtactatgatccaaaattagcagatgaggagagagagaaaggcaatgagttcttcaaggagcaaaaatacccagaagcaataaaacactacacggaggctctcaagagaaacccaaaggatcctagggtttacagcaatagggctgcctgctacaccaagttaggagccatgcctgaaggtcttaaagatgcagagaagtgtcttgaactagaccccaccttcactaaagggtacacaaggaaaggtgcaattcaattcttcatgaaagaatatgacaaggccatggaaacctatcaggctggcctgaagcatgacccgaaaaaccaggaactgcttgatggtgttaggaggtgcattgaacaaattaacaaggctaacagaggtgaaataagtcaggacgaattgcaagaaagacagaacaaagctatgcaagacccagagatccagaacattcttaccgaccctatcatgagacaggtgctaaatgatttccaggagaacccaagggcggcccaggagcacctgaagaaccctggagttatgcaaaagattcagaagcttgtaagtgctgggatagtccaaatgagatgatcaggcacacgatgcgattgtacctgcttgttcgtcccttgtgcttggctttgttagttaacgtgccctttaacaagcagcgacggcaaaagaatgaggggctaatctttttcccaattggattgtaagtgcagttaacattggattattcaagtttgtggcactgagtctgagtataggcgccgtcttgctttattgatgctggactttgcgtgcttgtgggtgggggttggttccctagctaaagtttagttcatgtcccattaaatatttgaatataatatatatttaattagctttcat

SEQ ID NO: 25651 - DNA, 1608 bp, Zea mays
  Clone ID: LIB4071-023-D1_FLI
cagaggcgcagagacaggcgtcttcgtactcgcctatctccgcgactcaaagcttcttccatttcctaccgccgccgctgcagctccaccccattccgtcgacaccatgagggagtgcatctcgatccacatcggccaagccggtatccaggtcggaaacgcgtgctgggagctctactgcctcgagcatggcattcaggctgatggtcagatgcccggtgacaagaccattgggggtggtgatgatgctttcaacaccttcttcagtgagactggtgctgggaagcacgtccctcgtgctgtttttgttgaccttgaaccaactgtcatcgatgaggtgaggactggcacctaccgccagctcttccaccctgagcagcttatcagtggcaaggaggatgcagccaacaacttcgcccgtggtcactacaccattggcaaggagattgttgacctgtgccttgatcgcatcaggaagcttgccgacaactgcactggtctccagggcttcctcgtcttcaacgctgttggtggaggaacaggctctggccttggttccctcctcctggagcgtctgtctgttgactacggcaagaagtccaagcttggtttcactgtgtacccatccccccaagtttcgacctcagtggttgagccatacaacagcgtcctgtccacccactccctcctcgagcacactgatgtggctatcctgctggacaacgaggccatctatgacatctgccgccgttcccttgacattgagcgcccaacctacaccaacctcaacaggcttgtgtcccaggtcatatcatccctgactgcctccttgaggttcgatggtgctcttaacgtggatgtgaatgagttccagaccaacttggtgccctacccgaggatccacttcatgctttcctcctatgctccagtcatctctgctgagaaggcctaccacgagcagctgtctgtggccgagatcaccaacagcgccttcgagccatcctccatgatggccaagtgcgatccccgccatggtaagtacatggcctgctgcctcatgtaccgtggtgatgtggtccccaaggatgtgaatgctgctgtggccaccatcaagaccaagcgcaccatccagtttgtggactggtgcccaactggctttaagtgcggtattaactaccagcctccaagtgtggtgcctggtggtgacctggccaaggtgcagcgcgctgtgtgcatgatctccaactccaccagtgttgtggaggtgttctcccgcatcgaccacaagttcgacctcatgtacgccaagcgtgccttcgtgcactggtatgtcggtgagggtatggaggagggcgagttctctgaggcccgtgaggatcttgcagcgctcgagaaggactacgaggaggttggtgctgagtttgatgagggtgaggaaggtgatgatggtgatgagtactagaagtatcctgatgctgtcatcgtcaggcttgtgtgctgctcttgtccccgttgtggtttgcaacacctgatgttgtaagactttctggttatgtccgccccgctttgccactgggttattaagaacgtcgttatggatggttgtct

SEQ ID NO: 25652 - DNA, 368 bp, Zea mays
  Clone ID: LIB3957-010-A4_FLI
acaagattgtagggatgcctgttgtcttcatcctcgccttgctccttgtttcctgttatgtggaggcggaaatctgcgcaaggcctaatcctcattatcctggcgcatgcaggagcaataaggactgtgcaggctcgtgcattcagcaaaacctcggcaccagcgggtactgcaagggcagtgtcccccttttcaaatcatgctattgtacctttgaatgtcccatggaggacgaggcagaggggggagggcgtctatcaggcgggcactagtcgtgagccgccatctgcatgactaaattcaaagtatctgagtgtttatgtaattgacctgtggaataaggccggcaaaataaacaatacatttgt

SEQ ID NO: 25653 - DNA, 391 bp, Zea mays
  Clone ID: LIB3957-011-A10_FLI
ccactcccgccattgtcctgcgcctttctgcaccgccacacacaccccgctccaatccaatggcgcctcgccaagccgtcctcgcggtcgtggtcctcgccgcgctgctcccgttcgccctctctcgcgggctgcggcttggccaccaccgcgcccagccgcacccgaggccgcacggccacgcaccgctcggaggtggcgcgtggtcctcggctcacgccaccttctacggcggcggcgatgcgtccggcaccatgggcggggcgtgtgggtacggcaacctctacagccaggggtacggcaccaacacggcggcgctgagcacggcgctcttcaacaacggcctcagctgcggcgcctgcttcgaggtgcggtgcgacgcggcgggggg

SEQ ID NO: 25654 - DNA, 394 bp, Zea mays
  Clone ID: LIB3957-012-E11_FLI
ctactgcacactcgtctccgcagtttgaaacgaagcccgcggctactgcaagctactccgtctccgtagctaaaggagaggtaggtttttatttggcgacgacatgagcacgggcgtgcgaccggggcggcggttcacggtggggcggagcgaggacgccacgcacccggacaccatccgcgccgccatctccgagttcatcgccaccgccatcttcgtcttcgccgccgagggatccgtcctctcgctcgggaagatgtaccacgacatgagcacggcgggcggcctggtggctgtggcgctggcgcacgcgctggccctggccgtggccgtggcagtggccgtcaacatctcgggcgggcacgtgaacccggcggtcaccttcggcgcgctc

SEQ ID NO: 25655 - DNA, 791 bp, Zea mays
  Clone ID: LIB3957-013-A9_FLI
tcgcgcactaccttccagcgaatccatcacggaagaaattgttccccacccaccctagactcgccgccgtcgcaactcccacccgatccccaaattctccggcggtgatggccagcctgtggcgcgccgtgatggatagcgtcagcggctcctccccctcggcgctggacgcggccccaggtagcggcgtcgagttctggcacggcgcagagcgcgctgggtggctaaataagcagggcgagtacatcaagacgtggaggcggcggtggttcgtgctgaagcaggggaggcttttctggttcaaggaccctgcggtgacacgggcctcggtgccccgcggcgtcatccccgtcgccacctgcctcacagtcaagggcgccgaggacgtgctcaaccgccagttcgccttcgagctctccacgcctgccgagaccatgtatttcattgcggactccgagaaggacaaggaggagtggattaactccatcggtcgctccatcgtccagcactcccgctccgtcaccgacgcagaggtcgttgactacgacagccgcccccagcccccgccgcagcttatgaccagcgaagagagtgcaccagcagcttaatggcgtggtgattcctgtgaactctctcgatatggatctgacttgtagcatatgtatttccaattccatgtgattgtggccttgtgccgacgttcctcactcttgattatgtagcagtatattaactatcaacgacatggtctggtatggtaataagcgagttaataagctgtgctttcgttt

SEQ ID NO: 25656 - DNA, 549 bp, Zea mays
  Clone ID: LIB3957-014-C12_FLI
agagcactggaatagatgccaatggaaattcctatgatctgagcacaaagttgctccatttggcctggcacccatctgaaaatctaattgcttgtgctgcagccaatagcttgtacatgtactacgcataaacaagcgaaacgaacagagcgacagtttttttttgttggttgctcccggtgagaaagacacgtttagccaatggtggattgaagccaggagttggtggagatggtgtattttgtgccagtcggaagcagttcttttcggtgccatatagagctgtccagagtccaagaggaagtgactcgatcattcccgggaagcagctttgattctgattattattattttttgtgtggggaaaggcttgtctttcccccataggttcatttagatttaaagataaggtcctagcttgacaacatctggacatctgtagtagacgatgttaaggggatggcgacgatccaccgttgtattcatgttgccatgggtttgtaacttcagggtggccgttggagcttttcatagttttatcttacatac

SEQ ID NO: 25657 - DNA, 841 bp, Zea mays
  Clone ID: LIB3957-016-A10_FLI
gctgccgcagtgccgctccttccctccctctacccgtcgccgctgctgccatggacgaagtcgtcagccagattttggagaagcaagtgctgtctgccgcgaaggcggtggaggacaagctcgatgaggagatcgccgcgctcgatcgcctcgatccggacgacatcgaggcgctccgcgagcgccggatccagcagatgcgccgcgccgccgagcgccgcgccaagtggcgtgcgctggggcacggggagtacaccgaggtccccgagaaggagttcttctccatcgccaaggccagcgagcggctcgtctgccacttctaccgcgacaactggccctgcaaggtcgtggacaagcacctgtcggctctggcaaaacagcacgtggagacacggttcgtgaaggtccacgccgagaaggcccccttcctgacagagaagctcaggatagtcgtcctcccgaccctcgccatagttaagaacgccaaggtcgaggactacgtggtcggcttcgacgagctcggcggcaaggacgacttcagcaccgaggacctggaagagcgcctggcgaggtcccaggtcgtcttcctggacggcgaagggtccgcgcaagcgtcgaagcaggctgccgccgccaccaaacggagcgtccggcagtcgggcaccggcgactcatccgactccgagtagctctcgtgtgttgttgttgttattattattatatatctaaatgggtacacagcacagacatgttttggctgctatgccaacaggcaacattagcattgcaaggatatgcgtcttattaggacctggaagcaaaagtggttgtggtttgagtt

SEQ ID NO: 25658 - DNA, 575 bp, Zea mays
  Clone ID: LIB3957-017-A10_FLI
caataaatagtattggtactgagttgacaagagatgaccgcaggaagctgtactccaactttggtttattgtatccatatggccacgaagaattggccgtttgtgaagatgttgaccaggttcgtggtgcaatggagaagtacccaccataccagtctatattttccaggatttcatatggagaaagtcagatgttggataaggcattttatgaggaggaagtcaagaggctatgcttgtcctttgagcagcagttccactacgctgttttcttcgcttacatcaggctccgcgagcaggagatcaggaacctgatgtggatctctgaatgtgtcgctcagaaccagaagtcccgggtccatgacagtgtcgtcttcatattctgagaacccccgccactatatatgtatgtacaaaatgcctgctttgatgatggcacaatcgctcgacaattataaatctgggacttattattattcccattccctctgttagacgccggcgtaaaaaatgccagacctggagttgatgtattatttgttttgtagtcaaataaaggtgtgattatctggcac

SEQ ID NO: 25659 - DNA, 723 bp, Zea mays
  Clone ID: LIB3957-018-A1_FLI
gcggagcgtgggcgcagcagccaaaacctacctagccgccgccgcaggcggccccccatcgccgccaagatgcagatctttgtgaagactctgacggggaagaccatcactttggaggtggagtcctcggacaccattgacaatgtgaaggccaagatccaggacaaggagggcatccccccggaccagcagcggctcatcttcgccggcaagcagctcgaggacggtcgcaccctcgccgactacaacattcagaaggagtccaccctccacctggtgctccgcctccgcggtggcgccaagaagcgtaagaagaagacgtacaccaagcccaagaagatcaagcacaagcacaagaaggtgaagctctccgtgctgcagttctataaggtggacgacgccacaggcaaggtgacccgcctccgcaaggagtgccccaacacagagtgcggcgcgggcgtcttcatggccaaccacttcgaccgccactactgcggcaagtgcggcctcacctatgtctacaaccagaaggcgtaattgcttgccccgatttgctttatccgccaacctatcaagcattcagatgttggttactcaaattgtatctcatttagatctgtctgaggttgaaacttaaatggagcagtagtatctatcatattggtacccctgttactgagtataattttgttttcatatccatccttacagacgattgcactt

SEQ ID NO: 25660 - DNA, 1323 bp, Zea mays
  Clone ID: LIB3957-018-B1_FLI
ctggacgagctggcggcggcggcaaaggccgccgaagctggcaattccattggcgcgcgagagatattggcgcggctcaatcaccagcttcccttgctcgggaagccgttcctccgctccgcctcctacctcaaggaggccctcctcctcgcgctcgccgaaggccaccacggcggctgccacctcacgtcgcccctcgacgttgccctcaagctcgcggcgtacaagactttctctgaccactcgcccgtgctccagttcaccaacttcaccgcgacacaggcacttatcgacgaaattgcccgcagcacatcgtcctgcatccatgtcatcgattttgatcttggtgttggaggccagtgggcttctttcttgcaggagctcgcacaccgccgtggcgcaggcggtgcggctctgccgtccgtgaagctcactgcctttgtatcagctgcttcccaccatccactggagctgcgtctcacgcgtgacaacattgcacagtttgctgcagaccttgggattccctttcagttcagtgctatcagcgctgatacgatcaaccctgcagagctcgtttctgccaccgctgatgaagttgtagctgttgtcctcccggttggttgctctgctcgtgcaccaccgctgccagcgatccttcggttggtgaaacagctggctcctaagattgtgatagccatagaccatggcgctgatcgtgctgaccttcccttctcgcagcacttcttgaattgcttccagtcctgcatgttcctccttgattcgcttgatgctgctggcattgatgctgattctacctgcaagattgagaagttcctgattcagccaagaattgaggatgcggtgcttgggcggggcaaggtggacaagccaattgcatggagaagtgcatttgcagctgctgggttcgcacctgttccacccagcaatttggcggaggcacaggccgactgcctcctgaagcgggtgcaggtccgcggtttccacgtggagaaatgcggggtcgggctcacactatactggcagtgtggcgagcttgtcactgtatcagcatggcggtgctgatcagcgatccacgcctgtgcgcaccatgttccaccaacatttgctggcatcttcaacccgagtaatgtgtattttgtcttgcaattaaatgctactaaggaaactgatatattgctgttgaaccctccatgttcatcatctttgcaacttacgagctagaactagtggatttttagcaatgttggtgccaatatctctagtgtaatgatgttggcctaagattttaccctgcttgctctc

SEQ ID NO: 25661 - DNA, 537 bp, Zea mays
  Clone ID: LIB3957-018-D1_FLI
gtaactaataattactttagattagaagcaaagggaagcgaagcaagaatcgatcgagtcgagaagatggtgcagttcggcaagtggctgaggaggcagatcgagcggagcctcccggagtggcaggaccagttcctgcgctacaaggagctgaagcggtgcgtcaaggcccgctccggcggctgcccgccgttgcccgcggaggaggccgagttcgtggccgagatcgacgcggagaccgagaagatcaacgccttcttcctcgaccaggaggaggagttcatcatccgccaccgggagctgcagaaccacatcgagcgcgcgctgggccgcggcaggccggcgccggcgccggcgctgcacgaggccgaggtcgccgccatccgcagggagatcgtcaacttccacggcgtcatggtgctgctcctcaactacagcagcatcaactacataggtaggacttaggagctctagctctagctagctagctgtacggagttgaattgaaagcctgcaggtctgtccttttgcccatgc

SEQ ID NO: 25662 - DNA, 998 bp, Zea mays
  Clone ID: LIB3957-018-E11_FLI
ctcccatccagccgccaccaggtgcagagtctttcgtcatctcttctccggcgaagaacccccagtcgcccaccagatcacttgttaaactttgttgaggggtgatggcggtttctttcgcaaacctcaactccgaggcagggcttaaaaagcttgatgagtaccttctcactcgcagctacatcactggctaccaagcttccaaggatgacttggctgtctacacttcgttttcggctgctccctcgtccaagtatatcaacgtagcaaggtggtttaaccacattgatgcgctcgtgaggctgagcggaattactgcagagggccaaggtgtgaaggttgaatcctcagcagttccttcagccccaactccagatgttgctgaagcacaggccccagttgctgaggaggacgacgacgatgatgttgacctttttggtgaggagaccgaagatgagaagaaggctgctgaagagcgtgctgcagctgccaaggcttctggcaagaagaaagaatctgggaagtcatcagttttacttgatgtgaagccatgggacgatgagactgacatggccaagctcgaggaagctgttaggagtgtccagatggaagggctgctctggggcgcatccaagcttgtcccagttggatatggtatcaagaagctgcaaatcatgatgaccatcgtcgacgaccttgtctctgtcgacactctcattgaggactatctgtgcgctgagccagtgaacgagtacgtgcagagctgcgacatagttgccttcaacaagatctaggcgtgacttccgatcagtccttctcctggggtgctggcgatggtggtggctgggcaatgcaccagcctaatttatccatagctatatgtctgctttgtgtggccagtgatattgccgtgagtatttttggatcctattcgagtcgaatgtaccagtaccagagttaatttgctttaattcgaaacaccgttccagttggaattc

SEQ ID NO: 25663 - DNA, 995 bp, Zea mays
  Clone ID: LIB3957-018-F11_FLI
gctccccacgaagcaattctaaatcctcgcgcagaagatcggatcctccgtcagatccgcatcggtgcttgccctccctgctcggatttctggcagccctttcctaccccctgaattcctgtgcggattccctcccctgccctggcggttgctcctgttgcctggtgggaacttgagagttgagaggaggggttggtgggggtggaaggcgctcgtgacccggcccgtggagatggctggcgtgaaggagccgatcgaggtgaagttccggctgtccgacggcaccgacatcgggcccagcaaataaagaaatagctccaaaaactgtcaatgatgtgaagctcatcaatgttggaaggatactggagaatagcaaaactcttgctgaatctcgtgtcccagttggagaagttcctggaagtgtgattacaatgcatgttattgtgcggcctccccaatctaaaaacagtgagaagcaacagtcaaactctccgaagccaaacagatgtggatgcacgatattgtgacgttgatgcaagtagcaatgtgtatatcggtgtccacagagatcaatcacaagttcatttagcaattgattcaatctattcttcacaaccctgaagttcatttagagatggtgttacggccagtcacatatctggcttgagaaattgatgcttgcggtcgtgttcgagtgtgcaaggagttcacagggtcctggtaaaaccctgaaatcggtgtggactcaaggaattggatgtttgctattctgtaatgtgtggagacagtgataccagaagtgagttgctgcatagttacatcggagacaattcttttttcgtaactcggttgcgtgtatcagtatttctgttttgtaatagaaaaaggttgaccggctattgttggcataaagtggtaaggaatgggggtcccctaaggaatgctgtggtttgacatgggaagatgaaagtgaataatgagtaccattctggttc

SEQ ID NO: 25664 - DNA, 944 bp, Zea mays
  Clone ID: LIB3957-018-F7_FLI
ctcctcagccccgtcgtctccacgtctggacgcttcgaggagttcttccccatcggaggcgagagccccgagtccttcctcagcgtcttcagcgacgacgttatccaggcgtcgttcaacactcgccgggaggagtgggagaaagtgttcgagaagcagagcaagggggagatcacgacggcgtccgaggaacagatccgggagctgagcaggtcctgctcacgtggtggccgcggcagccgcggcgagggtggcgactcgggttcttcttcttcttccaagtgggagatcaaaccgtccagcctcacggacaagaagccgacccattccaacagccacggcaggcactacgagatcaccggcgacgagtgcccgcacctccggctgctcgacatggacgtcggcctggcaaacatcgcccgcggttctatgatggcgccgagctacaacacccgtgccaacaagatagctatcgtcctcaagggccagggctacttcgagatggcgtgtccgcacgtctccggcggccggtcgtcgccgcgccgtgagcgcgggcacggccgagaggaagaggaggagcgggaagaggagcaaggcggtggcggtgggcaaaaggcgaggagctacaggcaggtgaaatcccgcatcagagagggctccgtcatcgtgatcccggcggggcacccgaccgcgctggtcgccggcgaagacaagaacctcgccgtcctctgcttcgaagtgaacgccagcttcgacgataaggtgttcctcgcgggcacgaacagcgcgcttcagaagatggataggccggcgaagctgctggcgttcggggcggacgaggagcagcaggtggaccgtgtcatcggagcacagaaggacgccgtcttccttcgcgggccccagagccacagggtctcgtcggtgtaagtgcatgcttgagatgt

SEQ ID NO: 25665 - DNA, 1335 bp, Zea mays
  Clone ID: LIB3957-019-B5_FLI
gttgcggccttgctggcacggggatagatcttctccactccaatggcgggcttctcacggccgaacaactcgctcctcctcaagatgcctgcgactttggccagtagccacaccccgaacctctcaagcctcctgttctacgaccagaaccatggccaagctgtaaatgcaaatgcagcagcgatgacgatggtggaggacgacgcctcactccagagctcatctgcagtgctcgacacctccccgcagccacagggcagtgctgctgctgcgtctccgatggagaggaagaggaagcctgcagaagacagtgctacactcagctctgctcaatccaaggaggattgcaagcagcagcaggagagcaagagcaggcggggaaagaggccccacaacaaggaggctaatactgaggagaagagcgctactgaagacgaggccaccagggggtacatccatgtgagggcgaggaggggtcaggcaacggacagccacagccttgcagagagggtaaggagagagaggatcagtgagaggatgaggatgctgcaagcactggtccctggttgtgacaaggttactggaaaggccctgattctggatgagattatcaactatgtgcagtccctgcagaaccaagttgagttcctttccatgaggattgcctccatgagcccagtgctatatgggttcggactggatagtgatggcctccatgaccacgcacaaaagatgggagtcatgttccaggaagcccttgcaatggcaggtccagtgctgagccaagccagcccagcagctccatctgaagccatcatggacaccaccacaccttactcactgcatggccatggccagggttccatctctttttcccaggacaatggcagcagcacttacctgatgcagcatcagcaagcagcgggggagccaacaagacagcaggagctgctcagccagttggtgttcaacaacatgtgctctttccagtaggggtggggagcatttgggtgagaggaagcgaggaatggaccccacattgacaataggaaggaaataatgctgcgagatttggtaggagcatgcacgtaccagatgagtttgagatgttggatctagtccatccccttgtctggatttggagagagcagtagcaagtagatcgagcctgctgtttgtttacacattttgagagactttgtagtatttgtaactcctttattgggcattgtccatgaggattttctcagcggctgcaccttccatctcaccgtgttgttgtagttcttgagcaatcggttgttagtacatacgagagctattttgttctttgcc

SEQ ID NO: 25666 - DNA, 719 bp, Zea mays
  Clone ID: LIB3957-019-G11_FLI
ctgcctttcccttttctcctcctatccctaacgcagccgccgccgccgctcggctctcccttgccaatgcacacatgcactcgccgccgccgctcgactctcccctcccaatggcaccccgtcgctcaccatcaaatgtttcctcccctacaagtgcaagatcgccaatgaggtgatattgatggcgctgttggtggacccacctgacatcaagagggagatgtagatggagatgcagcccgcaccaccaccatctgctgcggcgtcggcatcgcagacggcgtggccactggattggccggtggacgggcgctcgctcaatcctccatcgccgcccactatatcagtccagtattagagcgctaggtatgctctctatgcctacgatgatttatatgaggatgacttagataaggaggtggatcacatgtcagtttcgagcaaggtgtttggactggaatgcgcacagtctgttactttgatgcaaaacgtatgaattggttggacagagccgccaacgaagtaccatgggtaaggatgtgctggacaatgaaagcctctgtcttgaaataataggatacaagaagcttgcaagtggttttgtgaaggcttttgtgaatcacttgaatcattagttcttttaagaatggttttgtaaagcgttagcaaatatgtgtaaaacacaataagatgtgtggcaaattcagtgaaaaaaaatt

SEQ ID NO: 25667 - DNA, 941 bp, Zea mays
  Clone ID: LIB3957-020-F12_FLI
cgacaatccttcgcagtcccgcaccgcaccgcggccaaggccaatagcctcgcctagcgctcactcgctcgccccactaccaccgcaccacgcgctcccgtttccgccgatccgagcgcgcagatcgcggaagcccagcggctcagagtccagggggagggagctcgcggcggctgaggaaggcgttcaccaccgtcgcggatttcattgaggaagagatggggctctcctttgggaagctgttcagccgcctcttcgccaagaaggagatgaggattctcatggtcgggctcgatgccgccggtaagaccaccatcctctataagctcaagctcggcgagatcgtcaccaccatccccaccattggattcaatgttgaaactgttgagtacaagaacattagcttcaccgtttgggatgttggtggccaggacaagatcaggcccctgtggaggcactactttcagaacacgcagggacttatttttgttgtagacagcaatgatagggaacgtgttgttgaggctagagatgagctccacaggatgctgaatgaggatgagctgcgtgatgccgtgctgcttgtatttgcaaacaaacaagatcttcccaatgctatgaatgctgctgaaattactgacaagcttggtctgcattctcttcgccagcggcactggtacatccagagcacttgtgctacatctggtgaagggttgtatgaggggcttgattggctttccaacaacatcgccaacaagtcttgaagcttttcagcagggctcctagcaagaggaagacgtctgaacaacttatggatgttttttttacattttattacaaagatactccctctgtctcgatttactattccttttgggatagtggttgattcatataatatgtgacgtatgtgtttaatagatgtgtctagattcaccatc

SEQ ID NO: 25668 - DNA, 1359 bp, Zea mays
  Clone ID: LIB3957-021-B11_FLI
gtcagcctagcaattagctcatcgactccagattggagaactcgacaccatgaaggtgctgatcgttgcccttgctctcctggcgctcgctgcgagcgccgcctccagtacaagcggcggctgtggctgccagacaccaccgtttcatctaccgcctccgttctatatgccgcctccgttctatctgccgccgcagcagcagccgcagccatggcaataccccactcaaccaccgcagctaagcccgtgccagcagttcggatcctgcggcgtcggcagcgtcggcagcccgcactggtccgcggctgctggagcagctgccacggctggcatcgcagtggtcttgtttaacctcaagaggtaatctggtggtccgatgcgcgaaagttttgatatgctgctatggcctatatgagaataggcctacatgtatggcctatatgagtcgtgaacacaaacatgaggtataattgagttcttgtctgatcttttgagttgcacctgatcttttgagttcttgtcttggttcgttcttgattcttggacgaggtgggatttggagagccaagggcggcgcggcagcggcggatttctcggtcggactagattgtttccatcgagatggtgggcggcggagggcattcgtcgatggaccaccctggcgccaaggacctcgagcgcggcgagctgcgccgtggcgcgcctgagtttgcggacggcgacgatggagacggggaagaaagccagtacttctcggacgcggaggaccggtcgtggccgtcgcactcgcgccacgactccaccgcctacgaggactacgtctcgctgtgtgtgtccgcccgcgcgagctccgtcgacgccgacgccgatgccgacggcgaggccgtcagacaacactgcaggaagtcgtcgtgcgtgtcagagggctcgctggacgacgttgacctggaggccggactgagcgagatcatcaaggccagccctgagaaggccgaacagaactgtcgcatttgccaccttggcctggagagcacggcggccgagtccggtgccggcatcacgctcgactgctcctgcaagggggacttatcctacgcccacaagcagtgcgccgacacctggttcaagatcagaggcaacaaatgccaatcggtaagcaaattctatcaaacgagatgatgattgttatggctggagaatctcaataccatcgccttttcttttacaatttaataggctggagtagaaatactttctatatgtagatatggatctaattctctaacctcctaacaaacctgctacttctcttatccaaaatcttgtaaatagaattagtgtaagtaattctgcattttt

SEQ ID NO: 25669 - DNA, 587 bp, Zea mays
  Clone ID: LIB3957-021-F4_FLI
caccaagaccgtgaagaagacctccaggcaggtgatcgagaagtactactcccgcatgaccctcgacttccacaccaacaagaaggtgctggaagaggtctcgatcctcccctcgaagcgcctccgcaacaaggttgccggcttcaccacccacctgatgcgccgcatccagcggggccccgtccgtggcatctcgctcaagctgcaggaggaggagcgggagcgccggatggacttcgtcccggagaagtcagcgctcgaggtcgaagagatccgcgtcgacaaggagaccatggagatgctcgcggcactcggcatggccgatctcccgggcgtagagcgccaggctgaggtctccagcgtccccgcctacggccgcccgcagtacggaggtccccgccgtgaccgcgtctaggtttaccgccgatcgcagtggttgcgtcgtggtcgcaccgttactcacagttgttatgttactatgttaaacttgttttagatctgtggtttcttctggcgattaagttttgaacttgtctgttatgctttaaattctatagttggatctgcgtgtgatggacattagagtt

SEQ ID NO: 25670 - DNA, 1187 bp, Zea mays
  Clone ID: LIB3957-022-B4_FLI
gtcttcctctcgcttccaaaggtgatgccttccacggagaggagatcgtgcgaccgtgatggcgacgacgcttgatttcgcccatcttcccacgctcgaacgggtaacagtctccttctgtaacttccaatcgtccatggtggagctaatgagctaaactacaatttggtttattgaatcttgatgcaattgtgcaattgtccatcacgcttatggtccccaatacaagatgtcaatagcgagatggggatagccctccaagcaggattctatgccaggcaccgaccacgcttatggtccccaagccatgatgttagcagtgagacaaggaggatagccttccaaatggtgagggaggcaagggccgaagccatgtcatcgtccaacagcagcaatcggtcaccagcttggcagtgatccagtgccagctgggcgtcctatgggttcaggctgcataacggacagagaggagacactaacaacctccatcacgcttttccctgtaagtatactgttacagtaggctagactagaagaaggcataggccataggattgagagtgtggttccttctttgatgtgatcagatagattagattggattgggtttgctgtaaattattgtttctgaatcatgcattttcttttcatcgtagatcgataagataacaaagtaaagcaagaaaactaagatttgcacctaaaactgttgccagtgttcatctgattgcctgcctaaatttctagttccccttcaaagatatctaaacatatttattccaaatacactattaactttcctttatccatacctattctcagcctacaaagcacagatttaatttaccccttgctatttttggcatgttccctggctatttacaatcattggatcattgccgcgagctacaacttcagtcgaaaacggtccaaaacaggctgatccaagtttgggtgggcataatcctttggctcatggaacatttgctgatctacgctactgggtaaaacatggatccctgcacatcaacaattgtaccagctagaagaccagtagaccaccgtgaataatagatgcaaacgcatgagaacaacacaatgtctcatcttttgttatcaagcctagcattttgtaaccagataccaaacacaatgaatgcatatgtaagtaacccttcagtcctact

SEQ ID NO: 25671 - DNA, 723 bp, Zea mays
  Clone ID: LIB3957-022-E3_FLI
gccgccggcgcctactctcttgtgcgcgtcttcgacgagctcaccgagcggcggctcatcgaaaagagcttgagcaggaaggttgtgcacgtgctgtccggcgtcctgttcatgtcatcttggcccctgttcagcaattcgacagaagcacggtatttcgccgcggttgtcccgttcctgaactccatgaggcttctgatatatggactccgtctctacactgatgaagctctggtaaaatcagtgacacgtgaaggaaaaccagaggaattgctgagaggtccactctattatgtcctggtgctgctgttcagcgttttagtcttctggcgtgagtcccccatcgggatcgtctccttgtcgatgatgagcggtggcgatggtttcgctgacattgttgggaggaggtatggctcagcgaagctgccattcaatcggaagaagagctgggccgggagcatctcgatgttcatttctggtttcctgctgtccgcgatgatgatgctctacttctcaagcctgggttacattgatgttatctgggaagaggcacttggtaagctggcgcttgttgcactagcagcgacagtagtggagtgcgttcctgtgaccgaagttgtagatgacaacatatctgttcctttggccaccatgctggtagcttttctcttgtttagctccaaccgcacaatagttaattaaaatactactagtgcattattt

SEQ ID NO: 25672 - DNA, 810 bp, Zea mays
  Clone ID: LIB3957-022-F3_FLI
ctctgcccgcttttctccatctccacttggtccctctctcgcatggcggcggcggcatcggcgtcgacgccgcagggggtggcggagcggcggggcatcccggcggcggccttcgtcgaggacgtcgaggcctacctccggcaggccgggctcgacgttaactccgccctcgccttcctccaggaaaggttgcaacagtacaaaatagtggagatgaagcttctagcacaacaacgagaccttcaggcaaagattcctgatatagagaagtgtttggatattgtttcaacattacaagctaaaaaggatttgggtgaggcacttatagctgattttgaattatccgaggggatatactcctgtgcgaaaatcgaggatactgactcagtgtgcctgtggttgggtgcaaatgtgatgctggagtactcttgcgatgaggccaatgccctcttgaagaaaaacttggaaaatgctaaggccagcttagaagtccttgttgctgatcttcagttcttgcgagaccagcaaaccatcactcaggttacaattgctcgggtattcaactgggatgtacaccaccggagaagcaaacaggctgtaaaggaaccttaatgagttagatcacgaggtcaaccaatgtgattgggacaaattttttcgtaccttttggtacctctggcagattagtccatcatagcgagctctttgtttgttgatggtttctttgctgtgtaacaatgtatcggtttattctctttaatggtgtgggaacattagtagaagatgaaacattttactgcctttttcccc

SEQ ID NO: 25673 - DNA, 523 bp, Zea mays
  Clone ID: LIB3957-023-A1_FLI
gtgggaagcttcctgcccaacagcctgaagcagcaccagaggcggatgagcgcgcagcagcagctctccccggttccggcactgccagaacctgaagcgcccccacccgtgctcaccgcagccaccccgatctctctggcaggtcctgggaacgggttccatgatgcgccgccaccctccgccgcacctccccagccccacgccagcgccatgaacctgaacgcgacgggcttccccgtggctggctggcccgcaagctcgccgcagcagatggtgtacagggcttcccctgacatcaacgtcagcttgactccccaggagtaggatcgttgggctcgtcgtcgtcttctcttttctttccgtcgcctctacgctgatacattttgggagagagagaggaagtgagctaggatcatgaaaggataggcaatatactgaatgagaatgaactgatctgtaggtggcgccaaccatgactgtggcagttgatttagtcctactcctttttcagttcttgtttctt

SEQ ID NO: 25674 - DNA, 592 bp, Zea mays
  Clone ID: LIB3957-023-A10_FLI
ggcgcgcgagagacagacgcgtatacccaggcggcggttgaggaggaggagaagaagaagaagaagatggcttcctccgcgtacgcctcatggtccaagcggtggatccgtcccgaggtgtacccgctgttcgtgccgatggccgtggccctgggtatctgctcgtaccagcttgtgcgcaacatcacgggcaaccccgaggtgcgggtgaccaaggagaagagggcggccggcgtcctggacaaccacgacgagggcgagaggtacgccatgcacggcctcaggaagttcgtccgcgggaagaagcccgagatcatggcttccatcaactccttcttcgccgaccctcccaaggacgattaagctagattccgtcatggatggatgagtatgttttaccaatcattagctgccgggggcgcgccttgattcgtagccatcgtcggtactttttttttggtttctaaaattctaattctcccatataaatggaacatcatgcatttgtcgtgtgtgcttgcatggctgcgaacgaattcagcatgccttgtgattttcatcacatatttgattaataactgatgactatatg

SEQ ID NO: 25675 - DNA, 1115 bp, Zea mays
  Clone ID: LIB3957-023-A12_FLI
tttctcgtacatcgctctcgctctctctcctgctgtccacgaccgaccaaaggcgccgggcacagactcttcgtcggatccaagagaagctcgcgccctccccgaccatggtctcggcggataccatccgtacggctatcggcgtcatcggcaatggcaccgcccttgtgctcttcctctccccggtgcccaccttcgtgggcatctggaagaagcgtgcggtggagcagtactcgccgatcccgtacgtggcgacgctgctgaactgcatgatgtgggtgctgtacgggctgccgctggtgcacccgcacagcatgctggtggtgaccatcaacggcaccggcatgctcatccagctgacctacgtggcgctcttcatcctctgctccgcgggggcggtgcgccgcagggtcgtgctcctgttcgccgccgaggtcgccttcgtcgtcgccttggccgcgctggtgctcaccctggcgcacacgcacgagcgcaggtccatgctcgtcggcatcgtctccgtcttcttcggcaccggcatgtacgctgcgccgctctcggtcatgaaattggtgatccagacaaagagcgtggaatacatgcccctgttcctgtccctggcctccctcgccaacagcatctgctggaccgcctacgcgctcatccgcttcgacctctacatcaccatccccaacgggctgggcgtgctgttcgcgctgggtcagctgggcctgtacgccatgttctacaagaacaccaagcagatcatggaggcacgcaggcgcaaggccgaccagcagtcaaccatgatggaggtggtcaccgacgcctccgccacgccgcccccgccacccaacaacaacaacggcggcggcggcggcaacggctactgatcgcatgcaacaggaaggacgacgacgatcgaccagcaagcaaaagccacatacatagcgtcgtcgtagcgccccgccgcccaccgaatgcttgttgttccgattccgatctccccaaggggacgatgctccgttgcattctctgcatatcctactaatataacgaaacgaaacaaaacaaaagacagcacaaaagggcttgctgggtttcacatttaccat

SEQ ID NO: 25676 - DNA, 766 bp, Zea mays
  Clone ID: LIB3957-024-A10_FLI
ggccgcgcctcctggcgcatcgtatcctccatcgagcacaaggaggagacgcggggcgcggcggggcacgccgccgccgccagggggtaccgcgcgcgcgtggaggccgagctctccgggatctgcgcggggatcctgcgcctcctcgacgagcgcctcgtgccggcggcggcggccgtggacgccagggtcttctacctcaagatgaagggggactaccaccgctacctcgccgagttcaagaccggcgccgagcgcaaggacgccgcggactccacgctcgccgcctaccaggccgcgcaggacatcgccgtcaaggagctgccgcccacgcatcccatcaggctcggcctcgccctcaacttctccgtcttctactacgagatcctcagctcgccggaccgcgcctgctcgctggccaagcaggccttcgacgaagctatttcagagctggatagtcttggggaagagtcgtacaaggatagcaccctcatcatgcagcttcttcgtgacaacctcaccttgtggacttctgacatgcaggaggatggtggcgatgaaatgcgggatgcaaacaagcctgacgaggagcagtagtagtcgtcatgccatgccatgccatgcttgtacaaggaccattttcgtgtgtcctttccttcaatcgtcgacctttcgttttgttgttatactgctattgtggaaccctgttactgttactgttagtgtatcctattggcaataatcaaatgtggtatggttgactact

SEQ ID NO: 25677 - DNA, 586 bp, Zea mays
  Clone ID: LIB3957-024-B2_FLI
ccgatttccaatttcaaatccttcgatcgcgcagcgccgcccgccctctcgcagctctctccgatggcccgcacgaagcagacggcgaggaagtcaactggcggcaaggcgccgcggaagcagctggccaccaaggcggcgcgcaagtcggctccggccaccggcggcgtgaagaagccgcacaggttccgccccggcaccgtcgctctccgcgagatccgcaagtaccagaagagcacggagctgctcatccggaagctgcccttccagcggctggtgcgtgagatcgcgcaagacttcaagaccgaccttcggttccagtcctccgctgtcgccgcgctgcaggaggccgccgaggcgtatctggtgggtctctttgaggacaccaacctctgcgccatccacgccaagagggtcaccatcatgcccaaggacatccagctcgcgcgccgcatcaggggcgagagggcctgattgctgctctgtcttcctgtttctgtaatgtctgaactaggcgatggactctatcgcttcttgtcctgcaatcgtgtaccgatgttcttggcaaatcaatttggctgttatg

SEQ ID NO: 25678 - DNA, 484 bp, Zea mays
  Clone ID: LIB3957-024-E4_FLI
ggaagtggttgttgatgccacagacaaaggaaacgtggcacgactgatcaatcattcctgcacaccaaactgctatgcaaggattatgagtgttggacatgatgaaagtcgtattgttctaatagcgaagaaaaaagtttgcgctggtgatgagctaacgtatgactacctgttcgatccagacgaggccgatgaacgcaaagtgccatgcctttgtcagactgctaactgccggaagttcatgaattagttcgcttagatgtcagaggatcactgatataattttttcccccttatttacccccgggttttctccctctcgatgattcatttcctggtatatgttagagctcaatttttgcttacattcgtttttagaataagtatagttagagctctcaaaaagtggagcttccattcctgtaaataccacagctgtaatcactagggacagttcatttttcaaataaaacatttttgtgct

SEQ ID NO: 25679 - DNA, 801 bp, Zea mays
  Clone ID: LIB3957-024-E6_FLI
ctcgagtcttcactacgataggttccatagcagaccttgtgtttgcttacaacaccggcatgctgccagaaattcaggcaaccatcaggcctcctgtggtgaagaacatggagaaagctctatggttccagttcaccattggctccttgcctctctatgctgtagtttttgtgggttactgggcttatgggtcctcaacatcaggctacctcctcaacagtgtcacaggcccagtctgggtgaaagcggttgcaaatctgtcggcattttttcagacagtcatagcgctgcacatctttgctagccccatgtatgaattcctggacacaaaatatggaagtgggcgtggtggcccttttgagatccacaacgtggcgttcagagtagcagtcagaggaggctacctgacggtgaacacgctggtggccgcggtgctcccattcctcggcgacttcatgagcctgacgggcgccctcagcaccttcccgctgacgtttgtgctcgcaaatcacatgtacctgatggtgaaggggcctaagctgggtgccatccagaaatcatggcactggctcaatgttcttgggttcactgcgctggctgttgcagcggcggtctccgcaataaggctcatcatgcgtgattccagcacctaccacttcttcgctgatctttgagatcgatcgttttcttttctttttgttggaatgctgagccagagctagtattttttcattttcagagaattattatccatgtatgtaaggatgacgcatatatatattgaatagatgatttaatatc

SEQ ID NO: 25680 - DNA, 1236 bp, Zea mays
  Clone ID: LIB3957-025-A8_FLI
ccagaaactaatccagatagctagcctttgatttctcacttcaatctgacgaagtgcacacctaggcaacaaactcgaacgcgcgcggtagtggagccgagatgcagggaggggcgacggccaagcagcaggcgcgagacggtgaccgcggcgcggcgaagacgccgacgacggaggggaagggcgacgccgccggcgccaaggctagcgccgacgtggcgaagggcgacgccgccgtcgccaaggctgctggggacgacgtcgtcgtagggaagggcgacgcaggcaacaaggccggcgccggggccatgcaccacggcctgtcggccgtggaggcgaaggactcccagaccatcgtcgcgctgcagtcgccggtgaccgtcatgcgccccgtccgcggcgacctcgaggagcacctccccaagccatatctggcgcgagccctggtggcgccggacatctaccaccccgacggcaccgcggccgacgagcacggccaccaccacatgagcgtgttgcagcagcacgtcgccttcttcgaccgcgacgacaacggcatcatctacccttgggagacgtactccggatgccgtgcgcttgggttcaacatgatcctgtctctcttgatcgctcttgtcgtgaacgggaccatgagctatgccacgctgcctgggtggctgccgtcccctctgttcccgatctacgtccacaacatccacaagagcaagcatggcagtgactctgggacctacgacaacgagggcaggttcatgccagtgaacttcgagaacctgttcagcaagtacgcgcgcacttccccggacaggctcacctacagggagctctggtcgatgacggaggggttccgcgacgccttcgacctctacggctggattgcggcgaagctggagtggacgatcctgtacgtgctggcgcgggacgacgaggggtacctgtcgcgggaggccatgcggcgcgtgtacgacggcagcctcttcgagtacgtggagaggcagcgcgcgcagcacgccaagatgtcctagctagagggaagaggatgcgacgtgggcacgtggcctcgatcgcgcgtgaatgaaatggaagccaagtgaacctgtctcggctggtatgtagatagtgagaagggtgtcggccggaaaacaagcagccgtgtgtactactccctcagctcccatcaataacgcagagttcgccggaccggcacctccccatctt

SEQ ID NO: 25681 - DNA, 824 bp, Zea mays
  Clone ID: LIB3957-025-B7_FLI
gtgaaactgagctcaccaagatctgtgatggcatcctcaagcttctcgaatctcaccttgtgccgtcttccaccgctcccgagtccaaggtcttctatctcaagatgaagggtgactactacagataccttgctgagttcaagactggagctgagagaaaggacgctgctgagaacaccatggtggcatacaaggctgcccaggacattgctttggctgagcttgctccaactcaccctattaggcttggactggcactcaacttctcagtgttctactatgagattctcaactcacccgatcgcgcctgcagtcttgcaaagcaggcttttgacgaggccatctcggaactggacaccctgagcgaggagtcctacaaggacagcactttgatcatgcagctccttcgtgataacttgaccctatggacttctgacatctcggaggaccctgcggaagagatcagggaggcgcccaagcacgactcgagcgaggggcagtaaagccggctttacgtgcctagaagctagtacctagtgtttgctgctgtctaatgacactatgcaatgtgatctggaccctggtttcttgggtgcgacgcttgtagcagccgtgttatgattatttgtcgggaaaatttgggggctccccatatgagatgctgccgggcaagacctcggcatcccacctcgtttcaggcgggggacgctggagcgtggtccggttgtgttgggaagccccttaaactgttgtcgcttgcattttaaccttttcatcgccgttcagtggtcctaaatctatggctcgtctcagtggtctagtat

SEQ ID NO: 25682 - DNA, 906 bp, Zea mays
  Clone ID: LIB3957-025-B9_FLI
cgactctctgccctccccgatctcccctgcggcggtgccatgccattccagccccggccgccactactacctcgccgtcgaccgcacccagttcaaaatgaggacactcttggagctcctgggggttgtcgcggatcgccgtggtgggctgccgattgcaacatgtgtttcctcccgtgatgagcttgatgccgtctgtgctgccgtcgcaaacctcccctttgtgtcagcgtcacctctggtagttcacaaacacaatttcacctccttagttgtaacttcctctatgcattttcatttgttctattttctctgaaattttttggtggcttggaagcaatatgccttcatctagtatgttttctctgaaaatatatgacgtttatcaccaacataaatatttttatgaacccataaattgttgcacaaggtcctaacaggtatatgatccttactattatgatgttcttacttcacatcaacctccagatattactaatggtcttctatgtacagtatagtgatcaagctgaagcagagcgtgcatctattcttgagaactttcgtcaagaaacaactcagtggaataaaactgctaaagctaccaatattgccgaaagttctaagcttgaaagtactggctctaaaataagcattatagttgcaacagatgcttgcttgcctcaggcagcgatggcagaggcaccccttatggctcgagtgctgataaactatgagcttcccacaaagaaggtgagctttaactatatttctgtgcatatttgttgcttttagtccattttatgcaaaaagcatgaatctgtgtatgctctctttcttatttgctactccctgtgtcccaaattataaggcattttggctattgtatagatatttttactatgt

SEQ ID NO: 25683 - DNA, 576 bp, Zea mays
  Clone ID: LIB3957-025-E3_FLI
ggcgcgttcgaatccatgggtgccgggctcgccatggcgcctggcgacatcgccttcaagtcgaacttcgctacactggatgagaacactggagttatcatcagcaggagggcagatcggcactttgaagaggaaggccctatactctgtgctgcgttggatgggatgaaacttcggtcgtttcctgagtatgaagtcagagtaagatatgctaccgagcatagatgtggtgtggttgtcaaaggaccaaagctgagtgggaacatttctggaactgatcccttgaaggacaaccgcttgcatctgaaggctgaaccgttggatggctcagaagaagctaaaaacactgcagctgtggtcaatgagctttctatggagattacgcgcatactggtttctcaccccatcaacgcaaagcgtgcagctgaggggaagaacatcgcaaatgttgtgttgctgcgaggttgtggtattcggattgaggtgcctgcctttgaaaccaaacatggacttgcaccttgcatggttgctcctaccaagatcatagctggcctgggactgtcactggggattgat

SEQ ID NO: 25684 - DNA, 998 bp, Zea mays
  Clone ID: LIB3957-025-G3_FLI
gcaaggaagattctagagaagaatggcatggcggcctgtaatccctgccaagtgcccatggaggcacgtttgaagctgagcaagttcagcactgaaccaccgttggacttcacgacatacaggagcgtcgtcgggagcctaaggtacttggttaatacctgtcctgatatagcatttgttgttggctatgttagtcgttttctggaggatccacgtaaggatcacttggctgcggtgaaacatattctgcgctacctggcgggaaccaaaacttgggggttatggtttgagcggaggaagaaagaggaagcaaaactgataggtttcagcgacaatgattttgctggtgatgttgatgctaggaaaagcacaacaggggtaatcttcttcctcaatagcagcccaataatttggcaatccatgaagcaaaaggttgtggcacaatcgagctgtgaagcggaatacatagccgctgcaaacgccgcttgccaagctgtgtggctggctcgggtactggcagaggtgcagggaacaacaacaaaggcaccaatgttaagggtggacaatcagtccgccattgctttaattagaaatccagtacaccatggacaaagcaagcatattcaagttaagtaccattttgtccgggagtctgaagatgaaggcctaatcaatgtgaagttcatcaggagcgaagatcaacttagcgacattctgacaaagccgttgggtaaaaccaagtttctagagctaagatcaaaaatcggcctgattaatgtacaacagctggcacctcaaggtttaggaggagaatgtagaaagtaatccttgggtgccatgtttagcagcttatcttgattagcttaaattaggtatgtgattggaataaggctgattgagagccgttatttagtttccttactaaggtaattcttttccatgtaatagtctatataaatcaagagatatcaatgaaaatgcagtcactcgacagcacc

SEQ ID NO: 25685 - DNA, 852 bp, Zea mays
  Clone ID: LIB3957-025-G4_FLI
gagcggcaggagctctgggcagcgtgcgcacgtggggtacctagctcgctctgctagcctaccatggctgatcaccaccggggtgcgacgggaggtggcgggggctacggcgacctccagcgcgggggcggcatgcacggcgaggcgcagcagcagcagaagcagggcgccatgatgacggcgctcaaggccgcgacggccgcgaccttcggcgggtcgatgctggtgctgtccgggctgatcctggccggcaccgtgatcgcgctcacggtggccacccccgtgctggtgatcttcagcccggtgctggtgccggccgccatcgcgctggcgctcatggcggccgggttcgtcacctccggcggcctcggcgtcgctgcgctgtccgtgttctcctggatgtacaagtacctgacgggcaagcacccgccgggcgccgaccagctggaccacgccaaggcgaggctggcgtccaaggcccgcgacatcaaggatgcagcacagcaccgcatcgaccaggcgcaggggtcttgagagaagaaccacactcgagcggaccgcgcgcgcgacctccttgaaccactgccggcgcggcggcatatggcccttaaaggcggtggctgctgctacgtacgctgccgtagagtctcggtcgccgcgatagctctagctagtcgtttatgtgttgtgctttgtgtgtgcatgcttgtgtctgggggcatgcagtgcagtgcagtactatatgctgtatgcgtctctctttgatcggagaggcggatgtacagcatgctcgatatgtctagtttggatgtcatgtttatgatgaggaataaaatgcagtgttcaggtgag

SEQ ID NO: 25686 - DNA, 767 bp, Zea mays
  Clone ID: LIB3957-025-G6_FLI
agccccttaaccctcgttcctctagccgtctcgcgcagccacagcctccatttctcctccgacggcggtgcggctagctcaaccatggcggactccaaggccacctcggcggtcaccctccgcactcgcaagttcatgaccaaccgcctgctggcccgcaaacaatttgtgcttgaggttatccaccccggccgcgccaacgtctccaaggcggagttgaaggagaggcttgccaagatgtacgaggtgaaggaccccaacaccatcttcgtcttcaagttccgcacccacttcggtggaggcaagtccactggcttcggcctcatctacgataacctcgagtctgccaagaagttcgagcccaaataccgcctcatcaggaatggtcttgctactaaggttgagaagtcccgcaagcaaatgaaagagcggaagaacagggccaagaagatccgtggtgtcaagaagaccaaggctggtgacgccaagaagaagtaaacagtcatttatatttctgtattactgtcctgaactctgggtggtcgtctagttgcaatgtcataattatggtcgtgttaggttttgttccgcactcagcagtaagtgaagttttgtaattcctggatgtgaacctacccggattggctgtagcatgttgtgagatgagaaggctattttgtcatgcagttgtgtcatttgcaagccaatccattttgtcatgcagttgtcatttgctcacctctgatccatatcagctttgatcgtgc

SEQ ID NO: 25687 - DNA, 421 bp, Zea mays
  Clone ID: LIB3957-026-E7_FLI
gcgctcatcccacatcagtagtcgaccaagcacaagcagcagagccggccggaatatgtggacgatcaggaaggtggcgacgccgcaggtggccgtcctcctgctgctcctcatcgtcgttgcgcaggaggcggcgccgttggcggaggcgcgcgtgtgccggcgccggagcgcgggcttcaagggggtctgcatgtccgaccacaactgcgcgcaggtgtgcttgcaggagggctacggcggcggcaactgcgacggcatcatgcgccagtgcaagtgcatcagggagtgctagctagctaggctctaggatctagcaagctagctatatcggcctttaattaaattaataaggatcgacgtcgtggccggtcgctaaatatgtactactatacgtctacactacatgcaataatgcacc

SEQ ID NO: 25688 - DNA, 278 bp, Zea mays
  Clone ID: LIB3957-026-G5_FLI
gcccgcgcagaagagaggataggatgtgatattacacgctgtttctcgatgtagcgggatgctcatcaccctagttttgaggggtattatggtttaggggcgctcaagttggtcagatttcgagtgtttttggcccctaagcgaccggtacttattatttggttgaaacaatcagccttaggtttgtgttctatattctcatgctgtaccgtttggtagcgagttacgtcgtacgatatgcttgttccatcatgtttttctattccttttaacgtaag

SEQ ID NO: 25689 - DNA, 717 bp, Zea mays
  Clone ID: LIB3957-026-G8_FLI
gagaaaacccagccgccgccgcatcggcctcccaggtaagcagtagcgtccaccccagccgccgccatgaagcgcaacccccgcgtcacgagctcccgccggaagtgccgcaaggcgcacttcacggccccgtcctccgtccgccgcgtgctcatgtccgcggcgctatcgacggagctccgccacaagtacaatgtgcgttccatcccgatccgcaaggacgacgaggtgcaggtcgtgcgcggcacctacaagggccgtgagggcaaagtggtgcaggtgtaccgccgtcgctgggtcatccacgttgagcggatcacccgcgagaaggtgaacggctccaccgtgaacgtgggcatccacccttccaaggtcatggttacaaagctgaagcttgacaaggaccgcaaggcgctcctcgaccgcaaggcccggggccgcgccgccgacaaggctaagggcaagtttactgccgacgacgtcgccgccgctgctggtggcgccgccgccactggcgcgtctctccaggagatcgactaggcgcttcgcggggatctgatggtggtcctaccgcctattactccttatcgctctagtttttgctatcaatgattatgtgctaggagttttatgttacttataaactgctttgagcctcgatgggagttgaacttaatgtggagtgtatctgagatatgaagaactcattatatggct

SEQ ID NO: 25690 - DNA, 725 bp, Zea mays
  Clone ID: LIB3957-026-H3_FLI
gctggagtatgctcttgcattcacaagtgctgccctggatagacactatagcaaatggagcgcaactccaaaaacaggctttattgacattactacttcaaaggatttctatcgcatttttagcggtcttcagtatagttacttagaagatagcattaacaatccttcgaagaaacaagaaatgctgggtgattctgtagcctgggctggctgtacgataatgtacttactgggacagcagcagcacttcgagctttttgatttctcctatcaatttctcaatgtggcagaagtagaaagtgcgacagtatcacactatcaatcttcagagaggactaaaagttcaaatttcttgcaaggctacgagggcatcctggaagcgatgaggaaggctaggaggctcaataaccatgttttctccatgttgagggcacgatgcccccttgaggacaaggttgcatgtgctatcaagccaagtggggcaccgcttcaccggatgaagtttatgaacaccgtttctgcattcgagacattgccacaaagagtcacctaaccagcttccaggcaatgtgcagaatgtactcttgtatgcggggttatatgttatgttgtaaggtaaatgtatattatgtaacaaccatcaaccgtggatcctggacctgaacaggagaatgtgtttgcttgctatatgtgaaaattaggtgggtatgttgaagttgaccctg

SEQ ID NO: 25691 - DNA, 841 bp, Zea mays
  Clone ID: LIB3958-001-B2_FLI
cgaattccctgcgattcctctcccctcgcctcctcgtctccccctaggggatcgtcggagaggaatcgcaaagagggccgtctcatccgagttaaggaagccatggagcacaaggaggctgggtgccaggcccccgagggacccatcctctgcatcaataactgtggcttcttcggcagcgcggcgaccatgaacatgtgctccaagtgccacaaggagatgataacgaagcaggatcaggccaagctggctgcctcctctatcgacagcatcgtgaacggcagcgacgccgtcatggagccggttgttgctggcagcaacacggtagtagctgttgcccaagttgagttgcaaacaatgaacgtgcagcagcccgctgatgttgccggacccagcgagggggtggcggcgatctccaaaggggggaaggtagggccgaaccggtgcagcgcctgcaggaagagggttggacttacgggattcaactgccggtgtgggaacttgtactgcgcactccaccgctactccgacaagcacgactgcaagttcgactaccggactgctgccagggacgccattgccaaggctaatccggtggtgaaggcagacaagctcgacaagatctagggggggttccctacggttgggtatcaggaagattgtaaaccgcggtaactcgtcatgcggaactgctgccttgccccccgcgcctttctcttccatgtttgctgctacaatcttgttgttgggcattgcagtgcacggtgcacacttgtgtagcccgcctcgagaattcctgcctctgcatctggtcagttctaaaatgatttgcatgttggct

SEQ ID NO: 25692 - DNA, 204 bp, Zea mays
  Clone ID: LIB3958-002-H3_FLI
gcactagcgtggcataatcgcccgttatatgtggcaacagcttggtgtgtgacaggaggaaatgctgccagttccatggttggcaacatctgtaagggtacaaatgatagtagaagaaaggaaaaccgtaatggacccatggagtagcaggaagaataaccatgtcatgagcaaatcgatcaagtaataaaatgcactgatgac

SEQ ID NO: 25693 - DNA, 788 bp, Zea mays
  Clone ID: LIB3958-003-D11_FLI
tgccagtattccacagttcctcccaccagttacttcaatgggcttcgaacatccagccgtgcaagcctacaggctacaactagcgcttgcggcgagcgccttacaacaaccaattgcccaattgcaacaacaatccttggcacatctaaccctacaaaccattgcaacgcaacaacaacaacaacagtttctgccatcactgagccacctagccgtggtgaaccctgtcacctacttgcaacagcagctgcttgcatccaacccacttgctctggcgaacgtagctgcataccagcaacaacaacagctgcaacagtttatgccagtgctcagtcaactagccatggtgaaccctgccgtctacctacaactactttcatctagcccgctcgcggtgggcaatgcacctacgtacctacaacaacagttgctgcaacaaattgtaccagctctgactcagctagctgtggcaaaccctgctgcctacttacaacagttgcttccattcaaccaactggctgtgtcaaactctgctgcgtacctacaacagcgacaacagttacttaatccattggcagtggctaacccattggtcgctaccttcctgcagcagcaacaacaattgctgccatacaaccagttctctttgatgaaccctgccttgcagcaacccatcgttggaggtgccatcttttagattacatatgagatgtactcgacaatggtgccctcataccgacatgtgtttcctagaaataatcaatatattgattgagatttatctcgat

SEQ ID NO: 25694 - DNA, 1148 bp, Zea mays
  Clone ID: LIB3958-003-E10_FLI
ggggaatgcagccgccgcagcaatacccgccggcgcccggctcctggggcggggtcgcgggggccagggccggcgccaccaccgtggatgaggcgtccatggaacgcagcaagagcttcatcaaggccctgcaggagctcaagaacctgcgcccgcagctctacaccgcctccgagtactgcgagaagtcctacctccacagcgagcagaagcagaaggtgctggacaacctgaaagactatgccttacgagctgtcgtcaacgcggttgatcatctgggtactgttgcatacaaactgaccgatcttttcgagcagcaagcttccgaggtgtcaacatatgaactgaaagtcgcacgcctgaaccagcaaatcttcacatgccaggtctacacagacaaagaaggcctcaggcagcagcagatgatgggagcaaacatcaagcaccacaagcactacatcctaccccccactggttataaaagatccctggcaaatggacacctgcaagcggacactgatcaggaatccaagcctagaccttacccctccgcaaaaaccctttcctggcatctgtcttcggagaacagcaccaaagcaaacgcacataagcctacatttgccctagtggacacggcaccatcaaaaccttcatcaggtaaggagcggtctgcttctcctatgcgcaggccgctgcagttcaacaggagcaccagttctgatactacgcagaaggttggcgctaagaacatatctggtgtaaaggaactttcaacattccattccttcgacaaccccaaaggtcgtgcgatccaaaaggcccctgttggcactaaaagcatgctggcggctctcttcatcagacacaaatcgtccaaggcgaaaaggatcgcagttcgctgacgagcgggggggtgggtggccgacagcactgtaaatttcattccgtggaggaccggaagcctgttaattgtacatctggcctatcgttatgtgttggggcagagtctgtagccgtatttcatttcagaatatgacatcttgcaggtgaccgaaatgtaatgatttcgcataagctcatcttcgtcgtgtaattctgccttggcattcggcataaataaatgcatcttagaaatagcctttcagagt

SEQ ID NO: 25695 - DNA, 786 bp, Zea mays
  Clone ID: LIB3958-004-C12_FLI
ggtgacacgggtggctgcgacggcgaatcagatccctacccgtggcgttggtcgtgaattggcgccgtctccccctgccagccggattccctgctttgttctcaggcaacattttgttcactagtgtggtagctttgttgattggagtgcgcaatgggaggctgtgcgggaaaggtacgtcgtgatgacgaagaaaagcttgattttaaaggtggaaatgttcatattataacaagcaatgagggctgggaccagaagattgcagaagcaaacagagatgggaaaactgttgttgcaaatttcagcgcttcctggtgtgggccatgccgtgtcattgctcctgtctatgctgaaatgtcaaagacttatcctcaactcatgttcttgacaatagacgttgatgacctgatggacttcagctcttcatgggacatccgtgcaaccccgacattcttcttcctcaagaacgggcagcagatcgacaagctcgtgggcgcgaacaaacctgagctcgagaagaaagtgctagcagccgctgatgccagtacgtcctagtgacacaagtggaagtgggcaaacgatctgtgatggcttcccggtgtatagtttccatggttcatttgtgtgcttgtcccatgtttgcctggggacgatgacgttttacaattttggcccccatcgcgcgcactcgtctgtttctctcatggaagccgtgtgaacctgtgcgtgtgtgtgacgaatgaacggaactttatatggaccagtgcttaagagtctttgcaacat

SEQ ID NO: 25696 - DNA, 328 bp, Zea mays
  Clone ID: LIB3958-004-C8_FLI
ctgcttatttgcagcagcaaatactactaccatttagccagctagctgcagcaaaccgtgcttccttcttgacacagcaacagttgctgcctttctaccagcagtttgcggctaaccccgcaaccctcttacaactacaacaattgttgccctttgtccaacttgctttgacagaccgagcggcctcctaccaacaacacatcattggtggtgccctcttttagattgcttattagttgtaattcaataataaagttttctggaaatgtaacttcttatttctggttggccacatacatcatccaaaaataagaagttacatttccag

SEQ ID NO: 25697 - DNA, 1248 bp, Zea mays
  Clone ID: LIB3958-004-H10_FLI
cgctggccgactacaacattcagaaggagagcaccctccacttggtgctgcgtctcaggggtggcatgcagatcttcgtgaagacacttactggcaagacgatcacccttgaggtggagtcctcggacaccatcgacaatgtcaaggctaagatccaggacaaggaaggcattccaccagaccagcagcggctcatctttgctggcaagcagctggaggatggccgtacccttgcggattacaacatccagaaggagagcaccctccacttggtgctgcgtctcaggggcggcatgcagatcttcgtgaagacacttactggcaagacaatcacccttgaggtggagtcctcggacaccattgacaacgtcaaggccaagatccaggacaaggagggcatcccaccggaccaacagcgcctgatcttcgccggcaagcagctggaggatggtcgcactcttgcggattacaacatccagaaggagagcaccctccacctggtgctccgcctcaggggtggcatgcagatctttgtgaagacattgactggcaagaccatcaccttggaggtggagtcgtctgacacaatcgataatgtcaaagccaagatccaggacaaggagggcattccaccggaccagcagcgcctgatctttgctggcaagcagctggaggatggccgtaccctcgccgactacaacatccagaaggagagcaccctccacctggtgctccgcttgcgaggtggtatgcagatctttgtgaagaccttgactggcaagaccataaccctggaggttgagagctccgacaccatcgacaacgtgaaggcgaagatccaggacaaagagggcatccccccagaccagcagcgtctgatcttcgctggcaagcagctggaggatggccgcaccctagcagactacaacatccagaaggagagcactctccacctggtgctccgcctccgcggtggtcagtaagccatgggtcatttaagctgctgctgtacctgggtatctgcgtcgtctggtgccctctggtgtacctctatatggatgtcgtcgtctaataaacatctgtggtttgtgtgtcatgaatcgtggttgtggcttcgttggtttaatggacctgttgtgtcctctgtgtgttgtacccaaaactcttctgcagcagtatggctcgaatccttatgaagtttgatgtttgaacttaaaagtctgctcagtatgtttttttttcctggtt

SEQ ID NO: 25698 - DNA, 1679 bp, Zea mays
  Clone ID: LIB3958-005-D5_FLI
ctttttaagtggcctttttttggtaactcagtctgtaggggttcaatttaccgtggattaggacttatggtggctgcatctccctgtgcattggctgtagctccattggcatatgcaactgcaatcagttctcttgctagtaagggaattttgttgaaaggtggccatgtcttggatgctctttcgtcttgtcagtctattgcttttgataagacaggcacactaacaactgggaagcttatgtgcaaagcaattgagcctatccatggacatttgggtgtgaaaagtggtcgtagtaatccttcttgctgcactccaaactgtgaaagtgaggcattagctgttgctgcagccatggagaaaggaacaacccatcctattggaagggctgttttagaccactctgttggaaaggagcttccagttgtcgctgtagaaagttttgaatgcctacctggtaggggagttgttgctactttgagtggtgtaaaggtaagggaaaatgaaaatgagctatccgaggcatctatcggttctgtggattatatttcttcactatatagatccaatggtgaatcagagcaaataagagcagcagcaaaaagttctgcatatgggcctgaatttgttcaagctgctctatctgttgacaaaaaagttactcttttccactttgaggatgaaccccgctctggtgtttgtgaagttatatccaccttaagagagaaagctaaacttcgcattatgatgctaactggagaccatgaatcaagtgcccagagagttgctaaagctgtttgtattgaagaagtccacttctctttaaagccagaggataaattaaataaagtgaaagcagtttcaagggaaggaggtggaggtttaataatggtcggtgatggtataaatgatgcaccagcccttgcagccgcaacagttggaatggttctagcccaacgtgccagtgcaactgcagtggctgttgcagatgttctgctgttgcaggataatatttgtggggtgccattctgcattgctaaggctcgtcaaacaacttcattggtcaaacaaagtgtagctctggccttaacttgtattgtttttgctgcgcttccttctgtcctgggatttcttcctctttggttgactgtacttcttcacgaaggaggaacccttctagtgtgcttgaactcgatacgagccctgaacactccgacatggtccttggtagatgacatccggaagctcgtcgatagcttaaggaattatttcccatccaagttcaacagctctccctcaagctacaccgcaaacactgctcccttgtagattaccatgtccagcaacggccgtctttggttaaccttgttgtttctgtggcaccgtttgaatttaggcgaggggttctaacctaattttgtaggcgcccgctgtactcttttcaccaccatgtaaagaaagaaacttggcttgaggttgagctgaaggtcaaaggacagtgatgaaacatccagttacgacgtggcgcagaatcaacgtctgtgtctgttgggcccgttcgttatgtggaatacaatacatacaggtgctatacgactgttgagatcagggaagtctaatcgcctgtttcttgcttgcagaagctaggctctgctgctgagattgattgattggtttat

SEQ ID NO: 25699 - DNA, 928 bp, Zea mays
  Clone ID: LIB3958-005-G5_FLI
gcttcgcagtttgccgtcggccacaccgcatcgagcgccgccgccactcgccctcccctgccatctctcgccggccgccgcctcccgcccaccggccaccgcagcgtgttatatttcagcccctcttgatcggccacccgaaacccgcaggagagaggctaaggaacgatggggtggaaggcggcagagaagctcatcaggcactggaaggtcctgcgtggtgacaacgtgatgatcataagaggcaaagacaagggggagtccgggctcatcaagcgggtcattcggtcgcagaatcgcgtcatcgtcgagggcaagaacttggtcaagaaacacattaagcaaggggaagggcacacaggtggtattttctcggtcgaagccccacttcatgtctcaaatgtccaggtggttgatccagtcactgggaaaccatgtaagattggatacaagtatctggaagatgggaccaaagtcaggtacgctagaggaatgtacgcatcgggcgttgtgataccccggccagaaattctgaaggagagaaggaaaccgaggcccacgtcacctggcccgaaggacacaccaatcgagctggcgcaggagaagacctacgatgaaaaggctgggatcggtatgcccgatctatagctgcggagagttcactgtaatgtgaccaggacctgacgccctgtgctgtgctgtgctgtgcttcccgcgtaataacggtgtactagttaccttcttctgcagaaaatgctttctaggaatgagagcggaaatatttgtaccatttatttaaggtcctgtttggaaacaacccaacagtttttaagacaccagtttttatcttttagctttgagagaccaacttcttgtttttatgaaagtgggaatcaaatttctataaactgagccataaactggtgat

SEQ ID NO: 25700 - DNA, 269 bp, Zea mays
  Clone ID: LIB3958-006-B7_FLI
cgccgaggccgtcgacaagcactacaacttcgagtagccgccgccgccgccatgtttggattgcttcctctagcttcctaccatgtgcttgtagacttgctgtgctcttatacacctatgctccattccagagttaaacagcgtaaaataaagctccggattagcggactacacaattcacaccaacgttctgtcaggcgtttttcctgttatgacaagtggaacttgtacatgttagtatgtgattcatgccctcaaggcctcaaact

SEQ ID NO: 25701 - DNA, 527 bp, Zea mays
  Clone ID: LIB3958-006-C8_FLI
gctcggccgtgaggccagccacgtcataccgctctggacggaatggagaaggcgcggcaggagtagctgctcctggcggcacgggatctaaggctgatgaatgggagaaggcaaagcttggaagagttagagaggagtatgagaagatgatggagaccatagccgaatgggaaactgagaagaaggtgaaggcgagatgccaaaaagagcagaaagagaccgagctggacagaaagagagaaaaggcactagaagaatacaacctggagatgacaaggatcagcaaaatctctggaggagcaagggcaatggcggaggagcgaaaatacaacgatgggaaaaagatcagagagaaggcgcgcaagatgcgatccacaggaaagcctcaccgcacgtgtgcttgcttttgagaacagctgcatacgctgaaatttggaaccaaaaccaaatgaaggacgtcattttggacggttgtaaaaggcacgcaatagtgacgttctgtatggtaatatgtatttggctttgac

SEQ ID NO: 25702 - DNA, 901 bp, Zea mays
  Clone ID: LIB3958-006-F11_FLI
gagaagagcggcggcgcgggcggacaaggagcaggcggaggaggagctgtgccaagccacaatgggtatctcacgcgactcgatgcacaagcgccgtgccaccggtggaaagcagaaggcctggaggaagaagcgaaagtatgagcttggtcgccagccggccaacaccaagttgtcaagcaataagacagtgaggagggtccgtgttcgtggaggtaacgtgaagtggagggctcttcgccttgatactggtaactactcatggggaagtgaagctgttacccgcaagacccgtatcctcgacgtggtctacaatgcatcaaacaatgagcttgtgaggacacaaacccttgtgaagagtgccattgtgcaagttgatgctgccccattcaagcagtggtacctcactcactatggagttgacattggtaggaagaagaaaacccctgctgcaaagaaggataatgctgagggacaagaggttgaggcagcagctgaggaaacgaaaaagagcaaccatgtcacgaggaagcttgagaagcgcaaggagggacgtacccttgacccacacattgaggagcaatttggcagtggacggttgctggcatgcatttcttcccgccctggacagtgtggccgagctgatgggtacatccttgagggtaaagagcttgagttctacatgaagaagctacagaggaagaagggcaagagcgctgtagcttagagcattctcatggattgtcttgcaccgaaatgtgtgtcctgatgagtacacttttttttggttagtcgtctcaagttcagagcgttatgccatgttttcagacctgattagtacactgttttctaaaagcgattgagctctagtccaatgtattgataatatctgctgttgtcc

SEQ ID NO: 25703 - DNA, 798 bp, Zea mays
  Clone ID: LIB3958-007-B3_FLI
cgggcgccttgccataaaagcacagcgcttctacacccgccgccgccactcgttgcagcctctctacctctacctactggagtagggagcacgccgcacgagccctttccgccgccgccaaaatggtgaacgttcctaagaccaagaagacctactgcaagaacaaggagtgcaagaagcacactctccacaaggttactcagtacaagaagggtaaggatagcctgtctgcccagggaaagcgccgttatgaccgcaagcagtcaggatatggtggccagaccaagcctgtcttccacaagaaggccaagaccaccaagaaaatcgtattgaagctgcagtgccagagctgcaagcactactcacagcacgcaattaagaggtgcaagcattttgagattggtggagacaagaagggcaagggaacatctctcttctaagtttctcatcgcccatctcgatgttggatcgaacctgtgggtctactactgttctaaaaactcgtcaaatttcaatgttactagtagttctgaaagcaggtcatgctgtgtatcaaattccaatgcctgacatttgcgctgagtgtgggttgtcttttggctaaatgaagttttgcaccctgaatcttcattgaatgtgttgtgtgtttgtttgattttgttctgcgattgccttagtctaaagcttgatcacaccgaggatggtttatgtaatgtaactggctgaatggaatcccacagttcgctcactgaattgttggagatgatattgcatatgaaataaatccatcgattttgt

SEQ ID NO: 25704 - DNA, 1728 bp, Zea mays
  Clone ID: LIB3958-007-B9_FLI
cacaaaagctgagaagacggggggtcacacatcatacttcttttgccattgcaatggaaaacaactacgcatgcccaccacccagcaagggaaacctgatcacagtcttgagcatcgatggtggtggggtcaagggcgtcatccctgctaccttccttgcattccttgagtctaaactccaggagcttgatgggagcagcgcgcgcatagctaactactttgatgtcatcgctggcacaagcacaggtggtcttattgctgcaatgctggcagctccgtcgctgagcaatgccaagcaaccatgctatgaggccaaggacatcgtgccattctacctcgagcacagtcctcgcatcttcccatgcaggtttgtatggctagctgtttaacgaatatctgtacgatttcccatctgagactgctcagttttatctatctctaaattgtttatgtacaaggtaaccagaatttcgcgttttgtctcagtatgtatgtattactatatctataaaactacatggaaaaaaaaatacttcaccttgttattcgttctgatgctgcaagaccagaactgggattttgggctggttcttcaagatcctacaaacagttaaggtgatgatcaggccaaaatatgacgggaagtacctgcacaaagtgaccagtgatctgctgggtggtaccagagtggaagagacgctgacaaatgtcgtcattcctactttcgatgtcaagtgcgtaaagccaacaatattcagcacattcaaggcaagatctagtgccttgatgaatgctcgtcttgctgatgtgtgcattggcacgtccgcagcaccgacggtcctccctgcgcactactttgaaaccgtggatcaccgcactggcgcatcgcgtagcttcaacgttatcgacgggggcctcgccgcaaacaatccgactctggtggcgatgggtgagataacagaacagatgaggcagaagagcaaggagttccccgagaccaagcccctggactaccacaggtatctggtagtgtcactaggcacaggccttccagagcaggacatcaagttcgacgcgtgccgtgtcgccaagtggggcatcttcggatggctcggccgccgggagaacaccgtgcccttgctgcagatgttcatgcacgcgagctcagacatgacggacagctacgtcgccgaccttttcaaagcgatcgggtgctcggaccaactgctgctgcgtgttcaggaccgcaacatacccatagcggctgtggcagctgacctctcgacggagaagaatctgcgagggctggttaagattgcagagaaccttctgcataagccactaggcgaggacgattataagaccgacgaccgcgtcgagacgacgccgagagatggccgtgccatactaacctatgctggtatgctcgcacggtttgcaaagctcctttctgatgagaggaagcttaggcttcagaacatgggacactgtatgccggtcatagcaaatcgtgaagcttgagaggtcttccgaaacacatattgatacatccatcttataggagttagagagttcgttcgtgtaggctatctgcaagctgttgtgtgtgtattgcaagttgtgacgacgacgtgagtgtgtacgtaaatggataaggcgatatggtttgctttggagccctgtacgtaaatggagaaaatgtgatgccctggcgtctggttgtctagc

SEQ ID NO: 25705 - DNA, 823 bp, Zea mays; identical to SEQ ID NO: 21695
  Clone ID: LIB3958-009-A12_FLI

SEQ ID NO: 25706 - DNA, 993 bp, Zea mays
  Clone ID: LIB3958-009-A2_FLI
atggaatgaaaacagaacagaattacgtctgttgccggcccacagaccataggattgtgggcttgtggctgccactcaccacggcccatttagtcgtaaccctagcaggccgccacgaccacgaggtgcatccatgagaggagatcgaaggaaactccaattccagtcgcccccatccgttgctcatctcaccagaagcgaagccggaggagggaggaaggagatcacgagcagccggagccggaggccgagaggatgaagacgttcgacccgtggccggtcttcttccaccgggagtggaagcgcaactgtcccttcctcacggggttcaccatcaccggcttcatcatcaccaagatgacagccaacttcaccgaggaggacctcaagaactccaagtttgtccaggaacacaagaagcgctgaccaaccggaaacatttttagtctattagctcagcgggagctctcacctcgaacaaaaaaccaagcaaaaaatctttggaccaaacctccaagacttgatgcttgtcctattgaatcgaaattttggggcacctatgctcagcatgatctcctttcttgggctgaagcagagttcttgcattggtggattcccaaagattgccctctcacgccttcttcgaaggcaactgttgcagctgcatttagtacagatgggagagtacttgcatctacacagtagtggtgaccatactgtcaaaataattgattggcaaactgggaaatgcttgaatgtactgcttggacatcaccgcactccatgggtggaagaggagctggaagcaaggatcagattgcttgaagtgtgaaaaaacgattactcgcatgcatggtagctattggcgtaacacccaaccggtggagagaatttagtttgctagatgaatcgttatacttttgcatgtaatagaactgaaatatcacttcaaaatttaggaaacatgtatgctattatttttatatgtccatc

SEQ ID NO: 25707 - DNA, 1786 bp, Zea mays
  Clone ID: LIB3958-010-B3_FLI
cgcatgcatccagtgctggccagccggtgagcactgccgctcgccgcatcaggtagtagggcgctagctagccatggctcgcgtcgccgccatggtggtggtgatggtgctcctccagcagttggcctcctcgtactcgtacaccgtcgcggcccacgccgatgctgctggcgtgcttggccgcaaggcgggcgtcgtcgtcgacgagactccggtggagaaatcgccggctgggccggggaggtacgcagtcatcttcgacgccggcagtacggggagtcgggtgtacatcttccggttcggcaggcagatggacctcctccgcatcggcgacgagatcgaattttttgccaagttgaagccaggtctgagctcgtatgctgggcgaccccaggaggccgcaaagtccattctgcctcttctcgagaaggccaagagcattgtcccctcatggcttatgaaaagaacccctgttaagcttggagcgactgctggattacgccttatcggaaaccaacaagcagacgaaatcctcgatgcggtcagagacctggtccacaagaagagcaaattccagtacaagcccaactggatcaatgttcttgaggggtctcaggaagcatcctacctatgggtcgctctgaattacttgctggataaactgggaggggagtattcccagacggtaggcgtgattgatttgggtggcgggtcggtgcaaatggcgtacgctgtctccgcaaacgctgctgcgagagctcccgcggtgcctgacggcgaggatccctacattaccaaggagtattttaaagggaaacagtacaatgtatacgttcacagctacttgcggtatggttcctttgcatcgcgagcggagattctgaagtccaagaacggaccattcagctcctgcatgctgcgcggatttagtggtaaatatacctacaacggacagcagttcgatgcgactgctagaccagaaggagcattgtatgacaaatgcaggggagagattgccaaggcgatgaatctcaaggcaccgtgcaaggcaaagaactgcaccttcggtggtgtgtggaatgggggaggtggagctggccaaaacgacatctacgtcgcgtcaggtttctactaccttgcctcacatgttggattcatagatagcaaagctccgagcgctaaggccgctcctgccgcattcagggtcgcggctaagaaggcctgcaaattcgatgtcaacagagcaaaagtggcctacccagatgtttctgacagtgatgtgccctacttgtgtatggatcttacttacacgtacacattgctagttgacggcttcggtctgcagccaatgaaaaagattacatttgtatccaaggtgaagcatggcgaatactacatcgaagccacatggcctttgggtacggctattgaggccgtgtcaccgacaaagcagatcggaaactaatgggctgctgctcgcactgaactgaactctggatttagcgcatgttatcatggtttcagttagcgctcctgacctataatatttgactctcaaataatttctgtactgctgctcggcagcgtgcatgcaaactgagcattttcgagtcagcctctgcgtgtgtgcgggctaattcaactatgaaattcattcgaatttctttccactttcactttggtatcttccgtgcttaccggaatatgtaaacgtttgatgctttgctttaattctgtgacgtgtctcacacaaagctacatattcagccacgtcactctttagtct

SEQ ID NO: 25708 - DNA, 504 bp, Zea mays
  Clone ID: LIB3958-010-B7_FLI
gggcggcagcacagcagcttcctttcctccggcgatggcgaagaatcccaaagatgccgctccggaggaggagatgcccgccgcggccgaggaacaggcagcgcctgcagcgacggtgaaggtgctcttcttcgcccgcgcgcgggacctaacgggcgtggcggattccgcggtggaggtgccgccggggagcaccgcgggggagtgcctcgcgcgggtcctagcccggttccccaagctggaggagatccggggctccgtcgtgctcgcgctcaacgaggagtacgcggccgactcggccgcggtcgccgacggcgacgagctcgctgtcataccgcccatcagtggcggctgacgttattaaccacggccgacttgtgtggaggtgataataaaagatatgaagacatcgatcgttgagaaaaaaaaagagaaaaaaggttcctttcccttcttcatggtcagtttatcaccacgaaagattgaaattattatatgctcgat

SEQ ID NO: 25709 - DNA, 1371 bp, Zea mays
  Clone ID: LIB3958-010-F11_FLI
atcaatctctagatgaaggaatgaaaggaaggagctaagttattgcactggatgtacggggtctagaaaaggtgtcactttgatgccatttattagtgctgttgtacaaaagaaaaggttgaattgatgaattcatgggctaccttataaaataaaactatattgaattcatgtgatcttgtgattttatgtaagactatcctataaataaaaactatgatttcactgtcttctctatgttgtagctagcagtgcaagcatagaacctatgaaacatggatacttggttacaaaattcaactttcagtcaagttttgttcaacaagggtctgattgagacttccatgaaactgatcgatttgtcgttgctgtcatgtatgtgaacttatggtttagaagcagctaagtttccaacatgttacatggtagggaatgtatttgctaacactatttgctagcactacaagttccgtatgccctatgtgatagatggaaagattgaatgaagggctgtcattatttgatgcaatactgattgttccaatgtttcaaattgtttggaccttcttctctatttgtacaggatttgtttactttcaagaatatcaagtaagttcttgtttattataatcggataatgaagtgaatcatgcatttcctaattataaactgatgattctgtttttctgctgtcaggtatttgatacgctcaggataattatgtgtgtgttaggcatgacatttgtctttgttgggatctccttgctagcacccgatgacagtaaagatggttcaagcacctccgaggactccataattgacatagacagaaatggaaagatgccgatggaggagacagacacagatgatagcatctcctttgttacttctgtaaaatctgcatgctccatgtcccttggccttggggagagcaccataagcgcttcatcggtgcttgccatgcttatggtctcgtcaagaacgaacaaccggcttcagaggaatcggaaatgaccgtccaaagtatgcccctttaagaaccactgattggagtaacctatagccgatggtaatatataggtacacaggaaaggtctttgttttttatgttgcctagcgaatggcagtgaagtttttttgttgcttccaaaggcacaactgtttgttgtgatcgtagctagctataacacgagtgtatagttcaccgttgtacccttcaaaacactgtccatacctagctgcatatacatgtgtaagttttagaatacaacaaatttttggaagattaagattagatggagtagcatttgtcagcttttagcttgttgctactgaaatatgagttgaatttgggctattatttttgtgttt

SEQ ID NO: 25710 - DNA, 811 bp, Zea mays
  Clone ID: LIB3958-010-F7_FLI
cccgacgtgcgtgacgcctaaccaagccccgcaccgccccgcccgcccccgcccccgccccgccgcaggagacggggtcggcacggggcgatgaggagcagcgaggccatggagctcctgggcttccctccctactccaggccctccccttccgaggtgaaggctgcgtatagaagaatggtgatggagttccatcctgatcgtgtcccaacgcatctgaaatcgcaggctgagtcaaaattcaaggagatagatgcaaaccattcccgaattgtgtgacgtctgaattggatcgattgcgcaaagtatcgtaacataattcctgagtcctgagcttactctttcctccaccgccattacaaaaccgtctgcttttgcaccttgcagatagcagaagcatattcttgtttgaaggacggaagaagatcagggagtaggatggaaggtgaactagattccatgatggacatgattcacacaatctttgtttgtagctaattacatgtatcatcgttcacgcagttcatgttatgcgttctggtgttccaactagccacggaagatcaaatagaacgttggttaaagccccgtttctactcataatgtttgcagcagtttcttttggcgccttcagcgcatcaagagcgtatcaacggcaaaaggaactgtgttcctctcagaacccatttctaccatagaggaagacggtgggctctgtccatgttcataggcgagaagagcttcttgctacgttgtatacagatgtaaaacaatcacaccatcctgaataaacgtgccaacctgtgccttc

SEQ ID NO: 25711 - DNA, 643 bp, Zea mays
  Clone ID: LIB3958-010-G12_FLI
gccatttgaaccccccacgtctcctcgcctcgttccccatttgctgcgtctccttgcccgcgccgccgctcgccgtttgcccctcgtctccgcaccgcgcgctgttgtccatccttgtgcagcaaaaatgacggctggctacattgttggctcactggtcggatcctttgccattgcatacctgtgtgacacatttatctctgacaagaaggcatttggaggtagcacccccaagactgtttctgagaaggagtggtggcaagccacagacaccaagttccaggcctggcctcgcactgctgggccaccggttgtcatgaaccccatcagccgccagaacttcatcgtcaagtccactgagtaggtttgggctggagaagctggttctgcgacttggtgccgccatgaagccagagttccttttctaaggtcttaatcaattgtaataaaacgaaatacagtcaggatttttttgtgatttttacttgatctgtgagcgaacactgggtctttcaccttgtcatccaatgggttctgctccttggtgaaatctcccaccagccagtaaagaactgggttgttttcataatatatgcttttgctacgcagcctctgctgttgtaaggaattgcattgttatctt

SEQ ID NO: 25712 - DNA, 839 bp, Zea mays
  Clone ID: LIB3958-010-G6_FLI
gttgtatggtccttgatgaacaaacaatacctggggtcatagattgtctgcatgcatgctagatgagaaaaaaatagccagccgggggtgtttggattcacagcagatggttgagaagcgcaatgcgcaaaaactgacataaagcaagcagatgtttggattcacaccctgatcaggcctgatggaaagaagaaggcttacgtgaagcttctcctgtaatttcaagcttttggaggatcatgcttttcttctagattttatcttcagttgtccttcctgaaaatgaaaagccaattactgaaagcggagatgaaatctcttatgaaagagcaaaggcaaaaagtccaatatctttattatcgggactacgaaggagatcaattgactgcatctaaactgtgagatgtgtgcaagattgggtttgttgtatttggagttcctcatagaaaaatcatacatatgctctagagttcctcatagatttggtgctcgcgatctgccatggatttgatttaagatttgggagatcggtcgtgttcgcgctgcgagattcgattttttatgcatgttttattcacgagattgcaagaacgggactgctaggcaagatgagtatacctgaaatttaggtctagaaattcactgctatcagtctcagaataggctaggttgaacttatacatgagatatccacaggtccaggtgcattgtttgaatttgattagaagtgtgtaatgttagttcttataaaaaagcaactcaaaaagggccaaagtttggatgtaccttctgggttattgacgcagatatctttatcactatatgtgcttggtttgctc

SEQ ID NO: 25713 - DNA, 316 bp, Zea mays
  Clone ID: LIB3958-011-A3_FLI
tcttttttatgggcgaagtgtcgaagatggctttggtgaaggaaatgtcttgttagcatcaagtaaatggcgacatcacaacccctacaagcttgtgccttaaaacaagaggatacaagaagttggagtgcttttgtgaaggcttttgcgaatcacttgaagcgttagtacttttgtgaatgattttgtaaagtgtttgcaaatatgtgcaaaacataataacatgtgtaggttttgcgaatgattttgttgtgatgcttgttgatggtttatgtgatgtggatctatcattgtgcaatactaattaaatttgtat

SEQ ID NO: 25714 - DNA, 516 bp, Zea mays
  Clone ID: LIB3958-011-B8_FLI
gttaaaatgacaagaaaagttttccctacttcagttatccacccaaagttggtaataattgtatcacttgtgtggcctatagactattaaggcgctcaatatttgttagagaagttttgccacttgggtaacacaaattttccactgccagtttgcatttcatttctgctactagtattgaaccagcaggtttcctcctgcattgttggataaaaaatccatcgaatatttacaagattgtggctgattattaaatgctgtaatacaccttaattgcttttacggtgtattttgaggagcacatagcaaatcatttgggtcctaaacttggatgtgtcggaataacatttgtacatcacttctagctggtggaaatgattcatcatgagcagaagtttgtagtactgcactggaatgaaacattggcacagcatagcttttgtccagatgtgagttgatacgtggatgctgttatgagcagagcttgtggctatatattacagcatctcttgcatc

SEQ ID NO: 25715 - DNA, 883 bp, Zea mays
  Clone ID: LIB3958-011-F5_FLI
ctcaagacttactagcatttttagtgataagaaattcaaaggttgtctcaactccctcatggatgctgatgcaacaacgagcaacattcaaagatttcttttcagagctgtgtcatatatggacatggaatctggattcctgtcggtagaaagcttcctaaaggccctttcttccatgcagaggcaacctaagatggacagcttacaagatctctcgattttggaattatacattcttgtgtgcatgcacagattagaaagtaaggagcaaacctcatacaacttcaccagcataatgaaagaatacagatccatacaagacgcctataagacttctgataaatatgcaagcaccgtttgttttagggcctttgagcaccttttggatcgtgagctgattagttttggtgacaatagatggagaaaccaggcgcttgaataccgacctgttaagctcctcatatcctcccgcgagctcgctgagtccctcaagctgaacaccacctgccccgctgtactgcagaagctgtttgatcgtgaaagatacatgtagaatctcctttcagatggccgcgcttcacctgacttgagtcgccgctttcatgtttcaccgggttgtcaagttcatgtttcactgtaaaccggcgattgtattagtatcttgtccactgttcgctggaaaaggtgtgggccgtgtggccaactgcccagcgtgagtcgtgacctgcctgtcaatcgcttgagtcttgaccataggccacacggaattagatatctgtggtgcactgattttgggctaacgacccgatttctatctcgcacaagtttagcagcgtggtgacagtattttggtagctttgaaatgaatgcgctattcggagtt

SEQ ID NO: 25716 - DNA, 1072 bp, Zea mays
  Clone ID: LIB3958-012-F4_FLI
ctgctccgtctcgtcgttgtcttcccctttttttcctcagccacctctctccctcgctagagcaaaaaccttgccacgaatcgccgacactccaacccggaagaggcaacgaggtgactccgcgcctcggtcatgggtgacagccaatactccttctcgcttaccactttcagcccgtcgggaaagcttgtgcagatagagcacgcgctcacggctgtcggatccgggcagacctccctagggatcaaagctgccaacggtgtagtgattgccactgagaagaaactgccttctattttggtggatgaaacatctgtgcaaaagattcaggcactaacaccaaatattggagttgtctatagtgggatgggtccagattttcgtgttctggtgagaaaaagtcgaaagcaggcacagcagtattatcggttgtacaaggagcatatacctgtaacacagcttgtgcgagagactgctgctgtgatgcaggagttcacacagtcaggtggtgtaagaccatttggagtatcgctgttgattgctgggtatgatgacaatggcccacagttgtatcaggttgatccctcaggatcatacttctcctggaaggcatcagccatgggaaaaaatgtgtcaaatgcaaagacatttcttgaaaagagatacacagaggatatggagcttgatgatgccatccacactgcaattttgactttgaaagaaggatatgaggggcaaatttcctccaacaacattgaaatcggaattattcgagctgaccgtgagttcaaagttctaagcccatcagagatcaaggatttcttggaagaggtggagtaagttgtctgttgatgatttactgtttcaaacaagaatagcagcatcacttatgagcagccagcctgaagcttgtcttggttttatcactctgtaaactgatttgctccagcgacatgtcttggttttatcactctgtaaactgatttgctccagcgacatgtggttcttacatttgaaaccctcctgagcgcatactgtagacaaatgagatacgtaagatggatgttgtatt

SEQ ID NO: 25717 - DNA, 709 bp, Zea mays
  Clone ID: LIB3958-014-C7_FLI
ccatcctcgaagccctagcgccgccaccctattaatgctcgtctctctcgcgctgagcgctccaatttcctccacttcccaaaccctaccggcggcgcagcagcatcacaaccaccgcccgaagatggtgaagtttctcaagcccggcaaggccgtaatcctcctccagggcaggttcgccggccggaaggcggtgatcgtgcgcgtgttcgaggagggcacccgcgaccgtccctatgggcactgcctcgtcgccggcctggccaagtaccccaagaaggtgatccgcaaggactccgccaagaagacggccaagaagtcccgcgtcaagtgtttcatcaagctcgtcaatttcactcacctcatgcccacccgctacaccctcgacgtcgatttcaaagacgtcgcctcgggcgggcccgacgcgctctccacccgggacaagaaggtcgaagcctgcaaggccgccaaggcgcgcctcgaggagaggttcaagaccggcaagaacaggtggttctttaccaagctccgcttctaggcgccgggcaccccgcatagtgactactttagttgtcaatttgttgtatcggaaaccatttaagctatttctgttttggtattgcgcttgttatggatctcggagaagattttgttaaaaacatgtcgatgatgtgttaaatgatgcccaaaggaaacgtctcgttgaact

SEQ ID NO: 25718 - DNA, 722 bp, Zea mays
  Clone ID: LIB3958-015-A8_FLI
caaagcggcagtgcgtagagaggatcgtcgaacagaacagcatgaagatggtcatcgttctcgtcgtgtgcctggctctgtcagctgccagcgcctctgcaatgcagatgccctgcccctgcgcggggctgcagggcttgtacggcgctggcgccggcctgacgacgatgatgggcgccggcgggctgtacccctacgcggagtacctgaggcagccgcagtgcagcccgctggcggcggcgccctactacgccgggtgtgagcagacgagcgccatgtaccagccgctccggcaacagtgctgccagcagcagatgaggatgatggacgtgcagtccgtcgcgcagcagctgcagatgatgatgcagcttgagcgtgccgctgccgccagcagcagcctgtacgagccagctctgatgcagcagcagcagcagctgctggcagcccagggtctcaaccccatggccatgatgatggcgcagaacatgccggccatgggtggactctaccagtaccagtaccagctgcccagctaccgcaccaacccctgtggcgtctccgctgccattccgccctactactgattcatgatatttgggaaatctcctctatccatccctctctatctatatatgtaataatgcagtaagacgacacacattatcatgtgtggtatgaccaataatatatgcatcataataaagttttggttttaaagaatt

SEQ ID NO: 25719 - DNA, 1189 bp, Zea mays
  Clone ID: LIB3958-016-C5_FLI
tcttctcggcctcctccgcgtcggcgccctacggctacggcgccggcggatggagctacgactcgctcaagaacttccgccagatcacccctgccgtccagacccgcgcaattagcatttcgtatttttttaaaaatatatatcagtcgctggtttcgtgcgttccagaaattctcctgcgggttgcgtgtagctgatgcgtaattccctgacgtaatctatgattcgcgcgcgtcgtgttccttgcatttagaactgcaactgtgcggatgccaccgattcgattgattcgtcactttaagaacatgatccggttagaacagcaagatatgataaatcgatttgaatccaaatctgaccatctggttcggcttggttgcctgcaggtctacctcaccctgtgcgcggcgctggcctcgtcggcggtgggcgcttacctgcacgtggtctggaacatcggcgggacgctgacaatgctcggttgcgtcggcagcatcgcctggctcttctcggtgcccgtctacgaggagaggaagaggtatgggctgctgatggcggctgccctcctggaaggcgcttcggtcggacccctcgtcaagctcgccgtggaatttgacccaagcatcctggtgacggcgttcgtggggactgccatcgcgttcgcgtgcttctccggcgcggccatggtggccaggcgcagggagtacctctacctgggcgggctgctctcgtcggggctctccatcctgctctggctgcagctcgccgcctccatcttcggccactccgcaaccagcttcatgttcgaggtctacttcgggctgctcatcttcctgggctacgtggtgtacgacacgcaggagatcatcgagagggcgcaccgcggcgacatggaccacgtcaagcacgccctcaccctcttcaccgacttcgtggccgtcctcgtccgcgccctcgtcatcatgctcaagaacgcggccgacaagtcggaggacaagaagaggaagaagaggtcgtgagcgtcgagaacggaagctctcccacatgcataggagtaactgccagggttccttcctggggtggaagtgtggaactgagcttgaatgttaagaagtgttcctttgttctcttcctctcttgatgactctgtaaatagctatgtcaatctggttaagtttggtttggttgc

SEQ ID NO: 25720 - DNA, 938 bp, Zea mays
  Clone ID: LIB3958-016-E8_FLI
ctggagcgcggtgacggcggaggacttggtggacgcgctgcgggaggtggactggtccatgccgccgcggcctgtcccggagttcttctcccgcttcaccgtcccacgctcctactccaagtggaccagccgcctcaagtgcaacctctactactacaggacaaactatttcatcttgatcatgttcatccttgggatgggcttcctttggaagccagttgctatagttgctgcttttatgactggacttagcatcgcatttctcaatgatagttttgcagtcactttcaatgagaaagtcacaaggaccgtaagacaattttcaccacatttagctgcaaagttgaggccacctataactcctgttcttcgcggtcgaccaagctctaagagatcaattcatatttgtgggcgacctcgctgggtgtttgtcctgttcttttctgcagtgatctgtatactctggttgacctcatgcagtcttctcacagtcctctgggcacttctcattgctctatttgcaactgtgctccatgcaagcttcagaacaccaaatctcaaagcacgtctgaatacattcagagaggaattccgggctgtttggcggaattatagtgagctttaagggtttcctttgtttctctcatgttcatgggtaatgaaggtgtctggtgccgttgtttgtgagctgtgctaggagatctagttgaaggtgaaacgccattgcacattacatggactacttgctctcttgggaggtgggattctggttgggttgactccgaatgcgatgctatgccagcacacgatccttcaagaacagtagttttctttcgtacttctccctaaccgagcattagagagaggacagcatgtaaaggatgtaaaaatgtacttgttctcgatcaaaaagtatgttgtttgttgaaattattact

SEQ ID NO: 25721 - DNA, 545 bp, Zea mays
  Clone ID: LIB3958-016-F1_FLI
gcgacagccagcagccgaggcggccagcgcaggcatggccactcccacttccagtggcgacggctcgcccccgggctcctctgacctcgtgcccccctcctaccccgagatgatcgtcgccgccctcgccgcgctcgccgaggagaacggctccagccaggccgccatcgcgcgccgcatcgaggcggaggcccgcggcgacctgccggcctcgcacccggcgctcgtcgcagcccacctctcgcgcatgtccgccgccggggagctcgtcgccgttgcggggggaaagtacgcgctgccgccgccggtcccaccgccgccggagtcaccggctgacgacgaagaagacgactacgccgacgacgaagaggaggaggaggaggctccggagccggagcctctgccgcagccgcccgctaagcgcgggcgcgggaggcccccgaagccgcggcccacgggcttccccgccggcgtgcccggagctgctggcccgggccccatcggcgtccccggagccgccgccgccgccgccgcgccgcgccggc

SEQ ID NO: 25722 - DNA, 1559 bp, Zea mays
  Clone ID: LIB3958-017-A11_FLI
gccggagcgggagcctgaccctgacgccatctctccatccttctcctcctccctggttcagatctctcatcgtcccccgctgcattccatcccgaccccgtttgccactggtcacaccctctccatcgcttcctgccaccgaccacaccctctcgatcgccattcgccaccggccaaatggaggccatccggaagcaggcctcaaagttccgggagcaggtggctcggcagcagcaggcggtgatgaagcagttcgggggcgggtacggcgcagacggcgtgttcgcgaacgaggccgaggcgcaacagcactccaagctcgagaagctctacatctccacgcgcgccgccaagcacttccaaagggatatagttcggggcgtcgagggctacatcgtcacggggtcgaagcaagtcgaaatcggtggacagctgaactcccgtgtctcttttattgaacacatgaaatttgaattcggaattgttagtgtaatgtgctttgtgttgttcagggaacaagttatgtgaggatggcaagaagtacggcaccgagaacacttgtagcagtggaagcacactgtcgaaggcggcgttaagttttgctaaggcacgatccatgatggaaaaggaaaggggtaacctgctgaaagcccttggcacacaggttgcagaacctctgagggctatggttatgggagctcctttggaggatgctcgccaccttgctcaaaggtacgacagaatgcgtcaagaagctgaagcgcaggctattgaagtttcgaagcgccaaatgaaactaagagaggcgtctggaaatagtgatatggtttcaaggctagaagcagctgagtcaaagctgcaagagttgaaatcgaatatgggggtattgggcaaagaagctgttgcagcaatgactgccgttgaggcccaacagcaaagattgaccttgcagcgtcttattgcattggttgaatcagagagaaactaccaccaaaaggtcctacaaattcttgatcaacttgagagagagatggtatctgagcgccaaagaatcgaaggagcacctccggtggttgagagttccatgcctccaccgcctgcatatgaagaagtcaatggtatattcatgagaaatacagttgcagaattggtcgagactgtggagtatttcttggctgaggcaatccagtcataccaagccgaaagcgataccgagctcaacctttcaactggtgactacatagtggtccgaaaggtgtcgaacaatggatgggccgaaggtgaatgcagggggaaagctggttggttcccctacgactacatcgagaaacgggagcgtgtgcttgcaagtaaagtcgcccaagttttctaagtcttccgctgagccatgtagtatccccggggttgtacaatgtgtgttgtttatgcttgtcatcttcagagaatcagaggagatctgtaattttgctgaaagctgcctgttgggtggtttgtttctgcctggccgcctcaattgttcaaattcatgtggcaggaactgaatatattcattcttcagt

SEQ ID NO: 25723 - DNA, 901 bp, Zea mays
  Clone ID: LIB3958-017-B7_FLI
atcagaagagcggcggcgcgggcggacaaggagcaggcggaggaggagttgtgccaagccacaatgggtatctcgcgtgactcgatgcacaagcgccgagccaccggtggaaagcagaaggcctggaggaagaagcgaaagtatgagcttggtcgccagccagccaacaccaagttgtcaagcaataagacggtgaggagggtccgtgttcggggaggtaatgtgaaatggagggctcttcgccttgatactggtaactactcatggggaagtgaagctgttacccgcaagacccgtatcctcgacgtggtctacaatgcatcaaacaatgagcttgtgaggacacaaacccttgtgaagagtgccattgtgcaagttgatgctgccccattcaagcagtggtacctcactcactatggagttgacattggtaggaagaagaaaacccctgctgcaaagaaggataatgctgagggacaagaggttgaggcagcagctgaggaaacgaaaaagagcaaccatgtcacgaggaagcttgagaagcgcaaggagggacgtacccttgacccacacattgaggagcaatttggcagtggacggttgctggcatgcatttcttcccgtcctggacagtgtggccgagctgatgggtacatccttgagggtaaagagcttgaattctacatgaagaagctacagaggaagaagggcaagagcgctgtagcttagagcattctcatggattgtcttgcaccgaaatgtgtgtcctgatgagtacacttttttggttagtcgtctcaagttcagagcgttatgccatattttcagacctgatttgtacactgttttctaaaagcgattgagctctagtccaatttgagcagggtatgattatttgttg

SEQ ID NO: 25724 - DNA, 1668 bp, Zea mays
  Clone ID: LIB3958-018-B10_FLI
gcttgcatctacatcgtctccctcactctgctggtgctgctgctcgacgcgagcagacgacggagaacaaccggaggtggcagtagcagcacggaggagcacaagctgcctcctggctccctgggtctgccgttcctcggcgagactctccagctctactcccagaacccgaaggtcttcttcgcctccaggctgaagaggtacggcgaggtgttcaagacacacgtgctgggttgcccctgcgtgatcttggcgagcccggaggcggcgcggatggtgctggtgtctcaggcgcacctgttcaaaccgacgtacccaccgagcaaggagcgcatgattggcgcgcaggccctcttcttccaccagggcgactaccacctccgcctgcgccgcctcgtgaagggctggcttggcccggacgcgctccgcggcctcgtgcccgacgtcgaggccgccgtggcgtccacgctcgacgggtgggaaggccgcgtcaccagcaccttccataccatgaagaggctcaccttcgacgtcggcgtcatcgccatcttcggccaccggctggccggccacgtgaaggaggagctgaggaggaactacttcaccatggagaaaggctacaacagcttccccatcccggtcgcctgcaccagctacagccaggccatcaaggcgaggcagcggctgggcgcggtgctgagcggcatcctggcggagcggagggcgcggcggagcgacgacgacgacgaccatggcctcctgaacgccctcatgcgctcccgtgacgacagcggggcggcgccgccgctctcggacgaccagatcgccgacaacgttatcggcgtgctgttcgcggcgcaggacacgacggccagcgtgctcacctggatcctcaagttcctccatgacaacccgaagcttctggaagccgtcaaggtggagcagatggcagcctacgaggagaacgatggcgggaggctcccgctgacgtgggcgcagacgaggaagatgtccataacacacctggttatcttggagagcctgaggctggcgagcatcatcgccttcacgttcagagaggccgtcgaggacgtgcactaccaagggttcctgattcccaaagggtggaaggtgatgcccctgttcagtaacctgcactacagcccggactacttcgaggacccacacaagttcgacccttcccgattcaaggtggcgccgcggcccggcacgttcctgccgttcgggagcggcgtgcacgcgtgccccggcaacgacctggccaagctcgagatgctcgtcctcatccaccgcctcgtcaccacctacaggtgggaggtggtggggtcgagcgacgacgtgacctacagcccgttcccggtgccgaaacgcggcctcctggcgaggctcagcagggccaccaccggcagcgcggtcgtcggccgtgcgccgccgctggacattggaggacctgcaggcgctagctatagctagctcctcggaccaaaaggcaatgcatgcacccaagcacccaggagatagataggcccggcaggcggcaggggacgacgacacacacatccagacatcgtccagtcacgtggcagtagcaagctagtactactactactgtgtgtgctgccattctgcatgcatgcgtttcctctc

SEQ ID NO: 25725 - DNA, 747 bp, Zea mays
  Clone ID: LIB3958-019-B1_FLI
cgcggcggcactccttctccctccccgagtgcctgctgtgcgcctgtacttcacaccggcgtcgccccctcctccagaactccccaccggagccaccctcacccgtcacgcactcctccgctgagtgcagcaagtgctgatcaggtgcatgaaaccctgtttctgtttgatgtattcgacataatctgtccttggtatatgagttaatttgctccgatttgttccgttctgtgattggctcgattagttcggttagcacactctcttacaaatccagagacacttcttcacagtgggtggacgggagatggtgctgaggcgggcggcaaccgaatgccccaagaaggttgcggggctgaaggatctggtgaacctgccaacccagctgcgagagttcgccggaggccggtcccaaatgtcacatatctccttcttcctcagtgtctggtcgtacatcaaggacaacaaacttcaggacccaacgaataagaacattgtgaagtgtgatgagaagctgaagaccgtattattgggcaggtccaaagtgcaactgtctgaactcccaatgattgttaagctccatttcccaaaattgccaaagtagtgacaacatagtattgtatattgaagttctgtgggaccccctacagtaacttttacttcaaaaaaaaaagttctgtgggaacatgataggatagatagaacactatatgtattgttttgctgaaatttccatttactgtctgt

SEQ ID NO: 25726 - DNA, 966 bp, Zea mays
  Clone ID: LIB3958-019-F1_FLI
gccaaaaggatatgtccgtcttatgggtctaggcccgactcctcaagatgttggtactccaggattaaagtgttatgcaccaacaagacttcaaatggaggttatggctcgaaagaaagctgaaagtgacagggatgctctagagcaacgtgtttttgagttgcaggctcaaatggagcaaagggcacaacaagatagggatgcaaggttgaatgaaactggtgatgctggactagatgaaggggaggaagattatgtttctgaagatgatgttgatgacaacttacatgaccaggtgcatggtttaacctcatcaagaacaacagcacacaaaaaagaaccgcaccaaggagtaatgaaacttctcgctctcaacatgatgctcttgttggaaaagatgtcatattatatgccttgttgagatcagatcaacctgtggctaaaggaacaataatttcaactaaaccaaacactattcttgcgggccagtcccttgggagacaatgttgtgaagttattgtgtcttgtgtgttgaaaagagatgcacatttgcctcgtccctatgccaatatggaaactatgggtgatgccaacaagatgtcaattgcatggccatacaatagactaaagattaccaacaaggcatcaacaccacctgcagtttgaggtaatgcatggtgtaaaaagctagctacttgaggacaagctgacatgcttcgaggacaagctgacatgcttcttttggtttcaagttcttttgtgggcaactttgtatctaatagtcatgcaatgttgcgcagatcgaataggcatgatggaaagcttttgtaatgtctaacccatatactgtctctgatgaccaattgggtatatttaggaatatttgtagcttatgactacaactcaattgtggatgtttaagtgctgccgatgaatctatgattatttgaaccttgtgactcattc

SEQ ID NO: 25727 - DNA, 846 bp, Zea mays
  Clone ID: LIB3958-019-H8_FLI
cccaccgaattccctgcgattcctctcccctcgcctcctcgtctccccctaggggatcgtcggagaggaatcgcaaagagggccgtctcatccgagttaaggaagccatggagcacaaggaggctgggtgccaggcccccgagggacccatcctctgcatcaataactgtggcttcttcggcagcgcggcgaccatgaacatgtgctccaagtgccacaaggagatgataacgaagcaggatcaggccaagctggctgcctcctctatcgacagcatcgtgaacggcagcgacgccgtcatggagccggttgttgctggcagcaacacggtagtagctgttgcccaagttgagttgcaaacaatgaacgtgcagcagcccgctgatgttgccggacccagcgagggggtggcggcgatctccaaaggggggaaggtagggccgaaccggtgcagcgcctgcaggaagagggttggacttacgggattcaactgccggtgtgggaacttgtactgcgcactccaccgctactccgacaagcacgactgcaagttcgactaccggactgctgccagggacgccattgccaaggctaatccggtggtgaaggcagacaagctcgacaagatctagggggggttccctacggttgggtatcaggaagattgtaaaccgcggtaactcgtcatgcggaactgctgccttgccccccgcgcctttctcttccatgtttgctgctacaatcttgttgttgggcattgcagtgcacggtgcacacttgtgtagcccgcctcgagaattcctgcctctgcatctggtcagttctaaaatgatttgcatgttggct

SEQ ID NO: 25728 - DNA, 946 bp, Zea mays
  Clone ID: LIB3958-020-E9_FLI
ctggaagccggagagaatcgagcagagccaccgatcgctcctctccactttccacattccagttccactccgcctccgctgccggtcgccgactccgaaactccgacagtccgaccacaaggatccacagaaggatgagtgaagaggataaggctgctgcttctgctgagcagccgaagagggcccctaagctcaatgaaaggatcctctcttctctgtccaggaggtccgtagctgctcatccgtggcatgatcttgagatcggtcctgatgctcctgctgttttcaatgttgttgttgagatcacaaagggaagcaaagttaaatatgagctcgacaagaaaactggactgattaaggttgatcgagtcctgtactcatcagttgtataccctcacaattatggtttcgttccgaggactctttgtgaagacaatgacccaatggatgtgttagtcctgatgcaggagcctgttgttcctggttcgttcctgcgagcaagagcaatcggccttatgcccatgattgaccagggtgaaaaggatgacaaaataatagcagtctgtgctgatgatcctgaatatcgtcactacaacgacatcagtgagctgtctcctcatcgcctgcaagagatcaagcggttctttgaagattataagaagaatgagaataaagaggttgctgtcgatgcattcttgcctgcgaccacagctcgagaggccattcagtactccatggatctgtatgcgcagtatattttgcaaagcttgaggcagtagattggaagcaactatttatctgggcgtcttggaatgagtgtgattttaataagtcaaaacacttgatattgtgtgcaaatcttggggttgagaacaatgtcactagctgtgatttacttctgtgacttgcattttttttcttgttaaattatgaataagcgaagtcc

SEQ ID NO: 25729 - DNA, 1254 bp, Zea mays
  Clone ID: LIB3958-020-G10_FLI
agggggagagatggcccgtcgcgccgtcgccttgctcgtcgccgtcgcgctcgcgaccgtgctcctgcatacggcggaggttgcggcggggcagaagaagccggcgacggccgcgaggcgggaggacatcccctacatccggtgccaggtgtgcgagcggatcgcgcgcgagatctccgcgcaggtcgccaagaagcaccaggctctcccgccctccaagaaggtaccggagatcgagatcatcgaggtcgcggagaatgtctgcaacctaaagaagcaggaggcggattggatgcttcggatcgatatcgtcgagaaaggcgacaagctcgagcttgttgagcaagatgaggaagggcattgcaatgcagaatgcaagaccattgagcgtgcatgtcaggaggtgataggatatgctgataccgatgttgctgagtttgtatacaaaaataacccctcggtcgatcagcttatgaaatttctctgcaaagatctttcgaaagcatgtgccaaggacccaccgccagttccaaaagatcgtgtccctggggaaccatttgcaaggaagccatcaaaggatgctgagatggaaaagatattgagatcaatggagggtatgccgggagccccaagcatgaaaatgtactccagggacgatctgatgaaaaataactttggtactgaagacgacgacgaggaggatgatgaagatgaggatgacaacttcccaaagaacttggggaaagctctgaaaaacaagggctctcaaaagaaagatttgaaacagcaagtcgtgcagcagttcaaggataccagcaagaagttgaaagggcatgtaaacaaggtgtccggtatggtaaagaaatggtggaaaggggcaaagaagcctgccaaatccagcaaaagcaaaactgagctctgaagcattgttgaatcacgtcagtaaatctcatccgtcttccacttctcctggagcaaagttttagatggttatcggaagataaaagttacagcaacgcaaccagggcttttgttagagagtttagctacataaaacgtgtacaattgtttgtttttaacttctgttatttgcagtgtacactagtaaaagaactgaactccgatgatagtttttttccagattagtcgtgtcccaattggtcgttatagtgtttgatactctataaaactaaacagctggtgacgccagggaattagtttattggctatgcataatcgaacttttcactaatt

SEQ ID NO: 25730 - DNA, 526 bp, Zea mays
  Clone ID: LIB3958-021-D11_FLI
cgccgacacgcgcatcgcgccaccccatccaagcatccccatccgtcaccatcgacccgcgagcacccatggcgaagggaggaagtggaggccagcgcgagggtagcgccctgaagacggcggcgatcgtcgccggggggctcgcgctcgcatgggtcaccgtggagaccgctttcaggcccttaatgggccgcctccgcgctgccatctccagctccaccgacaccgcccgcgaccccgaccaggaggagccccccgcgcctgcctctgcggcggaggcggagaaggcgtccgcaccagaggagcctgccgcggtggaggagaaagtcgaggagaaggtggccgagttggagaaggtggaggaggccgccgccgatgacaaggccgagtgaaggcgacggccacatggcgccctgtctggccgctcttctgaacgggttcttgaggttagccgggatcgaatccaagatcgtttaaaataaaacctgtgtttaaatgtttatcctgcaaattatattgggttagc

SEQ ID NO: 25731 - DNA, 802 bp, Zea mays
  Clone ID: LIB3958-021-G10_FLI
gcatagcagcagccagctccatccatcctctttcccctcctcgcttcgcttcctcggcggattcctcctccctcgaccgtccccgtccccgtccccttccggcgcgcaagctcgcccgagatggcaaacgcgagatcgggtgtcgctgtgaatgacgagtgcatgctcaagttcggcgagctgcagtcgaagaggctgcaccgcttcctaactttcaagatggacgacaagttcaaggagatcgttgtggaccaggtcggggatcgcgctaccagctacgaggacttcacaaacagcctccccgagaatgactgccgatacgcgatctatgatttcgactttgtcactgcagaagatgtccagaagagcaggatcttctatatcctatggtccccatcctccgccaaggtgaagagcaagatgctttatgcaagctcaaaccaaaaattcaagagtgggctcaatggcattcaggtggaactgcaggctactgatgcaagtgaaatcagccttgatgagatcaaggatcgggctcgctaggcatcatcatgatcatgcatcatggacttggcctactactgtggatttgtatgccattatagacttggtgctgtgaaagactgcttgatgatttgcgggtttgttgctgtgtaaaaaaaggtcccatggctcccagaagaccatgaaggttcggatctatcatgtaattccttgttatctgccaattatgtatggactatggacatgtgttgcgctgttcaacttactactacaaataagtaatcgataatgttcccttccc

SEQ ID NO: 25732 - DNA, 917 bp, Zea mays
  Clone ID: LIB3958-022-F7_FLI
gcttttccggcttgacctgcctcgcttctcgtctcccgtctcctccgcgttcccgctttccacccaccgccgccgccgccgccgccgccgccgcccaccttaccgtcccctgccccttgcccagcatgtggggtagcaccgacggcggaacgccggaggtcaccctcgagacctccatgggcgctgtctctgttgagatgtactacaggcacgcgcccaagacttgccggaacttcgtcgagctcgcgcgacgcggctactacgacaacgttatcttccaccgcatcatcaaagatttcattgtgcaaggtggggatcctacaggaaccggcagaggtggcgagtccatctatggagcaaagtttgaggatgagataaagactgagttaaagcacactggggctggaattctgtccatggcaaacgctggcccaaacacgaatggaagccagttcttcataactcttgccccttgtcagtcacttgatgggaaacatacaatttttgggagggtatgcagaggaatggaaattgttaaacgccttggaagtgtgcagactgacaaaaatgacaggcctatccatgaagtgaaaatcttgcgagccgttgtcaaagactgaagcattatccagatgtaactccgagtgttggtttaggctttaataatggccatgttcatgtaagtggtgcctttgcgaaaaggtgaaaagtgcagctagttccagcctatatgactatggtctctcgatgtggctgacctgaaaccctacctgatgagtagattggaccttttgatcaagaaggtatttgaaacagtttatatgcgtgtgtggtttgagtttctctgcgaggtatttgaaacaaatagtaccaaactatgttcgcttcattttaaagtcaattgtttggactgctgt

SEQ ID NO: 25733 - DNA, 875 bp, Zea mays
  Clone ID: LIB3958-022-G2_FLI
cctagatccaacgaaccatacggctcaagacctcctcccctcgcgttcaccaaacaccgccgcacacttctaaaaaagttccgcaggaaacgcggcccgcagcacgccctttccccacctcgatctcgcgctaggttttcgccacaccgctctcgtcctccgcgaagatgccgaagaacaagggtaagggaggcaagaaccggaagcgtggaaagaacgaggctgacgacgacaagcgcgagctcgtcttcaaggaagacgggcaggagtatgcgcaggtgacccggatgctcggcaacgggcggtgcgaggccacctgcgtggacggcacgcgtcgcctctgccatatccggggcaagatgcacaagaaggtgtggatcgcggccggggacatcgtcctcgtcggcctccgcgactaccaggacgacaaggccgacgtcatcctcaagtacatgaacgacgaggcgcgcctgctcaaggcctacggggagcttcccgagacgctcaggctcaacgagggcgtcgacgtcgatgggcccgaggagggcgaggagaacggcgactacaactacatccagttcgaggacgaggacatcgacaagatctaagaattctgtctctccttccttccggcacattttattattattatgggattccttttcgccttccggctaatttaatattatgtgacttgcgttttagtacgcggtggtggactggtggtatggtttaggcgggctgttatgaattcgctcgcaatcctgataggatctgaggtggttaaataatcgcggaacgctgataatctcgttttaaatctggcgcatgctgttgcaagatgttctatactagttgttattctggattgtgtt

SEQ ID NO: 25734 - DNA, 906 bp, Zea mays
  Clone ID: LIB3958-023-A5_FLI
catcttcctcgcagcgccggcgctccatctcccgctcccttccttactcgcgctcggcacacaggcggcggcgctcgggctcgggctctcagggacggcgtcagcggcttaccctcgcgccctcgcctccggtcctccgcacaccggccggtgaccctgcgacaacattgcatctgaactgcattggatcctaagagatgatggatgagtcttttcttgataggatggtttcccaacttcggtcaacatgcaagtactacactggatatcccaaggacttagggcgatcaagaattataccattcacatctgagcgtcagtttgtgcagctattacatgaaggcaggcctgtagtcgttgcctttactattaagtgcacatatacacagcatcttgataaagttctggaagaggccgcagctaaattttatccacatatcaagtttgtccgagttgagtgcccgaagtaccctgggttttgcctcacaaggcaaaggaacgaatatccatttgttgaagtattttacaacccagaacaggctgcaagcccaggaaagagcgtggatcctaacatcaccaagtattctgtaaaagtgctaccgttcaactatgaccaaagcgtgtatggatttcgagaatatttcaagaagcatggtttcaagtattctgaaacgaactagatccgttgttaaagatctgcctcaagagtagtcctagggacttgagtagcatgtggaggcagttgttgtatggagttgaaatggcgtgaggctctaatgtggggtcttgactagttcattcgagaatgcctgtcatgtattcatttgtatacgggctactgctcatgcctagagatttgcttttccatacctatgaaccattggatttggtaatgttttacctctc

SEQ ID NO: 25735 - DNA, 1738 bp, Zea mays
  Clone ID: LIB3958-023-F1_FLI
tcgccgcccgccaaagaaacctcctgcgcgtcgcccggacccgccgacccgcctgcccgcctggtgctcgacctaatgccgcggcgccccccggcatccaatctttatatgaaggctagtttttatatgaaggagcaccgtacatcaatccaagccgagttccacctcgagtgtattggcacctcgttcaagtacaaagcaaaaaactcatcacaaagatgagtttcagatccatcgaacaattacttaggaggaacagcaaaaccaaaatttctcgcaatatcgttgaccgcaaccatgaccagaaggaagagcagttagtacaatccttgagggagttacttcttgcaagcaaacagctcccagataagtttgatgactactatgtccttctacgctttcttaaaatgagaggcttcaacatcttaaaagcaaaagagatgttcttaaatatgttaaaatggcgtgaagattgttccgttgatgccattgcgaacgattttaaatttgaggagtatgatgctgtgaaaagatgctatcctcatggatttcatggagttgacagatttggtaggcctctctatattgaacgagttggctcagtggatctcagtaagctcatgcaagtgactactattgatcgatatgtaaaatatcatatatcagaacaagagaaaactatatctttgagatatcctgtttgctcacttgtggctaaaaagcacatagcatcgacaacagccatatttgatgtgaaaggactggggttgaataacttttcaaaatctgcaagagagatgtttgcagaaatccaaaagatcgatagcaattactatccagagacattaaatcaactttatataattaatgctggaactggatttagagcactgtggaaggtattgaaaacattcatggaggcaagaacattagcaaagattcaggttctggggaccaattaccttaacacagtattagaagctgttgacccaagcaatttaccagaatttttaggcggaacttgcacttgtccaacaggaggatgcttactccaagataaaggaccctggactgacccagaaatgattcgtgcttctaaggaagcattcggtaaaggtcagaagtctttcaatgaattggctgccacaattgcctgtgaaagctttacaggttgtcaggagccttccgcaaaacaagtagattccacttctcgtaagagaagaactcttggcatgttgttcaaagatgatcaggttggatttgatacaggtgaaaatattctacggaaacaagtcgatgaacagatcttggagaagatccgagaacttgaacactgcgctgctaagagtggggagaccctgcagatattaatatgcaagcaacaagaactcactggccacatcgaacagctgaggaaaatccttcagtgagaatgtgatggcgtgggttcagatatgaaagccgacatataaaactcgaaggtagtgctggccaaaggtgaagaaaatcaaaagggacaagaagcgaagccatcgatgtaatgtaataaagaaatatgcaccctagttttctgtgatgaatctttaacccctatgagctgctaaaacactcacttgtgaatgtcaatatgtcatagtattattgtacgccatgattatactcgcaacgctgtctacggctacgtactcagaagttctgtaccaatgttaaataaatggtacacatgtaatttaccgtc

SEQ ID NO: 25736 - DNA, 658 bp, Zea mays
  Clone ID: LIB3958-023-G1_FLI
gcaaattgcaccaagaaatccatcgagaggccgtcgacaggggaattaatggcgtcgtcgtctagcagcagccaccgccgcctcatcctcgcagccgccgtcctgctctccgtgctcgcggctgccagcgccagcgccgggacctcctgcgtgccggggtgggccatcccgcacaacccgctcccgagctgccgctggtacgtgaccagccggacctgcggcatcgggccgcgcctcccgtggccggagctgaagaggagatgctgccgggagctggcggacatcccggcgtactgccggtgcacggcgctgagcatcctcatggacggcgcgatcccgccgggcccggacgcgcagctggagggccgcctagaggacctgccgggctgcccgcgggaggtgcagaggggattcgccgccaccctcgtcacggaggccgagtgcaacctggccaccatcagcggcgtcgccgaatgcccctggattctcggcggcggaacgatgccctccaagtaactgcgaagagcatagtgcatgaggaatgagcttgtagctagctcatatgtctgaataataagcacagcaagaagatgaatgcatttctcggatcgttcatccggaacaataattaaaggggatccggatttgttcttgtgat

SEQ ID NO: 25737 - DNA, 685 bp, Zea mays
  Clone ID: LIB3958-024-E9_FLI
cttaaatccaactgcactgtcagaatgaggtcctatgttgaagctggctgcaggcttcactaccaaaacatctcaaacataaatcagttaagctcatccgaagctggacttaaagatcatataaagaaagctaagactttgctcgaagaacttgaatgtctagtcgagaatgtctatggcatcacattaacatccagtttaagtgctctggaagtttcagacagtcattgcctcgacaacatgccaagcaccgattgctatgccatggaggaggataaacgagcagatcatttggacatggacgtatcgctcgttacggtgatggccatggttcgcaacatgctgaagcttgactacacgatgcaggagaagattgtcactgcattgtccttgaaaacaccatcatcggagctcgagggatactgcctcatgtgggatctacgcccgtacatcgatgacgacgtgatgcgtcttgcgtggaacatgtgtccttgaagcattggggctttggagttgtttctgctgggatggatgtctggtctgttcattattatgtgtttgtcgaaggtcgagagatatgttcagtgttatgtatgacgacgtggttgtgtgttcattgtcgtcttctggagacgagaaacagatatagtttgtcagattgaaccccttttgggggttctttttc

SEQ ID NO: 25738 - DNA, 1333 bp, Zea mays
  Clone ID: LIB3959-001-A11_FLI
catgggtcctactcccctaccagattaaattaataaaaaatctgagacacataattcctccttttcattcgtgccccgccccccaacctatgtactcaaactactcagtttttgtttatcaatgatgacggttattttgtatattcgtctagatggcacagactcatgacggtcttgaaaggagtgcagaagtcaatgagcttgagtggtcttgtggtcgcaatcctgatgtccttattccaattgcaaatgggtgtgaagagatggaaatcataattctggttgatattttaagacgggcaaagataaatgttgtattagcttcagttgaaaaatatccagctgttcttggatctcaaaggatgaagattgttgctgataaaagcattatgagtgcctctgattcgatatatgatctaattattcttcctggaggacctgctggggctgagcggctgcacaggtccagaattctgaagaagttactcaaacaacaaatgcaagctggcaggatgtatggaggggtttgttctgctctgaaggttctgcagcaagaaggtttactcgaggataaaacagtgacagctcatcatgctgtagccagtgagctcacgtgccaagttatagaccaacccaatgttgtgatcgacggaaatttgatcactggtaaggggcttgggacagttgttgattttgccctagctatcatcaggaaattttttggccatggacgagccaaagctgtggcgaatggaatagtttttgagtaccctaagagctaaaccccaagaattgctgaaatcacgaaatctacaataaggactaatgaaacacattggctgtaattgaagatttggctatctatacttctgataaaaggtgagctgatgcttttgggatagcaaaagattcctctattgttgcctttctggacagctggactgaaatctccagatccactatatatgttggggtggaccaaatttacacgggaaagcttcagtggcagtcatttcatcagcttcatgacatgatttattggtggataaattacagagtggttgctaactgattatatgcgttcagaggaaactttactgtcttctgtgtgcctgtattggtttgggggcgtattttccaaggtttgaactctgaaggcattattcctcgatgttgccatcatgctatattgctgtgtttcccatctgtgaattcatctgagaagcttgacattctaattccggacttccccagatactgggtttcaagagtgcaggctagcaactgaatcagtatttaattaaatttcgaacttctgtgctgcgtttttttt

SEQ ID NO: 25739 - DNA, 1698 bp, Zea mays
  Clone ID: LIB3959-001-D7_FLI
cacgcttcttgctgcggagagtggcccaacggaggaggttggcctcagaggattctggcaaccgtatcgcaacatcttcactttagtcgacgagctggggatctcgcctttcacgggctggaataaagcagcatactattctacggagggccttgctgtcgaatttcccatatttcataaccagccccgattaccagctccctttggagtttttgcatatccagaattccctaatcttcctttgagtgataggctgacatcaattcctatcatagctgcagtcattgacttcgacaacactgacactgcttggaggaaatatgatgcaatgactgcaaaagagctttttaagatgtatggttgctctcaaaggctctacaaggaaatttttgagctagttactcaggctgccctgtttgctcctggtgagcaatgtagtgcagctgcaacactggggatgctgtactattatgtgttgtctcatcaggaaaattctgacttcttgctgtgccgtggtgaagtagaagaaaaaattttctctccttggctgcaatcattggagcttaaaggcttaaaatttgtagaaaataaagttccaacaagtttgactacagatgtggatagcggatgcatctcttctattgtttgtggtgatgatgtgtacgaggcagatgcatttgttttagccatgggactctcttctctacagtccatcgtcaaaaacagtccattcctacggtctgatcgagaattcaggaatcttcttcacctatctacagtcgatgtgatctctgtaaaattatggtttgataaaaagatcacaattccaaaggttgccaatgtgtgttctggttttgatgattcatctggctgggcattctttgaccttacctcagtatatgatgattattgtgaagaatcaataaccattgtggagtataatgctagccatttggtactcttaagcgatgatgatattgtctatgaagcttcatcacatcttatcaagtgcatacaagattttgagggcgcaaatgtgataagatattcaatcagaagatctcctaattctgtaatcaactttcttccaggctcgtacaagtacacacttagaggatcaacttcctttccaaatttgtttattgctggtgattggattgtcaaccgacatgggtccttttctaaagaaaaagcatatgtgactggacttgaagctggtaatagggtagtagactattttgacattggggactttgccaaaataattgcagttgaaggagatgagccccatatagagacattgcgaagtctcaacagaagagccaatgaactgaagtcacaaatcccattctcagaattctttctccaataattttgttaggatttttctgtgtttgttgagcattgccattgttgtaggcattgttattaaggcggtaaggtaaagcatggcggcccagccctttgagtcgactagacgcttaaggcgtgcggcgaggtgtcgccatacatatgtcctatcctacaggagagcaatagaaacataccttgttgatgccaattttggagctccagtttcgcttgttccatgtagcatgtatcccccttacagattgcaacatgaacatgttgtgaattataattaatgtaagaaacaatttataatgcaatgattgaatgaagcatctgtgtaaatat

SEQ ID NO: 25740 - DNA, 1570 bp, Zea mays
  Clone ID: LIB3959-002-C9_FLI
gctccacccacccgacccattgctatcctacctgccagcgaacctgtctcgtctccttgttgcccacgtggcctcgccgtcgccgcgagctccaccttcctcagctctgccccgagcgcgatgtggcgagcgacgaggcggtctccgccgttcctgcgatggctatcgtcggacgcagcctcctctaaggcgccgcggcagcgcgtagcggcgctgtgggggaacggtgactacgggcggctggggctgggctcgctggagtcgcggtggagccccacggtttgccccttcttcctcgcccgcgccgccgacccgcccgcctccctcgcctgcggcggcgcacataccctctttctcacccagaatgggcgagtgttcgctacagggctgaacgactttgggcagctggggataggaacctctgttacacatatgctggagcctgttgaaatttctggatttcacgaaagagttgtagaagtttcagctggcaaccatcattcttgtgcagtcaccgcggatggtaagctctttgtttggggcagaaactcaggtggccagcttggccttggtaaaggggcaggtaaagtagtttctaccccaacaaaggttgattgtttgactgacctcagagtaaaaacggttgctctgggatcagagcattcaattgctgttacagaggaaggtgaagtcttgagttggggagctgctggttctggtaggctcggacatggccgtcaatctagcatcctgggattttctctgacctcaactgaatatactccaagattgatcaaaaactttgatggtatcaagattaaaaagatagctgcaggaatgttgcactcagcttgcattgatgaaaaagggatttggaagaccgaacgaagaattcagaccaaatattgttgaagagataccattttcagaagaagttgcttgtggaggttaccatacttgtgttgtaacagatagcggtgatctgtattcttggggttcaaatgaaaatggctgccttggtctgggaggtacggatatggtccgctctccggaaattttgaaaagttctctatttaaacttcctgtatctaaggtatcttgtggttggaagcacacagctgtagtttcaggtgatgacatctacacatggggttggggaggcgccaatgggacttttttcgaagagggccattcttccggtggacagctgggacatggaaacgacgtagactattttgagcctatgatggttccctttggcacgaatgcaagagccgtccatgtatcgtgtggcttcaatcatactggtgcaatttacgagtgctccgaggactttgactgacgtgccacctgcagacagcagatccgcatgtcttggagacttaggttagttatcaaattatactcgctagaagtgcatataaacagcataaataagctctgatgttggacctgcatttatgtgaagagaaatatagaacaagtgataacacccctgagagggggatgtaaattaaacagaataagggatgaactggatgcattttgtgatgcatcagagttacttgcc

SEQ ID NO: 25741 - DNA, 477 bp, Zea mays
  Clone ID: LIB3959-002-G5_FLI
tctgtttgttgtgttagggtttcgtctcgtgtataaggcgttcggagctcgcaaatcctttcctctctcgcgttcgaggctaggtagccgtcaccatgagccgctcggggcagcctccggatctcaagaagtacatggacaagaagcttcagattaagatgaatgcaaaccgtgttgttatcggcacacttcgtgggttcgaccagttcatgaatctggtggtggacaacactgtggaggtcaatggaaatgacaaaacagatattggaatggtggttatcaggggaaacagtgttgtaatgatcgaggcactggagccagttgcgaggtcacagtgaatcattgttctttagcactagcagcgtgaaaactgatgtaaaagatatcagtggaccctgttgtatttgactaatgcttttgcacagcaacataacttcggaggtggaatgtctatccctttttctatgggatgcttgt

SEQ ID NO: 25742 - DNA, 1173 bp, Zea mays
  Clone ID: LIB3959-003-A7_FLI
atcaatggctcaggttgacactgagaggaggaaaagataagaggaaaggatctccaccgagaaaaccctaattcgaacaaccgcgccgccgtctctcgctcactcgctcgcgctctccatccagatcggagcgctcggttcggataggggcgactaggaggtgaaggcgggcgcgtcagccatggcggacgaggagcacccggagaggagggaggaggcctccgagcttgccccctttgatccaaccaagaagaagaagaagaagaaggttgtcatccaagagccttctgatgaagtggacaaggttgcagagaagacagaatcactagcagtcgcagaacctgctgaacttaacttcactggaatgaagaagaaaaagaagaagcaggtggatcttgattcatctattgatgaccttggagatggggaggacactcaaggtgatcaagttgtagaggaacaaggggacggtattgtgcttggaggtggccctacatatccttgggaaggaactgaccgggattataaatacgaagagctgctggacagggtgttcaacattcttcgtgagaacaacccagatcttgctggtgataggcggagaaccgttatgaggccacctcaagttcttagggagggaacaaagaagacagtttttgttaattttatggatttgtgtaaaacgatgcataggcaacctgagcatgtaatgatgtttttacttgctgaaatgggaacaagtgggtcacttgatgggcagcaaaggttggtgatcaagggaagatttgctcctaaaaactttgaagcaatcctgaggagatacatcaatgagtatgtcatctgcaatggatgcaagagccctgatactattttgtccaaggaaaatcgtctgttcttccttcgctgcgaacagtgtggatcttcacggtccgttgcaccaatcaaagctggattcgttgcgcaagttggtcgccggaaggcctgagggtcctttgcgctgcctgctctgttttggtcgtgtatttcttgttttttttttcgtgtcatgttaatgcagctgaggttcggtttatgattgtcctatctctgtgtggctgaaatttgaggccataccaattcgacaatattagattattttgccggatggacattctgctgtgcaatgttgagagc

SEQ ID NO: 25743 - DNA, 1458 bp, Zea mays
  Clone ID: LIB3959-003-B3_FLI
gccatttggaagaaggatttttccgtcaaatattaacatcgcattaaggcggtaaacgtcttcattcaatgttacagacctatatcccttatttgggagcaaatttatgaatttacacaagtcggtgcttttgctggtgcgatctaaattgtattgtagtaagcatctgctagccttgtgcaacctgtatatcatagtctgtttctatttgtgtgagaactctcagttttaaaagtacgcgtgtatttcactatacctggggattttttcccctgtagatggcttcttcaaacggtgaggctgagcaacaatggatagagaatatcaagtcaggaggaacagttccctgtctaccacctgaaaactgtcctaatggctgggctactcctcccggtgattcatttatggtcagaggcccagaatatcttacaaacaaggtaaaaataccaggtggagagtatcttctgaagcctctcggctttgattggatcaaaggaccagcaaaaatctgtgagatcctgaaagacagtaaccatcgagttagaaaagctatcgacgaggaggtttcacgtggtaaccggccttttgtctgggcattcaacttgcaactgcccaaggacaacttcagtgcaatattctacttcgtgtcgctggaggctatacctgaaggctcgcttatggaccagttcttgaaaggagatgatgccttccgaaactccaggcttaagttaatagcgaatattgtcaaggggccctggattgtccggacggctgtgggtgaacaggccatctgtatactggggagagccctctcatgcaagtatgttcaaggatcaaacttcatcgaagttgatgtggatatcgggtcttctatagttgcaaatgcgatcgttcatttggcatttggctatatcacaacgctaactgtagatttggcctttctcattgagagtcaaaccgagtcggagctccctgagagacttcttggagcagtaaggttttctgagttaaatccaggatcagctggtttgtttgaaaggcggtctgaagagcatcaggaaagcactcagtctcggcctgtaggattttggcagggtttctctcaactgttgaacaaccaaggcaatacaagggagccatcccctaatttacagaatactaatggaactttgcgcaaagaagaagcaaatgaggatgccaaatggtaagtacttatctaagtgctttgtgagttgtttgccattggaatttaaccttgccagatacacaaaatatctctagtgcattttttttaaaaaaagaaacaaacaaagactgtagtgtgagtatgaaaaggttgagtggataagttatggcatgcctcatgactcatgaacagtgaagtactttctttttccttgtaattttctgtgttatgttgaggacgctactcaatcaaatggctgttgcgtcagcatc

SEQ ID NO: 25744 - DNA, 1292 bp, Zea mays
  Clone ID: LIB3959-003-E1_FLI
cagacccagatctacgggcaccgccgtctggttgcttccggccgccgttctcctcctcctcctcaaccggtggtcgcacatggcctcttacccttctgtctcccctcgtggctccggctcggtgcaggtcgggcgcgccgagctttactcgaagatggcgcgtgacctcgacgagcgcggcgcggcgttcctgaagggcggcgagacgtcgcagtcgctcacgctctcggacctcttcgacaccgcagatgacggcggcgtcgtacccaggctcaaggccgccgacccgccagtgcgcgcgaatgtgctctatatggaccccaagttcgccgctgtgatctcgaaagctgtaaaggacgtgtttcttccttattttgaccaagctatctggttccaaaatacgagcatgtatcacttcagcatgtttcatgcctcccatcacttggagcccattgtagcaactgaggatgagattgaagccgaagtggaggcagtaaaaggtgtcaccaagaatttgtgtccgcttaaaattgtattggacagagtggttttgacctcaaccggtgtgcttcttggcctgtggcaggttgaatctggtactgatcctgcagaaatccgctcaagattgagagaagctcttcctcgtgcacctcaaaagcaactgtatgaccctgttctgcttcacacctcgtttgcacgaattctgcgacatcccaggctccctaaagagcaaagtgcatcatcgtttgataatgtcaagttcttccatgagctagttgctcaaattaatgagaagatctgtggctttcaggcgacgatatcagagctatggtatgtcgaagagtacgatgttcttgcattggcactgaatggaaagatgaaggtgcggaggctccaccttggctgcaatcgtcagggcaactgaagctagagaggtcatggaaacgggaaagaggattaggagctgcacagccaccaaacagacttttttcgcttgcatgtctcgccgaaagggccaccttggttctgccgagctgaacgagatgtgctctacagtctgcctggacatagcgagaactgacaagttatactgactaagattatctccattagtttacctattctcatactcatattcaaacttcactgtgttttagataaactatggataaactgttagacctggtctaatgtttatgtgggaatagtatgcatgttttaatcgtatgtaatacaattatgtgagcacaagaactattataagaactattatagtgttgtttggttcaatt

SEQ ID NO: 25745 - DNA, 1690 bp, Zea mays
  Clone ID: LIB3959-003-F10_FLI
cgcggcgtcgcctgccgaaccccgaaccttctcgaggtcgaggcccctcccctttcgccaggaggtgcgcacggcacgactaatctccacactccccactagcttttcttcccagtttgctccgattttgattccatgaaaacaatgagcaggcgcaacagccgtaccatctatgtaggcaatctccctggggacatccgtgagagggaggttgaggatctcttctacaagtatggccgtattttggatattgacttgaaaatacctccgagacctcctggatacgcattcgttgagtttgaggatccacgtgatgctgatgatgcaatttatggccgtgatgggtataactttgatggctacaggttgagggttgaattagctcatggtggcagaggccagtcttattcttatgatcgttcaagcagctatagcagtgcatgccgtggaggtgtttctaggcgctctgatttccgtgttatggtcactggtttaccctcatcggcatcgtggcaagatctgaaggaccacatgcggcgcgctggtgatgtctgtttctctgatgtataccgtgaggctggagaaactattggaattgtggattatacaaattatgacgatatgaaatacgcgattaggaagcttgatgactcacagttcaggaatgcattttcaagagcatatatcagggtgagggagtatgatgctagatcacgaagcagaagccgtagccactcgtactctagaagccccagctacagcaggagcaggagtccaaaatctgtttctcagtcaccctcatctgtggatgaaaggtttgcttttgtttttcctagatttggccatgcggcgatctgggggctgcattgatataatactggatgttttgagaatcggagtggatggtttgggacttcggatagtagagatggattgtgatgcatgtatgacaagtgggctacaatcagtcctaggagcaagataggctgacagtaagaaaatgtgaagtaaagcttgtggtgttattaaaacaaatgtctactattaagttcaatgaccccatatagatggacagtaatttatagatcgctatcaagatctcgatccccaatttcttctccttctcatgcaagatatgcgacaagccctaggagcagaagcgcatcccgttctcggtctcctgtgagatccgattgaactttgagagcccttgaagcagtgagcagccccagggagaagaaaggaacttgagagtatgccgtgccatcacaatggtccgagtgattatgctgttgccactgctccctcacatttaagaggtttcctcttatttagacggagcatttaattaacattatcttgctaaagagagacttatgcgtagtctacttgtgtactcgttcgtttgtcctcatgttcttggcttcaggaactctggttttttatcattgtacccatagtaaaacctagatgtagttggggtatgccgtatgcgtctatattcggttggtcgaatgtaaatctggatgcatatatgcatctgtttggtttcatttaggcctttccttggtttcgtgattaatgacaacataagcttattgctgtgatcaaagtatattttgtagaggtaattaaagctagtcacacaataatggagattgcttagacaacgtatggtttttatgcctct

SEQ ID NO: 25746 - DNA, 1682 bp, Zea mays
  Clone ID: LIB3959-003-F6_FLI
ccacaaccggtctcgagtctcgacagatcggcgtcttcgatgccgccggcgcaggcgccctccagcggcggcgccgcgtggcgccagctgctcctgctcctgacagtcctcccgctcacgctcgctgcgctggctttcgtgctccagtggcgcggcggcggcggcgtcgatgaccctaccactcgctggccctcccacgccttccccggcatggccgagcccaccccaccgtccctcccctcgtccgactgcgcagacgtgctcgtgggatcctccgccccctccttcccctacatccgcggctggtcattcccctccgactcgggcgctgccatgggttctgtagaggaacatctccagcccaaggtgtgcgtgcagacgagcacctccgcggggcttgagcagatcctgccctggctcttctatcacaaggtcgtcggcgtcgcgcagttcctgctcttcgtggagggcaaggcggcgaaacccaatgtcgcgggagtcctcgagtcaattcctggggtaaaagtggtgtacagaactaaggatcttgaggagcggcaggcacggagtcgaatctggaatgagacttggctttcaggatttttctacaaaccttgcaactatgaactctttgtgaagcaatccctcaacatggagatggctattgtaatggctcgggatggtggcatggattggatcatacatttagacactgatgagttactttatcctggcggagctgctgagtattctgttagacgtttgttagctgaggtccctcgtgatgtcgacatggttatttttccaaactatgaaagcagtgttgagcatgataatataaaagatccattcagcgaagtatctatgttcaagaggaattatgatcatcttcctaaagatacttactttggcatgtataaggaagcgacacgaggaaatccaaattattttctcacctatggtaatggaaaatctgctgcacgaattcaagaccatctccgtcctaatggcgcgcacaggtggcataattatgcaaagagcccaaatgagatcaagttggaggaggctgcagttctgcattatacatacactaaattttcagatttgacatctagacgtgatcgctgtggatgcaagcctacaaaagaagatgttaagagatgtttcatgttagattttgacagagcagcttttataattgcatcaactgctagtgaagaagaaatgcttcgctggtacaatgaacgagtcgtgtggaccgataagcagctgaacttaaagcttctgaggaaaggagtgctgactcgcatatacaccccaatgacaattgttcagagtctgcgcgaatccggtgtcttcacttccgccattgcagctggccaacctgctgtgaatgccaaactctcacccaaggaaaccaatgcgcagagccaaaatgttaccgcatctgggaacatgacaagagtggtcagatctactgattcaaaggcatcaggcagaaagatactgcaagccgttgatcttgccttcagcgatactaatgtaactgctgttccaccgttgtcgccgcccagtttggacgaacacaggcatcatagtgaataataatgtcatacgtatgatatatatattttttgctcggcgtataagctcctaagaaaaggaagaaaagaaagttactg

SEQ ID NO: 25747 - DNA, 1217 bp, Zea mays
  Clone ID: LIB3959-003-G12_FLI
ctctgtttcgggctctccgtccccaggttgtgtgccacaccccacactcaactatatacgaaaaccgccggcgcctggcccctaggccctagtcacagacccttgttctttcttcgacgcgcccccgggcatggcgaaccgcagtgttgccatgggcgtggccgtcgcgttcgtggccatgaccgcgctctgttgcgcgccgggcgccgcggagttgcccaggctggaccacccggccaggagtgacggatcgctgaagctgctcgtcgtcggggactggggacgcaaggggactcacaaccagtcccgggtcgccgaccagatgggaagggtcggggagaagctcgatatcgactttgttatatccaccggggacaacttctacaagaacggcctcaagggcgtgcgcgaccaggcatttgaagaatcgttcatggatatctacacagctcaaagcttacagaagccatggtactcagttctaggaaatcatgattacaggggcaatgcgctcgcacagcttagcccagtcttgaggaagatcgacgaccgattcatttgcatgagatcgttcatcgttaacgcagaacttgtggacttcttctttgtcgacaccactccgttccaactggagtattggactcacccgggcaagcatcgttatgactggagaggggtggcgcctcgaggcaagtacattgccaatttgctgaaggatctggatgtggctatgaagaaatcaactgcaaggtggaagattgtggttgggcatcacaccatgaggagtgtgagtgagcacggggacaccgaggagcttctggaattactacttccagtcctcaaggacaatggcgtcgacttctacatcaatggacacgatcactgcctggagcacattagcagcagagacagtccactccagtatttcacgagcggaggcggttccaaggcatggagaggagtcttccatccaaacaaggacaagctccggttcttctacgatgggcaagggttcatgtccctccagctgcaccaagaccaggcccacttcatcttttacgacgttttcgggaacatattgtaccgatggagctcgagacatccccagtcctccatgtatctcgatgaggaatagattagattgattttgcaccattgatatgtacaaaacaccgcatgtcaactgtcatgtatgtgaaatgatgagtgttggacgc

SEQ ID NO: 25748 - DNA, 729 bp, Zea mays
  Clone ID: LIB3959-004-A10_FLI
tactatctaccacaactagttgccagagttcgtcatggacttctacaaagagttcgtggagacttcgtccgatgacgattccgaagactgaggtcgacactcgacaccatgtacgtttagcaagcccttgagcaactaggtgttggaggttcgagcgggcgtcgtagacgctcttccttgccacgtctagtaatccatagggatcacagtgctagcgaaaatctgataaagctccactacttcggtccaaatcctgtctatcccgcccacattttccaacgaaggtttcggatgcagcggcctttgttcctgcgtatccttagaggtgtgcagcaagtggacggatttttttactgttaggtgatgctacgggtttagcgggactcggtccgttgcaaaaagtctctgctgctttgcgtgtcctcgcatatgggttgcctacggatgctgtcgatgagtacattcaaatcggacaaactaccgctagggactgtctcatccgtttctgccatgcaatcatctcatgctacaaccaacgttacctccgtattcctaacagaaacgatgttgctcgcatacttcgtgtcaacgctgataggggtttcccgggcatgcttggctcaattgactgtatgcattgggaatggcgtaactgtccaactgtatggcggggtcaattttgtggccggaactcacgtccaaccatgatattagaagctgtggcgtcgt

SEQ ID NO: 25749 - DNA, 1464 bp, Zea mays
  Clone ID: LIB3959-004-D11_FLI
cgcggaggacggctactccggcgtcgaggtccgcgtcacccccatgtgcatcgagatcatcatccgtgccacccgcgcccagaacatactcgcgagaagggccggaggatcagagagctggcttctgtgattcagaagcgctttaacttatcagagggtggcgttgagctctacgcagagaagctgaacaaccgcgggctctgcgacattgcccaggccgagtcgctccgctacaagcttctcggtgaactcgccgtgagaagggcatgttatggtgttctcttatttgtcatcgagagtggtactaagggctgcgaggtgtgagttccacaaataaaaaccattccagtttttgtttctatctcgctgcaccatgttatcctgacaatttttgctagtgtgctatttaaactgatggaacaattacagaacactttcctttgtcgaaattcatgagtgaattgttaacctagtatggtcctgcaggatagtgtgcatcagctttgccctgttttgatgcgtcttttgctgaaagtgtttcctgctatatcaatccgagttaaatgggcagttgggttaagcatatctgctttctccgacaatcattttcctcacatgtactcaggaagttatttttttgcgttctatatgctgctgttatctgttttgttggttagctttgtcagatatatttgtttcaacgacaagttagtgtaggctagagttgaaacccaacaaaaaccatatgtcaaggttaaagcgataggctaaatctttggtatatttcatcctttcaaatctcttactgctttatgtcaacttcgaccttcctctatctctctttttattgctattgtgacttgaaagatgttagaacaggtattctacatttatgttcttctcatccggattgccatatgttttcttcagttctgcacaactagttgctctgcaggatagtgtgtatcggctttgtgctaacttatatgcattttgtgccgtaagtgtttcctgctatatagactgaaggaaagtgggcagttgggttagacttgtatcctgtcttttccaacaatcattttcctctcatgtgacataatacatttattcttggaaactagtttttgaattgctgtcttagcatttacatgtttagctgctttattatactgtatgcatccaggggtatggaatatggtctgttgcatgtgctttttcctggtatgcaaagcatgtagtttgaattccatgggttgtgttatatgtttcgctatctaagtcagcttcatctgaaaatgataagcagatcagtttcaattggaacatgccaagctgaagcgatactcacctgcaaggagcgtcttctctgtgtactgcgtcgaagctttacctttttatgtaaattacgctgtaaatgtacagttcctctggacactgaatttctaagggctttttttatctttc

SEQ ID NO: 25750 - DNA, 1627 bp, Zea mays
  Clone ID: LIB3959-004-G2_FLI
atcaagcagctcgctgcaagttgtgaacgaacataccactaccatggcgtcgtcttcatcggcattgttggcgcttccggttcttgtgctttctattgccttctgcattgttcatggtgcagatgatgatgcgcaaaggtacatggtcgtagcatctagttctctggagccatcagaagtctgctcaggccataaagttacctcatctaagaatggtgccacggtaccactggtccaccgtcacggcccgtgttctccggtcatgtccaaagagaagccttcgcatgccgaaacactcggccgagaccaactacgtgccgccaacatccacgcaaagctttcttctcctcgaaacagtagcgccaaagagctccagcagtcgggcgtgactatcccgactagctccggctactccctgggcaccccagagtacgtgatcaccgtcagcctgggcacgcccgccgtgacccaggtcatgagcatcgacacaggcagcgacgtctcgtgggtgcagtgcgctccgtgtgctgcgcagtcgtgctcctcgcagaaggacaagctgttcgatccggccaagtccgcgacgtactccgccttctcctgcagctctgcccagtgcgcgcagctcggcggcgagggcaatggctgcttgaactcgcagtgccagtacatcgtcaagtacgtcgaccactccaacaccacggggacatacggctccgacactctcggcctcaccacgtccgacgccgtcaagaacttccagttcgggtgcagccaccgcgcaaacggcttcgtgggccagctggacggcctcatggggctcggtggcgacacggagtccctcgtgtcgcagacggctgcgacctacggcaaggcgttctcctactgcctcccgccgccgtcgagctccactggagggttcctcaccctcggcgcagctgcaggtggcacgtcctcgtcgcgctactcacgcacgccgctggtgagattcaacgttcccacgttctacggcgtgttcctccaggccatcaccgtggccgggaccaagctcaacgtgccggcctcggtcttctccggcgcgtccgtcgtcgactccggcaccgtcatcacgcagctgccgccgacggcgtaccaggcgctacggacggcgttcaagaaagagatgaaggcgtacccgtcggcggccccggttagcatcctggacacctgcttcgacttcagcggcatcaacacgatcagggtgccggtggtgacactgactttctcccgcggcgccgtcatggacctcgacgtttccggcatattctacgctggctgcctcgcgttcactgccacggcccaagatggcgacaccggaatcttggggaacgtgcagcagcgtacgttcgagatgctattcgatgtcggagggagcacccttggattccgccctggcgcttgctaaatttctattaataatttcaagggaatacgggaaattttcgtcccaaaaagtaacgtatttgatgaaaatccatccgaataagcatgaaccatgaatgaacatttagatgatgtctatcaacaacacggctttcgaaattttaatcaagactataaacagatttaatagtctctggtgcagcat

SEQ ID NO: 25751 - DNA, 1080 bp, Zea mays
  Clone ID: LIB3959-005-B3_FLI
gattcgctgaactcatggctcgcgtctacgttgggaacctggatccgcgtgtcacggcgcgggagatcgaggacgagttccggatgtttggggttctgaggagtgtatgggttgctaggaaaccaccagggtttgccttcattgactttgatgaccgcagggatgcacaagatgccattcgtgaattggatggtaagaatggttggagggttgagctgtcaactaaagttggtggtggccgtggccgagaccgtaacggttctgatatgaagtgctatgagtgtggtgaagctggccactttgcacgtgaatgccgcttacggattggttcaggaggcttgggtagtggaaggcgtcgcagccgaagtcctagatatcgcagccgcagccgcagccgcagccgcagcccaagatatcgaaggagcccaagctatagcagaagcccgcgagatcgttctcctaggaggcgaagttacagcaggtcgccactgggatctcctgcacggagtctcagcaggtcaccgccgctgccgccgcctcctcccagaaataacagcaggtcaccacctggagcccgagaagtgagcaggtcgccgccgccacctcctcccagaaataacagcaggtcaccaccggcagcccgagacgtgagcaggtcaccaccggcagcccgagacgtgagcaggtcgccaccaccacctcctgatgccagaagaagctatagtggatccccaggacagcagccacaacgcgacgagtccccatatgccaatgacgcctgagattctcttagctgccccaagatgctggaaaatgctaggggcccccagcatgttttgcctgtccggtcggcacaactgtaattctgtaggatcgagtctgagattttgttccagtgttttgggtttcccttgacacatcgctgctgatacaattgtggaggcaggagcacaacgtttctgttttaagtattgactggatgactttgggcgcttgtagttgtcaaggcaggacctgatttgtgttaggcttgtattactagactgcattcgaatttggagaaagtgttcatcgtgctgt

SEQ ID NO: 25752 - DNA, 1109 bp, Zea mays
  Clone ID: LIB3959-007-A5_FLI
gaaaagtacactagacttcattattcagaacacgtacacctgaaaacccccttccagaagatgaaggccgcctcgaacaagcatgcaaaatctatgttcataggaattttgtggggaaaactctcgcattctagacgacgaacaagcatcaagcacgcaggctactagctgcagtcttgtaaaggtcgtcgccacgtcccagcagcgtcgctgctgctgacgacacggacggttcgggcttcttctttgttagttaacgggcgcgcggttatttactgctagcaggagcagcagtagtgattttgtgtctgtaagcaggagctgggctcgcggcgaggctaccgacgctcttgcgccacttccacgagtcggctggcgtgctgggcagcggcggcagcgggaggacggccggccgcggccgacggcacagcccgaacggccacccctcgcagtcccggaagcgctcccaggcctcgggcgaccgcagcgtcggcgggggcgggtctgtcagcatgcacgccgacgacgccacggtcgccgcccggctcgtgctgcgcgtgaagaagctcttcacggagaagaacgcctcgctctcgtcgtccgcgtcgcagtcccccccgtcggctgcctcctcctcctgctcctcctccgcggccgttccctccaccacgacgcacgtgcacgtcttgggacttgacaccgtgtcgaggacggttcttggatcgagcggggtgtacgaccaggcgaaagcagagctcgacgacagaggcagcgtcggcgagtccacgtccacgccgcacctggaccgcctcttcatctgccggctcctcatctcgttgaggatcacctgcttggtgccttgcgcttcgtcgaggacgctgtcgtcgtcgctgtcctcgccggagctccacccggcgccggcgggggtcctgacgcaggggacatggcagtgcgcgtaggtctcccggatgagcgacgacaaggacttgcagtagtgactggccgcgggcagcttggggtggaactcttgcgccaagcaaggcattgtgatcaataatcacacacacatggaacgatcaccgatgtgttgcagctaagctacggatcga

SEQ ID NO: 25753 - DNA, 306 bp, Zea mays
  Clone ID: LIB3959-007-H10_FLI
ctcgcgcaggccgccgacgcctggctcaggctcctgcgcgccgaccacccggaccaccgcttcttcgccgcccggcggcctcccaggagatggtgatcatttgagtgtatagagtactctctctctctggcaagtctgaaggtagttgtcctgaaaaaagaaacggctgaggtagttagggttcactagcggaaccggagtgataaagtatgttcatcctgtagtttcaatgttttttccttttttttgtatccgccatgttctcaggaaaaaaatgtatcagaaaacgtataataggtgtagagc

SEQ ID NO: 25754 - DNA, 1053 bp, Zea mays
  Clone ID: LIB3959-008-A12_FLI
ctcattcctgaacccctcccccaagtataccagactaccagtcacatccgcatggcctcccgggtcacgaggctgctcctgcaccgccgcctcaccaccgcagcggaagcctccgcgcgccgcgcgccgcaggctccctgtgcccgcgccgctgtctccaaggatgttgttaaggctgaagcttcatctttgaaaaattcaaggtggtacattactaggtcaaacacttcaggtcctttgactactcgttatgagtgccgcaaagtatttccttgttctgtaaggccatctgcatcttactctacacaagcttcagaccagaagggaaaacaggaagggaaagacttgtcaaatgtagaacacccctttgatgatattacctacaatatacctgagaagccagtgacatttactgaaggtgcttcttatagtcttgtaatactcgccgggctcggaattgcaggactggctggatatgctgtgttcaaagagcttatatttgagccaaaagagtacaagatatttgggaaagctctagcaagaattcagagtgatagtcaggtcacgtcaaggattggccaccctattactggatatggccaggaaactagaaaccgtgcagctcggcaaagaattccaaataagatttggacagatgaggatggtgttgaacatgtggaggtgaactttctcatccgtgggccacatggagctgggaaagtgtattcagagatgttcaaagacactgatcggacgtggaagttcacataccttgttgttgatatcgtgtcaccaccacatgcaaaaacacaactgatgttagaatcttacttaccagcataaggatgcaggaaacagaggcagttagcagtgccatgacatctccgaggttcatctcctacatatatattgtatctattttacttcatatttgtaccattcttgatgtttacattattttgtgtgttgtattttcatttgctcataaaagttttgaattttgatctttcctgaaataatatcaaacagtaggatgattgctgttttaccatt

SEQ ID NO: 25755 - DNA, 1478 bp, Zea mays
  Clone ID: LIB3959-008-A6_FLI
cttccccagtctgccgtcatccagcagcctcatccaccaccgctcatgaccggtccttatctcgttgctagattttctctcctccccgtctcctgcaaccggccgccatttcccagcatgccatggctatggcttggctcctggatgtcatggagcacggcccttccttgcctctccgtagcgccaggacctcctccgagctctgtctgctccgcttgaccgtcagaccctgcttcctctcgtgtctcgcttcccagccggccagacactctctcctcgtcgcgcccttggcctttcgcacagttggacgacctcctctgtctattgttgccgtcatgcgtcgcttgccttagcgcacggtttcccagccatggaactccctgcgtgcacccgaccagatctccctggtccttgccggagtttgccggtagcccgcgtcgtccctggcttcagctccagctcgccggccggctgctcgaccccgtcagtccctgcgtgccgccgtgtccctgccgctcaatcagccgtcgttccctgctcgactctagcagttcccatagccgtcctcgttaaattatgttgccgtgctgctctgcgtgatgcaggccacgtccctgttctgctcccgcgccgctccttccctttcgcctacttgtcgtccatgggtgtgccaccgtgaactccctgctccagttcgtcgactcctgcgcgctcggccatctctactcgctccctcgacatcgtgtgtcatgacccctgctcgtcttccccaacatgatgtcgtgccatgtccttgccatcagcctcaccttgctgctggtccactaccttggcgtcagcttccacagcacctcctcgcgccctcccggtagctggcgtgctacctactcggtgaaatatgaaaaccagtggccgatcatgctccgccattaatttcgcttcgcagctcgtctgatgttatagtgctgctatgccacgacacgcgtgccggtgcatcgtctgtgccttgtgttcgtgctggttataactttgtgctgctattgatggtgttaagtgccggtgggctcggccttcttataagtctaaattgcaatctcgctgatggagagtacgtgctcgtccccgagcaaggagctgtccacgaggaagaccaggagcaagctcccaagactaccatcgaggatctccccgcagccccagcatttgaaggtacgcttcaggacatggttgatggtgtgacttggcctaccaccctaccaccgggatggacggtcgagtgggatgctgctccggcaggagaggagcatgaggggtagtgggctaggccttgtcctattcctcgctttcgacaatatcgatcatccgctgcagtctattttgtggacttatataagctacttgaaaaactccgatttatgtaataactctagtactttaatttgaggttttcctattttattgtatttcttctgtgaaac

SEQ ID NO: 25756 - DNA, 1046 bp, Zea mays
  Clone ID: LIB3959-008-B9_FLI
gacgtcgtggtgacgcgcgagcagggaaagaacgccaggctcatctccgcgctggaaaagcataatgtacaccctctggaacttcctcttattaagcatgttgaaggccctgatacagataggctttcagatgtcctacgtaatgacaagttcgactggattattgtaacctctcctgaggcagctgcaatgttccttcagggatggaagactgctggaagtcctaaggtgcgagtagctgttgttggagaaggaactgcaagggtttttcatgaagtatcagaatctgatgatcaatctctagagcttgcattttcaccttccaaagctttgggtaaagtcttggcttcagagcttccaagaagcaacgagaactcatgtaaagtattgtaccctgcatctgcaaaggctggccatgaaattggcttcatgatacttgattatttgcaatgcagaggatgtgctatcagaacgaggatttgacgtgacccgactgaatacatatacaactgttcctgtagaagatgtcgacccactgacattaaaccttgctatatcagctccagttgttgcggtagcttctccttctgcactgagggcatggctaaatcttatctcaaaatctgataactggaacaactccgtcgcctgcatcggtgagaccactgcgtctgcagcgaagaaactgggcctgaagagcatatattacccaacgacccctggacttgaggggtgggtcgagagcattctcgaggcgctcagagtccacaggacagcatcaaaagaggccccaaaacgttgaaaacgggcggatggcggagcttcttcttggcgttggtagccgtccgcagtgtcgaagaaattctttgcttctttgacgacaattgccccccgttgagggaggtggtggtgtcaagccatggctttccactggcccagtttgtaatggattcttgggccgaaaggcccatctctatatgtcttgactcgcaaggcgattgcatcagtccatccatccatttcatggagggttttaggagtgccgt

SEQ ID NO: 25757 - DNA, 1003 bp, Zea mays
  Clone ID: LIB3959-008-C10_FLI
atccacaagtttcgtgggtagaggaggcactagatactgtgccagatcggggtctggtagtggcagttgggtgattacgacggagtgggatgggcctcctcgacaagctgtgggacgacaccgtcgcgggcccgcgcccggacaccggcctcggccgcctccgcaagcagcccgcgcgccccgccgccgttaagatcagtgatccggccggggacgctgcagcgctcgtgccgccctcgccggcttcgggtagcgaggagacgccggtgaaggtgacgcgcagcatcatgatcaagcgccccgcggggtacccgtcttcgccgaggagcgcggcaagcacgccgccggcctctccacttgggactaccccgcccatctcgccgtttgccggcgctggtggtcgcttcagaaggaaatcatcatccgacgcatatgagagggcaacccctccagggacgaccagccaccctcctcccttcgaagtgtgaaccggctgcaccctcacacttgttttgctccttgacaagcatctcttcacctataataaggtagaggcagggaggagagaagacgacatcaagaggggaacggggatgagttgcgggtttacctctgctgtgatatattgtaggtgccactatgtgtattgttcccccctatctactacgtggcataggttgtattctagtatgttgaaagctcatggtgccgtgctgtatcaataaggtgttatgcgcatagagtggctcaggaccagggctgcgtttgcgctttgccactggctgtgttgtatgtttcttctgctgctatgccattagggtttagggatggtgtgtggatggcgtcgtgcttgtagtgttagctggatttgaagcggactacatgtaggtttgttcaatgtctagtatctattagctgaaggtgtttgcctgtaagttgtaactctctgtgaactgtgatgcgggataatgctaagaagaatagatgatcgttggagtctgtc

SEQ ID NO: 25758 - DNA, 1290 bp, Zea mays
  Clone ID: LIB3959-008-C12_FLI
cgcagcccgcagccacccgcgcatcctcagtcctcatccgccactccgtcgaacgcccctgcgcacgctccagctgctatgctcctccgcccgcgcccctccttcttccgagccgtcgtgccgccgccgctcacccgtgcctgtgccccctcccgtcgcacgctttcagcttctgcagaggcgggaacagcctccccgaaggatgcagcgtcagcgccggttccggcggccacgcgcaagaaccccaggaaggccgggtcgccacctatggggatcgtgaagacggcgctgtttctgccgcccggggtggagcgggatgcgttggtgcccgcggacatggtcataccggggtcgaacatcgtggtcggtccctacgcaggggacgcgagggtgaagggtgctgagttcgtcaagagcagcgcgcgcgcacgggactgccccaatgacgaccggcccgagttcgccgtccttggccggtccaacgttggcaagtcctcgctcatcaacgccctcacccgccgcaaggaagccgcgctcacttccaaaaagcctgggaagacccaaacaatcaatcactttttggttaataagagttggtaccttgtggatttgcctggttatgggtttgcagctgcatcccaatcagctcgaatggactggtcttcatttaccaagggttacttcttgaacagagataccttggttggcgtacttcttcttattgatgccagtattccacctcagaaaattgatctagactgtgctaactggctcggtcgtaacaatattggattgacgtttgtgttcaccaagtgcgacaaagtgaagaaaggtaaaggagggcggcctgacgagaacatcaaggagttccatgaaacaatcagcgggctttatccagatccaccgccatggatcatgacaagcagcgttaccggattaggccgcgacgggctactcctccatatgtcgcagctgaggaactactgggataatgaagcagtctaggtggagctacatagatcaagtgccactagcaacggtagcagtacgtgtatgggaacagtcatatggcctaaactttcatcgatagatgtcgcttctcatggggcttcttgttcagttttgtttccgttttttttttgggggccttttgatgtatagttgaaatgcggttgctcctagtttctgtttcactcaccctgtacaatgcccagtctcagcgggagcttcatgacattgttactaagattcacaggtattgaagacagtacaaacaagttgcatcctcgt

SEQ ID NO: 25759 - DNA, 791 bp, Zea mays
  Clone ID: LIB3959-008-C6_FLI
cttcctgctggcagcttccctctccctccgctgctgagcaagctgatccaccgccatggggctggcgatggggaggcttcttgggtggaagaaggaggcgcagatcgcgctgttgggcctcggcggcgctggcaagacggccattctgcacaaactcaagctcggccacgcaatcaccaccggaccaacgatagggttcaacagcgagacgcttgaatacaatggcatcagcttcagggtctgggacgtgggtggtcaaggcgagctccggcccttgctaaggcactacctctatggcgtccagggcgtggtattcgtcgtcgacagcagcgaccgggagtggattcttcgagccaaagatctgctgaacatcattctggacgaggaccagttcaggaatagggatctcgcgctgcttgtgtttgcaaacaagcaggaccggccgaacgtcatgagcgcagcagagatagcggacgagtttgggcttccgtcacggctttgcaaccgtagatggcacattcaaagtagttctgcgatctctggagaaggcctccacgaggggatggcttggctctgcaccaacattcgataggaccaagatcctcctccttcacaaaagactacagtacaaaaggggggcatgctgtttatgtttttgcaggcctaaggaattgtaccagcagatgagatacatgattatgattgctggacaaggatagtttgcagtgtgatgtagaacctgttaggatttatgggctaggcccaattgagaaattcgaataaatcgcagg

SEQ ID NO: 25760 - DNA, 1716 bp, Zea mays
  Clone ID: LIB3959-009-A12_FLI
tgcagatcaaggtagaggatatggatgcgtatgcccctaaagatcttttggttgtcactacaggttcacaaggagagccacgtgcagctctgaatcttgcatcttatgggggaagtcacgctcttaaactatcaaaagaggatgtccttctttattcagctaaggttattcctggaaatgagacacgggtaatgaagatgatgaatcgtctcactgatcttggcccaaaaattatcatgggtaaagattctggcctgcatacctctgggcatgcctaccgagaggagctggaggaagttcttcggattgttaaaccacaacatttcttgcctgttcatggagaactcctatttctcaaagaacatgaatcacttggaagatcaactggcatacggcacacaactgtaataaaaaatggagaaatgcttggtgtatcgcatctaagaaacagaagagttttgtccaatgggtttgtttcattagggaaggaggatcttcagctcatgtatagtgatggtgataaggcttttggtacatccactgatctctgcattgatgagagactgagaatcgcatctgatggcattatttttgtcagcatggagatcttccgacctcagaaggaacatggtttagcgcagtctggtttgaaaggaaaatttaagattacaacaagatgtctatggcttgataatggaagattgttggacgcactctacaaagcagctcatgctgcattgtcaagctgtcctgtgaattgtccacttagtcacatggagaggatggtagctgaaatcttgaggaaaatggtacggaagtatagtgggaagaggcctgacgtcattgcggttgctatggagaacaccacagcaagtttctcagaacacctcgatgctaaatcatctggaaattttggaccttcctcagctactagccatctgagcaggagtccagctatgagtcttgaaggcagttataaaacacacccagacaacccagaggtggatgctgaagaaacccttcctgaggccgcgagaacaacaccggatgatgcaaccacaagttccaatggtgaagcattcttctcttcagatttacatcagcctaaaacattggagcacttctgggagtcattcaaatctcctacaactgttaaaattgcacggattgtcaatggggggaagaagcaaaatctcggcaagattggcataatgggtaaggactcatcaatccagtcagctccggctccagctaaatcttcaaaaaagaacaagtggaaacctgaggaaatcaagagcttaatacagatgcgtggcgagatgaatgagagatttcagagtgtgaaaggaagaatggtcctgtgggaggagatttccgacaacatgttgaagcaaggaataagtcgtactccggcacagtgcaaatcgctttggacatcgttagttcagaaatacgaggaaagcaagaaggacgcggagagcatgaagacgtggccgtatttctcggccatggataggatcctatcgcagcaaggggaaatggcaaccaaaggatagagaaggctgtagcttagtggtagaagtttagaacatttgatatgttgtagcagagcccagtcagtgtagtgaggatatgtactgtgtacaggtacaacacctggcgatttattgggaccggattcccttgttctgagtaaggtcgacggtcggtagctcg

SEQ ID NO: 25761 - DNA, 1132 bp, Zea mays
  Clone ID: LIB3959-009-G7_FLI
gcagcagccggcggcggccatcgcccaggagcccggagctgtttcttcgtcgcaggaatgggcaaggacggcatccagtacgcagtggtggacgccttcacggcggacccgttcaagggcaaccccgccgcggtgtgcctcctcgaggacgccgccaaggccgccgacgagcggtggatgcagtccgtcgccgccgagttcaacatctccgagaccgccttcctcctccgggaaaagtcctccgcggccggcgccgtcccgctgttccagctccgatggttcacccccgtcgctgaggtggagctctgcggccacgccacgctggcttccgcccacttcctcttcacatccgtcctcgcggagcacgagaagctcgtcgagttctcgaccaagtccgggattcttacggccaaaaaggtccctgcgccgcagagcacgggcgtgtcgggcgaggggaagctgttcattgagctggatttccccacgattgaccttgttgattgccatccttccgagctgccggcaatccccgagaccctcaacggagcctccattgtcagcgttcacaagtcaacgacggccggtgacctcattgtggagctttcatcaggaaaggaggttgctgatatcattcctaaccttcatgaaattaaaaagtgttccggcagaggaattattgttacagggccagcgcctgctggatctggctacgacttcttcacgcgttttttctgcccaaaatttggaatagatgaggatcccgtttgtggcagtgcgcattgtgttttagcaccttactggggtgggaagctggggaaacacaaactgatagcgtttcaagcatcccctcggagtggaatactatacctggagttagaagctgcaggcaggagagtgcgaattcagggagaagctgtcagtgtgatgactggaaccctcttagcataatccccggtcaatgaacatcctatgtcttaacttcagttgtgtggcatgatttctctgcagctaggaataaattaagtctcttttcacctgtccaaaggtgttagatacactgcttccagactatgaaagcagagtgtatgaggatgtttcttttgaataaatcagtgggtgttcaatgtgtgcg

SEQ ID NO: 25762 - DNA, 1536 bp, Zea mays
  Clone ID: LIB3959-010-A9_FLI
ccggaccccagttccgtgacggcctcagtcagtccccgaggaggaggaacagctaggtgcggaaaggcagctctcagtctcacactctgccaatcccagcctgagttctgctctgctctgcttctagccatggtggcctcgcggatcttgctcccgctgctgctctccctcttcctatgctcgcattgctgtaccggagcggcggcggcgaagcggcagctgctgcaggcgcagtcgcaggtgaagttcgacttctccccgttcctgatcgagtacaagaacgggcgcgtgaagcggctgatgggcaccaacgtggtgtccgcgtcgtcggacgcgctgacgggcgtcacctcccgcgacgtgaccatcgacgcttcgacgggcgtcgccgcgcggctctacctcccgagcttccgcgccagcgcccgggtgcccgtgctcgtctacttccacggcggcgcgttcgtggtggagtcggcgttcacgcccatctaccacgcctacctcaacacgctggccgccagggcgggcgtggtggccgtgtcggtgaactaccggctggcgccggagcacccgctcccggcggcgtacgacgactcctgggcggcgctcaggtgggtgctggcgagcgcggccgggtcggacccgtggctggcccagtacggcgacctgttccgcctgttcctggccggcgacagcgccggcggcaacatcgcgcggatcaagggcgtggcgctgctggacccctacttccagggccggagccccgtgggcgccgagtccgcggacccggcgtacctccagtccgcggcgcgcacctggagcttcatctgcgcggggaggtacccgatcaaccacccctacgcggacccgctcctgctgccggcctcctcgtggcagcacctcggcgcctcccgcgtgctggtcaccgtgtcggggcaggaccgcctcagcccctggcagcgcgggtactacgccgcgctccagggcagcggctggcccggcgaggccgagctgtacgagacccccggcgagggccacgtctacttcctcaccaagcttggctcgccgcaggcgctcgccgagatggccaagctcgtcgccttcattaaccgcgactagcagccgccggagtaaatccggtacatgcaggccgctgcagtgccgcgacaacatcagcatacctatagtaactagcgagagcgaggtgattggtagtggtaattacatttttttttgggtccttgatgatgattactgtgcgtcggaagaaaagaacggttcctctctccagaaacctcgtccggacggataggaggggaccggtgtgttcgcttgcgcggcgttgcgtgtcattgactgcagtctacaggctaccgtgccgtgcactgttaactgcgtgtagcgcggtactgccagactgccagttacagtagtcttcagagtataatattttttagtatagaagcgtcactctactaccgacccaatgcatcgtgtaacttttgtggtactagtgctatatggtggtgattt

SEQ ID NO: 25763 - DNA, 1253 bp, Zea mays
  Clone ID: LIB3959-010-D6_FLI
ggagaaggcggggtctctccctgtgcccagcgtgcaggccatggtggccgccggtcgtcatgcaccagtgccaccaaggtatctccgtccagatctggccgcggatgtcgtcgttgccgacgacgcgacgaccatccccatcatcgacttccagcgactgctgctggtcgacccagaggaatctgcgcgcctccatgcggcctgccaggactggggcttcttccagctgataaaccacggtgttccggacgatgtgatggaggcgatgaaggccagcacccagtcattcttcgcgcttcctgcggaggccaagcagcagtaccgtcagcaggcaggacagctggaggggtacggccagctgttcgtcgtctccgaggaccagaagctggactgggccgacgtcctctacctcaacacgcacccgcccgagcaccggaacctcagcttctggcctgctggtgagagcttcaggcagacgctggacacctactccgccgccgtcaagcacgtcgccgaccgcctgctgggagccatgtacatgaacctgggcctccagctgagcatcatggacatggacccggagcggggtgccgggatacagtcggtgaggatgaactactaccctccctgcgctgaagcggcggacaaggtcctgggcttctctccgcactccgactcggaccttctcaccctcgtcctccaggtcaaccagctccagggcctgcagatcaagaggccgcccgacggcggcggtgcctgggcctggcttcccgtcacgccgctgcagggcgccttcgtcgtcaacgtcggggacgtcctcgagatcttcaccaacgggaggtacaggagcgtcgagcaccgggctctagtcaacgcccacacggagcgcttgtccatcgcggcgttccactctcccagcatccatgccaccatagggccgctgccggagctcctcggggaccaggaggtgcccaagtataagacgctggaccaccaaagcttcattacgctcttcttctccgccaagctccagggcaagagcttcttggaacggatgaagaagctttcgtagagccaatcggacggaccggaaagttaagcaggccgacgtaaagtcggattacatgttatcggttcggccatagcaatatagcacgcatgtatgtccggattaatttggtgaccgacgagactagttttgtctaccaattcacttttacatcgatttttaaatataaaaaacttacaaaacc

SEQ ID NO: 25764 - DNA, 1709 bp, Zea mays
  Clone ID: LIB3959-010-E11_FLI
gagacggcgaggtgagttctggagacttggagaggcattccgcatcggtatcccgtatccagcaaaggcggcgagccatggaggagggtctggtatcagtggacaagttctccggtggcagccaggcgtactttctgacgcacctccaccaggaccacacccgtggcctcggcgcggtgggcgggtggcgccacggcccgctctactgctctccgaccacggcgcgcctcctccccatccgcttcccgggaatcgacgcctccctcctccgcccgctagccccaggtgcctctgcctccatctctctgttctctccctcctcgggccagtccctctcccttcacgtcactgccatccccgcgctgcactgccccggatcgctcatgtacctcttccgcggagacctcgggtgcatgctgtacacgggggacttccggtgggagctcggatgcgatgaagcgcggcgagcgaagcaggatttactggacgcgcttgacggggataccattgatgtgctctatctggacaacacctactgccacccatcgctcaacttccctccacgccccgtcgtcgctgagcaggtgattgatattattcggtcacatcctgatcacgaagttatcattggtgttgacactcttggaaaagaagacctcttgcttcatatatctagagcactacaaacgaagatctgggtttggccccagcgcctacagacaatacacctcctagggattgatgaaaaccgtgatatttttaccacacagaccagtttgactaggatccgtgctgttccaaggtacagtgtcaccattgataatcttgaagctctaaacacagtgtgccccactatagggatcttgccttctgctattccttgtctttggaagagcagtgaaggaaaggccaaatccaagggtaggtcatcagtgaagtctatcaggtgctcagggagaggtgaaggcctaacagaaatggactgcaatcccttgtcaccaccaaagctgtttgacaaggattcgtatactttgccatattctgagcatgcttgcttttcagagctggaggattttatgcatacattgagtccattgacagtcagcggcatcgtcagctcatcgttctgctatgtgaatccccgtcaccacttcagacatctttgtttagacaataatgttaatgatgacactgacaggacgcccataaaaaataagggtaaggataatgataagctgacaccaaagagttggcgaaatggttctgtgactccaaaagaaaggaaggtcaggatctccagttcaagtctgtatagaagcaaagttacaatgaaacggaaggagtgctgcggtgcaaggatcaatgacactgaagaacacattggtgttacctgacttgtcgctttccaagtgatgttatgttttcttttgtaaagattaacaactggatggtggaagtcttgaagcaatgagatgggatatgctgttccaagccaaacttcagcttgctggtcaggaatctggacgtggtctttggctctctgctatctgttccttagaaccctgtcgtgctagcaagatgcattttggtccagattcggtttgggttgtacagtgctgttccttttgcgatggtgttcagtatttagattgctgaaaccttttatgcatgttagttgctactgatacatctatttgtagtattttcat

SEQ ID NO: 25765 - DNA, 944 bp, Zea mays
  Clone ID: LIB3959-011-B4_FLI
gggatggccacagcgcgcctgctccgttgcgcctcctccaccttccttttcagcacctgcaccaatccgttgcgctcgtgctcccctctcgtccgccgccagcacccccgcgccgccatgaccacggactcctcggccgcctcgttccagaagatccagatccagcgcgaggacaccacttttgatgcttatgttgttggcaaagaaaatgctcctggaattgtggttttgcaagagtggtggggagttgactatgagataaagaaccatgcgatccacatttcccaacttggtggaggatacaaagcactcattccagatttataccgtggaaaagttgctctggatgttgctgaggcacaacatctgatggagggtctcgactggcagggtgcagtcaaggatatccaggcttcagttaaatggctgaagtcaaatggatcacccaaggctcatttcggggagcatgacaattttgttggtttttcagatgtcactgcagccaagtccctggaggagaagctcaaatcttccgggatatcatatgaagttcacatataccctggatgttcgcatgccttcatgaacacttcgcctgaggcactcaagaggaagaaggggatgggtctgactgatgagaaccaggaagccgtcgacctggcctggtctcgcttctcttcttggatgggccggttcctcggatctgcttgattatgtgccgcgtgatgatgtgtggagtcaggtcccatgaataaaatagaataaaataaaatgttcagattcaggaaccatgcaaatggactgggctgtacggttctctggatttgcttgtccttctgtttataattatctacctcagtgtgatttccttattttctgtggatggatgcatattgtggaatagccgtcgatggcttctgacagtaagcagcgacaaggcaact

SEQ ID NO: 25766 - DNA, 1165 bp, Zea mays
  Clone ID: LIB3959-011-F6_FLI
ctcagaaaccaccaaaactgggtgctttctacgtgcttctgcagctaacctcacgccggcggactctagcaagagcacgaacgagggccaagcgctcgaaacccagcgacgtggaagcgcctgcgccgcgagcatccttccagagcgcggggccaaggccaagcagaggtatttatcatcgcagccgatccccagccgcacgaacggaggtcgagcaccagacctcatctcactccgctaccccctcatcctgccatccaccagaagcagtgcaagcatatggcgcgccgtgccagcctgctcctcgccgcggcgctgctcgtcgccgtcgctgccgcggcggtgccgccgacgtgcgagcgcatcgagtgcccggcgtacgaggtggtggacagcgccaacgggttcgagatccggcggtacacggacgccatgtggatcaccacggcgcccatcgaggacatctccttcgtcgccgccacgcgcaccggcttcctacagctgttcgactacatccagggcaagaacgcgtacaaccagacgatcgagatgacggcgccggtgctgacgcgggtgtcgcccagcgacgggcccttctgcgcctccgccttcgccgtgagcttctacgtgccggccaagaaccaggcggacccgccgccggccgagggcctgcgcgtggaccgctgggccggggccaggtacgcggccgtgcgccgcttcgggggcttcgtggcggacgccgacgtcggggagcaggcggcgcggctcgaggccagcctccagggcacccggtgggccgccgccgtcaacgacgcgcgcagggccgacccggcctcgccctacaccgtcgcgcagtacaactcgcccttcgagttcaccggcagggtcaacgagatctggatgctcttcgacgcggacgacgacgccagtatgtgatgcgattccaagcgtgctctcggggcactgaggcgtttagggaaggacgcgcatgcacctgtgcagtgcagctgtgctaccatgaagtatttcgtgctcttgtgcgctagcttcgtttactttcgacttttcgagtaaggaataaggtgcctcttgttgcaataatgataaagctaatcctgcttgtaattacatttcgtggcatggccattccggcaacatgtccagt

SEQ ID NO: 25767 - DNA, 1015 bp, Zea mays
  Clone ID: LIB3959-012-B4_FLI
agaaactcgagactacagactactcacagctcactgtctcacttgaagctctaacagcaagccatggcaggacgagaagcggacaaagacccagagctgaaggtgctcggcgtgtggtcgagcccgttcgttatcagggcccgcgtcgcgctaaacctcaagggcctcgcctaccgatacgtggaggacaacctggacagcaagagcgagctcctcctcgcctccaaccacgtgcacgggaaggtgccggtgctcctccacgacggcaggcccgtctgcgagtcctgggtcatcgtggagtatatcgacgaggccttcccggccagcggcccctgcctcctccccgccgacccgtaccgccgcgcggtcgaccgcttctgggcctcctacgtcgacgacaagctctttcccacctggatacccgtctacaacggcaggacgagcgaggacagggtcgcggcggcgaggcaggtagtggccgtgctggagaagtttgagcgggcgttcgatgagtgctccggaggcaaggcgttcttcggcggggacgctgctggcctcgtggacgtcgtgctaggcggcttcctcgggtggctgcgcgcgtctgaggtgatgtgtggcgtgagggtcatcgaccccgccaagacgccgctgctggcggcgtgggcggaccggttcgccgcgctcgacggcgtcagggaggtgatacctgacgtgcagaggctgctggagtataacaagattaggcgagctcgtcgtgggctgccgtaggtgctgggccttgggccatctatctgccagcatgtggtcagtcaactctaagcaggagactttgacaaggttaaagtttagttcatgaaggtgggcaatctaattaggatgctcatgctttagctaggagtgccattagttttcctgttgaaaggcatgtttggttcctctttcctactgaaagagtttgtaatatctttactactattaagaaggtaaggggtatgctgccattactagttctgtc

SEQ ID NO: 25768 - DNA, 639 bp, Zea mays
  Clone ID: LIB3959-012-E4_FLI
gcttcaggtccccacttttcaagtcacagataggaaaagcaacgctgaagatcaaacggagccagcgatttccgcacctgatctcatcaaactgctggaggagtctatcctaactttccgccttttcctgaagaaggacaagagaaagagcggtgttcttatgagcgctagtcatggccacgctggtagctcgattcaacaagtgcagtcttcactcgataagaaagaggcgaaggtgaaggagctgctgaagaagaggaaagggtggaagagcaaggcttggccaggcacgatggaggaggtccagctgctgttcgccctgatcgacatcaaggtcgtgtcgcgggtgctccggatggggaagctgagcaaggagcagctgctgtggtgcgaggagaagatgagcaaggtggacctcaccgagaaccggctacgccgcgacgggtcccccatccttttcccctgttagaccgacgcccccttcctgcctgcctccgggggcgtaaaccgagaacctcccttgttagttcggcatgccaggggttaccatcccttcggctaccttatcagactatatatgtacatgcctttaggttggatctgaattgaaaatgtccatactaaagtaggggcttaagc

SEQ ID NO: 25769 - DNA, 823 bp, Zea mays
  Clone ID: LIB3959-013-G11_FLI
cagaattccctcccaatcggcggcggcacgatgcgcctccgcagccgggcaatctttcccctcgtccgcaccaccacgtcggccgcgtcttcgtcgccggcggtgctgagcatcggccacgcgctgcgcgagcgccggctgttcacgggggacgacgtggcggcgtacgcggcggtcagcggtgaccgcaacccggtgcacctcgacgacgccgtcgcccgggagctgagcgggttccagcgaggccgcgtggtgcacggcatgctcgtggcgtccctcttcccttccatcatcgctgccagcttcgtactttttctttccggcatttcgtccaacagcgcgtgagcgtggagcctcacagtgtggcttggcctgatagatagttgggttttgttggttcagcctggcgctgtgtacgcgagccagacgctcaagtttgcggcgccggtgtacgtcggagatgaggtggttgctcgagtccaggcactcaacatcaggatgatggcggcggcgacgaacagctgcacggcaagacgatatgtcgtcaagttcgcaaccaaatgcttcatggacgaagaggagggctctgttgcaattgaaggcgaagcaatggctgtcctgcctacactggagctcagctctcagtcgactagaaactaggagtggcctcaaaccgggtgactagtcacaagttgctgttgcttaatcatacccgaccttgtaatccctctcttcaggaacactgtgtagaatgcgtgtaaactaaacttagtgtagccttcacattataagcgaggagtgaaataaagctgttgtttatgcc

SEQ ID NO: 25770 - DNA, 1217 bp, Zea mays
  Clone ID: LIB3959-013-H10_FLI
gcgttcttgatcgcgctcttattactcctcaccgtcgacatcacgcgcacgcatcgaactttgtatagcagctagagcaccagagccaggagcggcgcggcacgggacatggtgaagggcgcgcatttccaggacgcggcggtcgacggcggcgccggcggcaatgcggaggcggcgatgcagggcggcgccaagcggcagtacaagggcgtgcggatgcggagctggggctcgtgggtgtcggaggtccgggcgcccagccagaagacgcggatatggctcggctcctactccaccgccgaggccgccgcgcgcgcctacgacgccgccctgctctgcctcaagggctccgccgccgccgacctcaacttccccgtgcacctccccttccacgtccccgccgccgccgccatgtcgcccaagtccatccagcgcgtcgccgccgccgccgccgccgccagtggcggcgccacatgcagcccgccgcaactgcaagccggcgccgccgcgtcggcgccctactcggccggcggtggcgccggcgccactcctccgtgcagctacggcgacgcgtcgtcgtcgtctggcgttagctccccggagaccggccggaacgctggcctgtgctacggcacggcgcactacgacgacatggacatggacttggcgggcgacgccgacgcggacctcgccgcgctcgcggacatcgaggccttcttccagtcgcctaagtgcatggagtacgccatgatggacccgtgcagcacgttcttcgcaccggcgcccgtggctacggacgcggccagcgagtgggcggaggaaggcgagatcgacctctggagcttctcgtccctcaactgatccaaccatcgtcagctcctccacagacatcagtttagaggtgaagcaaaagcaagcctcacgtgatcatcgtccatccactcaacacttagcgattaattacagctgcaacctacgtgatcaagaattggtcacggtataaataagcattaaggattaattgattcatactagtattagttagttattttactatactactagtgtctcatggagctacatgttttaaggcagctttccatggagtcaacgacctcccctcagttgcattgcatggcatgctatgggtaggggtaggaagctgtgtgtttctgcaagtgcaagtaatggattataaattatgatgatgtactcct

SEQ ID NO: 25771 - DNA, 1691 bp, Zea mays
  Clone ID: LIB3959-014-E12_FLI
cctagactagactcctcaccgaggcgacgacgcaagcagctcagcgcgccgccgctgccccgtcccgtcccgtcccgcgccacgccggcgcctcccaccccgtgcgcgccggatcctcgttccacgcgccgcggcgccgcccctggaccggtcgagaggagcggagatccatccatccggccgtcggtcggtgtcgtcgtctgtcgttggctgtaatgaaaagctgggcctgctagagccaggagttttcgttgcaaatctgcgtctccgctatgggttcaggcaacttgatcgtgaagaaggtggtaaagcacagctcttttgatctggacattcagctcgataagagttggatggaggacgttacctgcccgatctgccttgattaccctcacaatgcagtcctactgagatgcacatcttatgagaaaggctgcaggccgtttgtttgtgatacagaccagacccgttccaactgtcttgagagatttaaatctgcatatgaactgccttccaatgcgaaagtttcatcttttgccatgcctcctctcgatagcatcattcatattgtgccatcgaacgcaaacaaccgccccagctgccctctgtgtaggggtgatgttattggatggattgttattggtgaggctcggcagcatcttaatcagaagaaaaggtgctgtgaagaggattgctgctcgtttgtcggtaacttcaatgagcttcagaagcacacgcaacaaaagcacccggattcacgcccttcagagattgatcctgctagacaagttgattgggagaatttccagcaatcttctgatattgtagatgtcctgagcacaatacatgcacaagttcccaatgggatagttctgggagactatgtgattgagtatggagatgatgacaatggtgaggactatgaagttttccgcggtgtcaggactcactggtggtcatgtatattctgcaaggcgttttcgagatcttcaagaagtcgtagaagagcaagggaaagaaggggcagtggaaggaggattgggaaccaagctaatcttgaaaattttaacatcgaggttccagcacaatctgttgaattaagggaaattagatttgatgaaattgatgatgaatacatagtcacaggggccattcctagtatggcaacacctggaagaatggctagtttccattacaggtatgcataagtaatcttttttccctcccaattttgctcacatctgttgggagtaatgctattgcaaatgtgtagtactaagaaccaaaggtccttaaaaaagacaaaacacacacagttgcacaaagggctcatgatattccaaacaaaatccttaacatagatgttctacattgcaaaacatgaaagacgagcataagtatgtccttgtcatacatctatggtcccaacttgagctgttcagctgtatatatatatatatttaatcatatcttactctttggcatgttccttgtcgcacctggtggtgttaatgtgcattgatgaatgcttcatctggatcacattatttattctgctctatataatcagtatactatctgttggatattatatttatcttttaacggaactctgacaaaatccaatgcctcatatgcttctgtggatgtagggacacaagatacggacgttgatgcatagaatctgcagt

SEQ ID NO: 25772 - DNA, 1150 bp, Zea mays
  Clone ID: LIB3959-014-H3_FLI
caagctggttctgaaagccatacctttcccttacaccatcaccaccttccatttcgcatccggaaccttcttcatcacactcatgtggctgctcaatctgcatcccaaaccgaggctctccctcaaacagtatgcaaagctcctgcctttggccttgatccacatgcttggaaatgttttcaccaatatgagtttgggtaaggtgtctgtctccttcacccacaccatcaaggccatggagcccttcttctcggtcctcctctctatcctattcctaggagagacaccttctctaccagtgttgggttcacttgtccctattgttggcggagttgtattggcgtcgatgactgaagtttcattcaactggattggattctggagtgccatgacttcgaatcttatgaatcaatcgcggaacgtttacagcaagaaaattctcgctgataaagaggacagtttggatgacataaatctcttctcaataataactgtcatggcattcttgttatctgctccactgatgctatgtgtagaaggaatcaagtttagcccatcatatctacagaatgctggagttaatgtaaaagaattatttataagagcggcacttgctgggacatctttctatttttaccaacaggtttcgtacagtttattggctagagtatctcccgtgacccattcggttgccaactctcttaaacgtgtggtggtcattgtgtcatccgttctcttctttagaactttaatttcacctataaatgccttaggaaccggtgttgctcttgctggagtgttcctgtactcgcagttcaaaaagtcaaaaccaaaggctacggctgcatgaagagactatagaatgatggaggatttggaactatcagtcgacgtggtgaagcagactggccttcacggtagcaaacacatatagtttccccatgttgcatcttaaaaaaaatgtgttctcttgtcaggttctttggatgtgagaagcttgtacgtaagtttcatccacaaggtgtggtggaacacgtgaacaacggagatatagcattcttagatttcaagagaatacaaattttggaatatacttccatgtcattgaaactgacagaatgctctcactattatatatattctttacgtc

SEQ ID NO: 25773 - DNA, 731 bp, Zea mays
  Clone ID: LIB3959-014-H4_FLI
tctctcgtctgttcacctcgtgctcgtggaggagccaaagacatacagccgacaacctctagcatggcgacggctgctgctgctgctacagcgatgtgctccgttccaggcccgagcggcagcatgcggcgccgggcattctgcacatggatcaaagccgatgctccgcgcgtcgcttcttcttccctcgcgcgcccgccgaggttcgtcagggcgtccgcggcggccgtgcacagggtgaagctggtcgggcccgacgggtcggagagcgagctggaggtggccgaggacacctacgtcctcgacgccgcggaggaggccgggctggagctgccctactcgtgccgtgccgggtcgtgcgcgacgtgcgcggggaagctggcgtccggcgaggtggaccagtcggaggggtcgttcctggacgacgcgcagagggccgaggggtacgtgctcacctgcgtctcctaccccagggcggactgcgtcatctacacccacaaggagtcaaggaggaggaagtgcactagagtactcctagtacggagtacttgagagacgggtgacacaagacgaagttcagaattccttgtgtgcttcagtgtttttgtctgtttgatatactgtctacaatatatggaggttgcttccttgaattgcttatcagactggtctgtatgggccttataagttgaaaaccgacgagtccggcccagcagacttgggccatctct

SEQ ID NO: 25774 - DNA, 932 bp, Zea mays
  Clone ID: LIB3959-015-A1_FLI
cttttgatagcaccttcagtctggcattaggttgcagcatgtcttactgaatcaaggcagtaccaactttcacttagattttatgattgtttttttactactagtagcaacttttgggaagctggtgacacactatgtcgactactattctggtattgatcagttgtttcgtattattctagttaaggaagccatggagcacaaggaggctgggtgccaggcccccgagggacccatcctctgcatcaataactgtggcttcttcggcagcgcggcgaccatgaacatgtgctccaagtgccacaaggagatgataacgaagcaggatcaggccaagctggctgcctcctctatcgacagcatcgtgaacggcagcgacgccgtcatggagccggttgttgctggcagcaacacggtagtagctgttgcccaagttgagttgcaaacaatgaacgtgcagcagcccgctgatgttgccggacccagcgagggggtggcggcgatctccaaaggggggaaggtagggccgaaccggtgcagcgcctgcaggaagagggttggacttacgggattcaactgccggtgtgggaacttgtactgcgcactccaccgctactccgacaagcacgactgcaagttcgactaccggactgctgccagggacgccattgccaaggctaatccggtggtgaaggcagacaagctcgacaagatctagggggggttccctacggttgggtatcaggaagattgtaaaccgcggtaactcgtcatgcggaactgctgccttgccccccgcgcctttctcttccatgtttgctgctacaatcttgttgttgggcattgcagtgcacggtgcacacttgtgtagcccgcctcgagaattcctgcctctgcatctggtcagttctaaaatgatttgcatgttggct

SEQ ID NO: 25775 - DNA, 1355 bp, Zea mays
  Clone ID: LIB3959-015-C9_FLI
gtcgccctcttcctcctccttcgctgttgctgttgctgttgcttccgcttccgccgccgccgccgcggaaatcaaactaatctgatcgagaccacaccgttccagagagatcccccaaacaaaaaaagagcacgggatcgaaatggagctcgacggcaagtacagcaaggaccagagcctcaaatgcgaatgcctcctcttcgacctcgatgacacactatacccgttcaactccggcattgctgccgacataaagaagaacatccaagactatatggtgcacaagctcggcgttgacgaggccataagcttggacctatgcgtcctcctctacaagcagtacggaaccaccatggctggcttgagggctgttgggtaccagtttgattacgatgactaccacagctttgttcatgggaggttgtcttatgacaaaatcaagcctgatcctgtgcttaggaacatcctcctcagcttacccattcgcaaacttgtgttcacaaacggtgacagaacacatgcttcaagggccctcaagaggcttggcattgaggattgtttcgaaggagtcgtgtgctttgagacactgaacccgacatctcctcctcctcctgtcccagctcaggaacttgaaatctttgatctaatgaagcatctggctcatccacagcccgcggtgcagctaccaaaatcacctatcctatgcaaaccgtcaagggaggccatgctgcaggctctcaaggtcgcctccattaatccacagacaactatattgttcgatgacagcttcaggaacattgaagctgcaaagcaaattggaatgtgtactgtcctggttggaacatctgagcggaaaaagggtgctgaccatgccttggaaagcctccacaacatgaaggaagcactgccggagctgtgggaggaagctgagaaggatgaagatgtgaggaattcgagcaaagccggaatcgagacatctgtgatcgcgtaatcttttttgttccttggttacaaatgtagccccttctgttttccttggaggacaacacgaggtggtggtgtatgaaaaaagaggagacctcctcaaggggtgggggggactgactgatactacgaccactgatgttacaccccgtaaactattactatccaataagaatgttttcttcttcaactatctaggatggtcattttgttggtgtttagttaaagcagctatccaatatttttttggatccaaatgtgtatgtcctcgctacttggttcttcatgcttatgaatgtggagtgatgatgtcctgttgtccttggattcaccatttacttcattatatatgacaacaaatgctttaaatt

SEQ ID NO: 25776 - DNA, 2441 bp, Zea mays
  Clone ID: LIB3959-016-A8_FLI
gcgaaaccctcacggcgccggaaccccaccagtcctccaccacctcccaattccggaagcgaataaacgccactagattccggccgcggtccctcctccagcgccggcgtcccctcgattggctgcgaaccttgcggcttcgttcgcgcgatcgcagatctgggctggtttgtctagatagaggtgctctgttgcgtaggagagggtgggggcgtcagagctgccggcgttttattttggtcctttttcagccgttgagctgcggctttctcgctaattactcggcgcggcagcagacttggactgcacaagcttgctatctctggttcaattggcccaacttgcgctctgattgccccccaaaactgcgtgcgtgtctcgcagcctgctggaattgctcatctgttcgtctggcgaagcaattggctagccgattacatctccggctcaccttgatctcactgcagtctgctgaaatcgcccgtctctgcgggccattgccgctcgcttcattcgtgggttgctgagggcgccttgggggcctggggcctgaatttgcgtggggcagtcttgggaaagcgcaagggaacctttcctcgtgaccatgaatctactggaggagttgatccgggcgatagagctctggctccggattgttaaggagcaggtccccttgatcgatcccacccttgacccagtgttacttgttcctggtattgctggctccatccttgaagcagttgatgatgaaggaagcaaggagagagtttgggtgcgcatccttgctgctgagcatgagttccgggagaagctctggtccaaatttgatgcctccactggtaaaactgtttctgttaacgagaaaacaagaattactgtccctgaggacagatatggtttgtatgccattgacacattagacccagacatgatcattggtgatgacactgtgtactactatcatgacatgatagtggaaatgattaaatggggatatcaagaaggaaaaactctctttggatttggttatgatttccgtcaaagcaacaggctctcagagacacttgacagattttctaaaaagctggagtcagtgtacacagcttctggtggaaagaagatcaatctcattactcattcaatggggggattacttgtgaaatgtttcatctcactgcacagtgatatatttgaaaaatatgtcaagagttggatcgcaattgctgcaccattccaaggtgcccctgggtacataactaccagtctgctgaatggaatgtcttttgtcgaaggatgggaatcaagattctttatttccaaatggtgtatgcagcaattgctacttgagtgcccatcaatctatgagttgctggcaaaccctaacttccagtggaaagacatcccactgctacagatttggagagagaatttggataacagtggcaagaaaagtgccctgttagagtcgtatgagcctgaggaagcaataaagatgattaaagaggctctttccagtaatgagatcattgctgatggcatgcatattccggtgccccttaatttggatatattgaattgggcaaaggaaacttatgatcttttatgcagtacaaagcttccggaatcagtgaaattctacaacatttatgggattgattatgatactccacatactgtctgctatggcagtgaacagcagccggtttcaagtcttagtagcctcttatatgctcagggaaaatacgtctatgttgatggcgacggatctgttcccgcagaatcagcaaaggctgacggatttaatgcagtggcaagggttggggttgctgctgaccaccggggaatcgtgtgcagtcgccgcgtgttccggatcgtccagcactggctgcacgccggagaacctgacccgttctacgacccgctgagcgactatgtcatactcccaacactctacgaaatcgagaagcatcgtgagaaacacggggatgtcacgtcagtagcggaggactgggagatcatctcccctaacgacggcaagaccatgaggccaggcgagcttcctcctatggtcagcacactgaccacgagccgggaaggcaaggagggtgcactggaagaggcgcaggccaccgtggtcgttcacccggagaagaaggggcggcagcatgtgcaagttagggctgtgggtgtcagccatggtggctaaagccgtaggagccactttggttgtctactctatctagcagtagcagctatacctgtctctgtgcacgcactgtaaaattggatgtacatatatggctatgacctctgtagggactctggttttagaactataaatgggcaccctgcctgcttgtaaatgttcagaaccgaaaacacaggccctgttcttttttttccttttttaaaaaaataaaaagatggtaaaggattccatc

SEQ ID NO: 25777 - DNA, 2168 bp, Zea mays
  Clone ID: LIB3959-016-B7_FLI
ccaaagggaagagggggaaccgggcagagagcagcgcaggacaagacaggcagagaagtcgctagccagactagtctgcgcggtgatccgtcttccctggggtgttccgccgtcctgcagcagaggcagggggttgccgctctcgccgccgcacgctgcggctctgctctgctccgcctgatccttcctgcggcccttgttttttcctctcgtttcaggtggccagccttggttttgcagaactcattcagtggcctctgctgaaaagtgttcaatggcgtcaggagccaccttaagctgggttaaaaccccatttgacacccgaagatttcatgacctatctaatctaagtttccgctgccgaaacccttttggatcaattcagccctggtggctgcaaactgatcaagactcatccctaatcaaggttcgcgtggctgctgattattcagactcaatgccagattcaaagtacacgagagatcggggttatcaccctcttgaagaagttaaagaacgtccaaagaagaaggacctgttgctgacagatattgaaacagctagaacagtagtagaggcaaatagcaaggggttgcttgtatttcctgctagggtacacaatgaacctcatggacatgtttcttggtcggagtttcaatatgttgttgatgaatatggagacattttctttgaagtacctgacagtgagaacatcctggaagatgatactgcaaacaatcctgtgacagttttgattggaatggatggacccattattggagaaagtagtgtggcgattagtgatttcagtgattacatggatggtgaaaattttatggacgttcctgatgagcaccacaccaagattgatacagaaataactgatattctcatagagtgggggatgcctgcaacaatgcgtgcaatacatccgatttactttgccaaatgtttgacaaaggccattcataataataatggggagaagatggatagtccatcaaacggtctctctattgtaggatatctgagacctgctttcatagaggaagagtcttacttgaggagcatgtttcatggtgacaatggtggttattcatctgactggaaagtaaatgaaaccgatgaatacaacagagaaactcggccagtttctggaaccaatcgcctcattgatgatgataaatcaagatttgacttcaatcatgctgaaactagaactgattcaatgatctacaagctggagataatgacaattgaactgttttccatgtatggaaagcagtttaagattgatccacaagattttcaagattcagaaccagatattcttgcaaattctgcttcatcgataatagaacggatcaaagaaaacagtgatcagtgtgccgcggctctcaggtcgctctgtcgccggaaaaagggcctcactgtcgaggaggcaagcttgattggtgttgacagccttggtattgatgtaagagccttttctggcttggaagttaagactgttcgattttcattcaatgcacagtcgctctctgaacgttcagctgaaaagaagatcaggcgaatgcttttcccccgttaccagcgtaaaaacgtgaaagcctctactgaagatgagtcttaacctatcagctgtttttcctgagaaagcatgcaaacacctggttcaaagacaaggtgtcaagggaatcaacacaatatcatcttatgcgagtttgctaggagatagcgcacaacctgtcgactatgagaatgaccaaaaacatcagagtaataaggtttgccatgcatggtctctaacatgcttccaagaatatagtttggtttctgacagataataaaaaaaaaacgaataaggtgccagttcatgtataaaagatgaactgcgactttatgctggcggaaactgattagctgaccaagctttgtcagctacaaattcccagtaataataacgagctgcgaggtgaaagggcagagtaataaggtctcgttggcctaaatcagttcttagtttcttacccacaacctgtaactaactttgttgtctcttttcatgtagacataaatgtcatgcaacgcaactgcgattatggcattgttttgttgaactatacataaaagaaaacttgataaagtttcgagtgcttttagctgtc

SEQ ID NO: 25778 - DNA, 415 bp, Zea mays
  Clone ID: LIB3959-016-C12_FLI
gaactatgtgatcaaagcatatgattcaccttgatcactgacaaatgctttctatcaatgcagcatggacacccaggtgaagcttgctgttgtggtgaaggtgatgggcaggaccggctccaggggtcaggtgacccaggtcagagttaagttcttggatgaccagaaccggctcatcatgaggaatgtcaaggggcccgtccgcgagggtgacatcctcaccctgctcgagtccgagagggaggccaggaggctgcgctgaagccctagcgttcttggtgggctcttgtttggtctttggtgtcttcgaatttgtgctatgtttgaacttctgtgaccctgtcttgagagtagtaagcctggtgataagattgcagttttgtttatcctggttgaaaatggaattggtgttgag

SEQ ID NO: 25779 - DNA, 2137 bp, Zea mays
  Clone ID: LIB3959-016-E11_FLI
cgctttcccgtcaactccctgttgctctgctgcacagcaatcgcctcgtttcatagtaaggaggaggaggttgaggcgaagatgatgcagcagatgcagcaggagcagtggaacgccgccgccgcggggctcctccggccgaccaagtcggcgccctgctcgcccatcaagccagcggcggcggcggccatgctgcggacccactccgactccttccacgtcgcgcacaaggtgcccgtcggcgacacgccctacgtgagagccaagcgcgtccaggtaagtgtatgcgttcatgcgtttccttatttcttcccggggatgggttcgattcgatctggtttggatttcctctgcggcggtgcagctggtggacaaggatccagagaaggcgatcgctctgttctggagtgcgatcaacgccggcgaccgcgttgacagcgcgctcaaggacatggccatcgtgatgaagcagcagaaccgcgccgaggaggccatcgaggccatcaagtcgctgcgaagccgatgctccgaccaggcgcaggagtccctcgacaacatcctcctcgatctctacaagagatgcgggcggctggacgaccaaatctcgctgctcaagcacaagttgcagcggatccaccagggccacgccttcaatggcaagcggaccaaaacggctcgctctcagggccgcaagttccaggtcactctcgaacaagaagccaccaggctccttgtaagtgcactcatttctcataatttcttgctgaacaaagcttaaatccaactcaaatacttggccactccaggcctccagctttaaattcatacattcaacaactcaagtgctcaatctttgttcgctggtgatcaatcttgttgtgcagggcaatctgggatgggcgctgatgcagaaggagaactacacagaggcggagggggcgtaccgtcgtgcgctgctcatcgggccggacaacaacaagatgtgcaatctgggcatctgcctcatgaagcagggccgcgtgctcgaggccaaggatgtgctcaagcaggtacgccccgcgggggtcgatggtctgcgcggtgccgactctcacctcaaggcctacgagcgagcgcaagagatgctgcgggacctcgagaccaagctcgtcggccgcccgcgcgctgaccagctcgacacgaactggctctacgatgcgctgctgctgggatcgtcctcgagcatctggcagccgcagccgtgcatcgaccatttgctgccacctccggctccggcatcaatcccagccctggccccggcgccgcgcgaccacttcgccgatgaaaacgccggactcagcaagaagctggcggcgctccaggcgaacatgcttaatgtggacgcgcagcccttctactctctgcgggtgccgccgcttgcagcgaagcctcataacacgctgcctcagcagaagccacatagcacgctgcctcagcagcagcagcagaagaagaagccagctcctgtccatgatcccttgggcaacctgaagaggacacggtccagcaattgcatggacaaggcaggagcagtggtggacaaggcgcaaagcatcgacgagaacagcggcaggaggaagtcgctctcagctgaggacagatggccagagctgcccgaccacagcgcgttcgacgaggccctcgtcgcggatatcctgggcccggtgttcgacgacaaaccaacagctgctggaactaacggccacggcaagctgccggcgagctgcgacacgagcccagcagcgaaggagaagatcagcaagaggctgaggatcttccaggacatcacaaagacagtgaacaatttctgattcggtttcggttttcttcacgttcctactcacaacaggcaggctcgaggtggcgatacacagagaaggagaaagagcttgttctcctgagagctcctgtctggcaactaaattaaacagggattctattcagtttaaatttaatgctgattttgattcaatttattaacaccaaaataacagctgattctttttccacgaggctctccttgtaatagaactatagaagtgggctgctgcatctcgttctaatttcgtttcttttgaataacaaaaagttcatttat

SEQ ID NO: 25780 - DNA, 1039 bp, Zea mays
  Clone ID: LIB3959-016-H2_FLI
caaacgcgccattgacgcgcactcgtagtcttgactcttgcgtgcttccctcgtcttctcggacgttccgttccatcgccatggcggaccagcttagcgaggagcagattgccgagttcaaggaagctttcagcctcttcgacaaggacggcgacggttgcatcacaaccaaggagctcggaaccgtgatgcggtctctcgggcagaaccccaccgaggcggagctgcaggacatgatcgccgaggtggacagcaacggcagcggcaccatcgacgagcaggagttcctgggcctgatggcgcgcaagatgagggacgcggagtcggaggaggagctcagggaggcgttccgcgtgttcgacaaggaccagaacggggtgatctccgcggccgagctccggcacgtgatgaccaacctcggggagaagctgagcgagcaggaggtggccgagatggtccgcgaggccgacgtggaccgcgacggccacatcaactacgacgagttcgtcaaggtcatgacggccaagcgaaggagcaagaggacggaggagaaggcgacgcgcggcaagaagaagccggcggcggcgccgtccgacgccggcaagcgtggccagaaatgcgtgatcctgtgagccggagcttcggtcgtccagtacatgctggtgctgcgtgcgtgtcacccgctcgacctctgcttccggcacaccagctgcgggaagctccacttctgctgttctgcaggtgaatgtagctgtttgtaaacttatcagagcgtgtttgggagcatgattgaatgggaaccccctcagttcctccaatccaagggattttagtcatctcgatctcctctaatctccttgcccccaaacaaaccattaaataagaaaaacggaggaagtaactgtttgtcaatcttgtacatgtgctcgtgtgtagccttagtttcgggctcataggtcagtggtaaaagcaatgtcacaacagaatttgtgatgaatatttaactatcacaataagaaacaatctgatttttacgacc

SEQ ID NO: 25781 - DNA, 1173 bp, Zea mays
  Clone ID: LIB3959-017-A3_FLI
ctcctcccaccatcacctcctccacctcctcctctttatccatctgccagggcgcacgaggagaacggcggcgtctgagatcgcgaggccgaggcttgtcccgtctccgctccgctccgcccacccacggtttctggaggacaattcttcgctgtctagccttcctcaaaagtaaaaagggtaaatgggatcagaagggccttcagttgtcactgtccatgttactggatttaagaagttccatggggttgctgagaacccaaccgagaaaattgtgaccaatcttaaatctttcttggaaaagcgagggttgccaaaaaatcttgtcctcggaagctgcacagttctcgaaacagcaggggaaggggcacttgccacattatataaggttttagagtctgctgttgcagacagaggaactgggtcctcggcacagggacaagtaatttggatccactttggggtcaacagtggcgcaataaggtttgcccttgagaaccaagctgttaatgaggctaccttccggtgtccagatgagctaggatggaaaccacagagggtccctattgtgccctctgatggaagcatctcacggacgagagagactaccctgccagtcaatgaattaaccaagtcactccggaagataggctacgacgtggtgccctccggcgacgccggtcggtttgtatgcaactacgtgtactaccactctcttcggttcgcggagcaacacggcatcaaatccctgttcgtgcatgttcccctcttcttgacgatcgacgaggaggtccagatgcacttcgtcgcttccctccttgaagtcatcgctttctcatccaactaggaacagcagttggaagatcagcgtctggattcctatctcaaggatggatgtaaagctggaatgctgcatgtaggctgaataaggtggtgtggtcattggcgatagatgttaatcttgctccacaggttgtgtttgggaatcgggagggaaaaaaagagaggtcattggcgatagatgatgatcttgctccagagggtgtgtttgggaattgggaggggggaaaaagaggaaattgctgcatagagtcagacggtgtatcagcttgtacgccatcaatcaagtgctgtaaacatgcctgggaaataattggggacctggatttgaat

SEQ ID NO: 25782 - DNA, 1133 bp, Zea mays
  Clone ID: LIB3959-017-C12_FLI
ccaattagctagcttcttctagctctagctaggctcgtctgctgcaagaaggtaacagtaacagcaggcatggaggggaaggaggaggacgtccgcctgggcgccaacaagttctcggagcgccagcccatcggcacggcggcgcagggcacggacgacaaggactacaaggagcccccgccggcgccgctcttcgagcccggggagctcaagtcctggtccttctaccgcgccggcatcgccgagttcgtcgccaccttcctcttcctctacatctccatcctcaccgtcatgggcgtctccaagtccacctccaagtgcgccaccgtcggcatccagggcatcgcctggtccttcggcggcatgatcttcgccctcgtctactgcaccgccggcatctccggcgggcacatcaacccggcggtgaccttcgggctgttcctggcgaggaagttgtccctcaccagggcggtgttttacatcatcatgcagtgcctgggcgccatctgcggcgcgggcgtcgtcaaggggttccagcaggggctgtacatgggcaacggcggcggcgccaacgtcgtcgcgcccggctacaccaagggcgacggcctcggcgccgagatcgtcggcaccttcatcctcgtctacaccgtcttctccgccaccgacgccaagaggaacgccagggactcccatgtgccgatcctcgcccctcttccaatcgggtttgccgtgttcctcgtccacctggccaccatccctatcaccggcaccggcatcaaccccgcgcggagccttggcgccgccgtgatttacaaccagcaccatgcctgggctgaccactggatcttctgggtcggccccttcatcggcgctgcgctggctgccatctaccaccaggtgatcatcagggcgatcccgttcaagagtaggtcttaaaaggagccgatgctgcctgctgcttcgagatgccgccggtcttaaaaggatggattcgtggctgttttcaaatgatcccctactatgttacgtggagttccattcctctttcaaagttcggaagctgcttttatccgaacccagacttgtaattcatcagtgccaattgtgtaatatgccgcgcctctgttatgtgc

SEQ ID NO: 25783 - DNA, 807 bp, Zea mays
  Clone ID: LIB3959-017-D4_FLI
gtttccccggccccaactccattatttgcttgatccttgacgagcgggagagagagagagaggaagacgagaggcagcgaaggaaacagtagttcttcagttaggcaggagggcacaggaggaggaagatggcgtcgaagaggatccagaaggagctcaaggatcttcagaaggaccctcccacctcgtgcagtgcaggtcctgttggtgaagatatattccactggcaggcaacaataatgggtccatctgatagcccatattctggtggagttttcctagttacaatccattttcctcccgattatcctttcaaaccaccaaaggtggcattccgcaccaaggtgttccatccaaacatcaacagcaacgggagcatctgccttgacatcctgaaggaccagtggagcccggcgctaaccatctccaaggtgctgctgtccatctgctccctgctgaccgatccgaaccccgacgatcctctggtccccgagatagcgcacatgtacaagacggaccggaacaagtacgagaacaccgcgaggacctggacccagaggtacgccatgtagggagggggtaccctacctggccctttgggggtccgccggaattgccgctgctgcgttgtgttcctggacctggacctggactggagactggacgtgtctccgtgtattcgatcctgtgctgtataatgatgcatcagattgggtttgcagtgcagtgcgccgtgtggtgctgaatgctgtattgtgccgcttggaggctgtaattctgaatgccaaaaaactggtgattggaacc

SEQ ID NO: 25784 - DNA, 580 bp, Zea mays
  Clone ID: LIB3959-017-D9_FLI
tcgtcgcgaggttcttctacttcaagggatacgccaccggcgttccggacaaccgtctcaagattggggggctcagctacttggcgttgcttgggctgatcatttgcacagcatctttcggcatcaacctgctcatcagggagatgctctaaactttgggtttatatgtgagctccaggctgggttaaccgcacaagttactcatggtctgagcatcaaaactttgtgacactggtcttttgggattttatagtggagttctcgtttctttctttgtctgtgtgttgattagcaaaagtagtgtgcgaatgcgtcttatagttgtgaaggaataagaggagacagatgggttgaagcgtgatacagttcttgctgcttgtcactctctgatctggtttcgttgtagatgagatggttgttaatggtttgtgtttgaggcacgatccgccttattttctaccgatctaaagccggggtgtaacaattttgaattattctggttttgggtttatgtttatgcgatgtattggctggtagcagttctgcattgactgcatagcaaccttaatcagctggtaac

SEQ ID NO: 25785 - DNA, 848 bp, Zea mays
  Clone ID: LIB3959-018-B7_FLI
tgagcgccacacccacacgaaggatcccgaagccgaagagaaccctaccgaggaggcagaaaatccgtaggcgcgcctcatacgattccgagatccgtgcctcttatcggcagccatgatgctgcgcgcggcgggcaggcgactcctcggcgtaggaggcggcgatccagcgcccgcggtcgctgctgctgtggcggcgagcaggagcagaggataccacgagcgggtggtggaccactacaacaacccgcgcaacgtggggtccttggacaaggacgacacggacgtcggaacggggatcgtcggcgcgccggcgtgcggggacgtcatgaagctgcagatccgcgtcgacgaggggtccggcaggatcgtcgacgcgcgcttcaagaccttcggctgcggctccgccatcgcgtcctcctccgtcgcttccgaatgggtcaagggcaagcaagtggaggaagtggtggccatcaagaacaccgagattgcgaagcacctgtctcttccaccagtgaagctccactgcagcatgctcgctgaggacgcaatcaaggccgccgtgaaggattacgaggcaaagaaagggaagaagatggccaaggcagaggagcaggacaccccatgcccgtaagagcgacagctagtaaactgaagcgagcagagagtactgtatgtagtatgtaacggctaacgagcgaggtactcgtgtcgtgtgtgccaaaagaagcatgtatgtaatgtaaagctaggtaacaacgatgtttgggtttcatagaataagcgaacttgccgcagtgttttttttatctgctctgcacatgaataaggtctgcccattgctcttt

SEQ ID NO: 25786 - DNA, 944 bp, Zea mays
  Clone ID: LIB3959-018-C8_FLI
cgcctctccccccgtctcttctccaaaactgtgagcgagaggcagggagtgcgctcgacggccgccgccattagtgatttagtgttgagagagggagagaatctaaagtgaccggacgctgtccttccttgctgatcggcgacacggtccatccctccctcgctcgctagggttccttttcgtccatggatcagagcttcgggaatctcggggccggagctgggagcagcagcgggggctccaactccaaggcggcggcagccgccgtgtcctcctcgtctttcctgcagctgccgctgtcgacggcgtcccccgcgtactacggcgcgccgctcgcgctcctgcaccacgccgccgcggccccgtcgtcgtcgcagcagcaccagcagcagcagcaccaccaccactacgccaggcacggcgccgagatgtcggcagcggaggccgaggccatcaaggccaagatcgtggcgcacccgcagtactcggcgctcctcgccgcctacctcgactgccagaaagtgggcgcgccgccggacgtgctggagaggctgacggccatggcggcaaagctggacgcgcgcccgccgggccgccacgagccgcgcgacccggagctggaccagttcatggaggcgtactgtaacatgctcgtcaagtaccgggaggagctcacccggccgatcgacgaggccatggagttcctcaagcgggtggaggcgcagctcgactgcatctccggcggcggcggctcctcctcagcgcgcctctcgctcgccgatggtaaatcagaaggtgttggctcttctgaagatgacatggacccgaatggtcgcgagaacgatccgccggagattgacccacgagcggaggacaaggagctcaagtaccagctgctgaagaagtacagtggctacctgagcagcctcaggcaggagttttcc

SEQ ID NO: 25787 - DNA, 1561 bp, Zea mays
  Clone ID: LIB3959-019-B11_FLI
gatgccaatgaagtcacgtgatggtggtaggggcgcgacgacggatgcttattgcgttgcaaagtacggccagaagtggatccgcacacgcaccattgttgactcgttgtgcccccggtggaacgagcagtacacatgggacgtgttcgacccctgcaccgtcatcactgtaggtgtgtttgacaattgccatgttgacggcgcatctgggagtgctgctcgtgacagttgcattggcaaggtccgtatccggctctcgacattggagactgatagggtgtatacccatgcctaccctctgctgatgctgcatccaacgggggtgaagaagatgggggagcttcacctagccgtgcgcttcgcctgtggcaacgccggcaacatgttccatgcctatgcacacccattgcttccgaagatgcactatgcagagccactcctcgtgcgccaggtcgagacccttcggtgtcaggccaccaacgtggttgcggcccggcttggacgtgccgagccacccctcggcaaggaggttgtcgagtacatgcttgaccatcgctcaagcctgtggagcatgcggcgcagcaaggcaaacttcttccgcctcatcaatgtgctctctggccctgttgctatcgggaggtggttcgagctcgtccgctcttggcagcgcccggtgcactcatgcctggccgtgttcacgttcctggtgttcctcgcaacgccggagctggttcttccgacagcctttctggccatggcgttcgctgggctctggaggtacagaggccgcccaaggcacccgcctcacatggagatgaggctgtctcacgcggacggagccaccgcggacgagctggacgaggagttcgacacgttcccttcgacccgcggcgacgccgtgcgtttccggtacgaccgcctccgcagcgtggccgggagggtccagacggtggtgggcgacatcgcgacgcagggcgagaggatgcaggccgccctgagctggcgtgacccgagggcgacgctgctcttcgccgtcgcctgcgtcgctgccgcggtgatcgcgtattgcgttcccacgaaggtgatggttgggatgtggggcctctacgccatgcgtccgccgaggttcaggagcaggatgccttccccgctgatgaacttcttccgaaggcttccttcgagggctgacatcctgctctgatccttcctactgctgtctggccggccggccggctggcagtggatagtcagtttggccctctgattcagttaggcggttttggcaggaaggagaaacaaattagtctgctgatgtggtggttgttagcttgatgtcgtttaccctgttggtgttaggtattgcagtactgtgtgctatgtgatgcgtttggtagtagttagttgtaggctttgcagtaccagcagctgttcttgtgcttcggcttaagttgtgcaatggctagctgagtagaagtaggtgatgttttcggcaaactggtgagatcatgagtttcagtttaactagagaactgcttggatctttatgccctttgctttatct

SEQ ID NO: 25788 - DNA, 780 bp, Zea mays
  Clone ID: LIB3959-019-D7_FLI
ggacgaactaccgatgcaagctgcgatcgatcagtcaccgcatctccggttccgcgcaggcatggacgacaagtcctgctacgtggccaccggcctctccctggcggccatccgcctcatcaccatggacgacgtgcccgggctgggctacctgcagtgcgtcatcaacgagacgctgcgcctgtacccggtggccccgctgctgctgccgcacgagtcggcggcggactgcacggtcggcggctacgacgtgccccgcggcacgctgctgttcgtcaacgcgtacgccatccacagggacccggcggcgtgggaggagccggacgagttcaggccggagcggttccgcgacggcaaggccgagggccggctgatgctgccgttcgggatgggacggcgcaggtgccccggggagacactcgcgctgcggaccgccggcctcgtgctcgccacgctcatccagtgcttccactgggacaggatcgatggcgctgagatcgacatgaccgagagcggcgggctcaccatgccccgggccgtcccgttggaggccacctgcaagcctcgcgaagccatgcgtcatgttcttcagcagctctgattggtctatgtgctaaacattctcatccctattctctcttgtgtgtgtggcagtacgaacagcacgtgctagctaaataagctgcgagcaatagctatccgcgtaacagtatggttcgtcaaagttgttatctttcaaaagttatctagtactataaacaaattgttcgtgtcttgttc

SEQ ID NO: 25789 - DNA, 1695 bp, Zea mays
  Clone ID: LIB3959-019-E6_FLI
aggagaggagagggaatcgaatacgataccttctcttctccctccattcctttcctttgccccaaccatgccatattggagaggcgtcgagatcttatccctcgatccaattccaaacagaaaccgccggagctggaacaagagccgctcgcagcttgctggactctcccgctcctggccccggagccgccggccatggccaagcacaagcagcgcagggtgtaccaagtctggaaaggcaaaaacataatactatgtggtggaaggttgatctttggaccagatgccaaggccaccctgatttccttcgccctaatcgccatccctgtccttgtcttctgcgtctttgtggccagacatctcatacacatcttccctgcatataacgcaggatacgcaattcttgctgccaccataggccttaccatttatgtactgttactgctcttccttacatcatctcaagatccaggtattgtaccacgaaattcacatccacctgtggaagagttctcttatgatgcttcggctccacatgctcttcagttccctcgagtaaaagaggtcatggtcaatggagttcatgtgaaaatgaaatactgtgaaacttgcatgatataccggcctcctcggtgctcgcactgctccaaatgtgataactgtgtcgagcgctttgatcatcactgcccttgggttgggcaatgtattggagagcgaaattaccggtacttcttctgttttgttgcttcagcggcagtgctttgtatctatgtatgtgcaatgtgtggattgtacatcaggcttctcatgaataggggtcattattcggtggggaaagccattaaagaatctccagcttcattggcagtcatggcatattgtttcatttgcttctggttcgtcggtggtctcactgggttccactcttatcttattgtgacaaacaagacaacatatgagaatatcaagtacaagtacagcaaccaaccaaatgtgtatgaccatggttgtgtgctcaactgccatgaggttttgtgcaaaaaaaggaaaccttctaagatcaacctaagagctattgtccaagaagaacaagaggtagcacggccacagaccagctcttccaatatacgagaagatgaggcaccccaccgtccacgagccaaggttgaggatgatctagaaatgggtcttgacatcctcaagaccacagggcgcaggacggataaattcagcgatgaggaattggagcctgcaactggaagcaatggtattgaatatcgcacgccagattcagagactgagattcctgttaccagaactaagacagagatctttaatgaagttagggatctggacttatcggttagtaatggtgcacaatcttcatctcctgaacaagaacagcacccagacaaactttgctgatggaacaaatggtctctctgcatttccgtagtgcagacaccaaattattcaccagggctgtgaatggttggatttgaaggcagatttcctcctttgccgtctgctttcaggatttaagcctttgcttggccaatcatagattcataggtgtgtaaggatcctccagtttgtgcggtttatggaggttctaaaagattctaggaactgtttgagattcttctggtgtgtgaaggctaattgtacataattttcatagctatatgatcactg

SEQ ID NO: 25790 - DNA, 900 bp, Zea mays
  Clone ID: LIB3959-020-B4_FLI
gttgctcgcctcgggtcaaaccctaagcagggagttgatttatccgctgcagccatgagtaagttgcagtctgagtctgtcaaggatgccatctcccagattgttggggatgccaaggagaagaataggaagttcactgagactgtggaacttcagattggtctgaagaattatgatccacagaaggacaagcgtttcagtggctctgttaagttgccccatatccctcgtcccaagatgaaggtgtgcatgcttggtgatgcccagcatgttgaggaggccgagaagatgggacttgactacatggatgttgaggctctcaagaaaatgaacaagaacaagaagcttgttaagaggcttgccaagaagtaccatgctttcttggcatcagaggccatcatcaagcagattccccgtctccttggtcctggtctcaacaaggcaggcaagttcccgaccctggttactcaccaggaatccctcgagtccaaggtgaacgagactaaggcaaccgtcaagttccagctcaagaaggttctttgcatgggtgttgccgttggcaacttggcgatggaggagaagcagatccagcagaacatccagatgagcgtcaacttccttgtttcccttctgaagaagaactggcagaatgtgagatgcctctacgtcaagagcaccatggggaagccatacagggtgttctaagtatgctcttttgtgaagtctgctaggttctggcaccgaggttttattgaattaaacttttgttaagagtatgtttttggacgatcctatatttcgtcctggcgctactatgtttcagaatggtggtactactataagtatcctggcgctttaagtattgcttgaaaggatcaatataatttgcgtgtcataccc

SEQ ID NO: 25791 - DNA, 766 bp, Zea mays
  Clone ID: LIB3959-020-C6_FLI
aacgccatgaatcccgagtacgactacctcttcaagctgctcctcatcggcgactccggtgttgggaagtcttgcctgctgctgaggtttgcggatgattcatatctggagagctatatcagtactattggagttgattttaaaatccgcaccgttgagcaagatgggaagacaataaagctacagatttgggatactgctggccaagaacgctttaggaccatcacaagcagctactaccgtggagctcatggcattattgttgtgtatgatgtaactgaccaggagagctttaacaatgtcaagcagtggctgaatgaaattgataggtatgccagtgaaaatgtgaacaagcttttggtggggaacaagtgtgacctggctgagaacagagtagtttcttacgaggctggcaaggcccttgctgatgacatcggaataccattccttgagactagtgccaaggatgcaacaaatgtggagaaggcattcatgaccatggcaggggagataaagaacaggatggcaagtcaaccagctgcaagtggtgctagtaggcctgcaactgtgcaaatgcggggtcagcctgtttctcagcaaagcagctgctgctcttgatcgtctgtctagatcacagtagtgtgattgtgcagcaagcaaaacttaaattggttgctccctgtacattaagcctattactgtcccaaaaaactcgatgttatctatccgatactggaagtctgtctatcgactgcaacgcttaagc

SEQ ID NO: 25792 - DNA, 1084 bp, Zea mays
  Clone ID: LIB3959-020-H3_FLI
ggcggctgcggcggagcacggaggcgaaggaggaggagcagcagcagcaggcggcgccgaggagcggcatcccactcagtgcttgcaaccatggctaggggattgaagaagcacttgaagaggctcaatgcgcccaagcattggatgctcgacaagcttggcggagcttttgctcccaagccatcttctggacctcacaagtccagggagtgccttcctctgatcctcatcatcaggaacaggctcaagtatgctctgaactaccgtgaggtcatttctatcctgatgcaacgccatgtacttgttgatggcaaggtcaggactgacaagacctaccctgctgggttcatggatgtcatttccatccctaagacaatggagaactacaggctgctttatgacaccaagggccgcttccgtcttcacccaatcagggatgaggatgccaagttcaagctctgcaaggtgaggtccgttcagtttggccagaagggcatcccctacctgaacacctacgacggccgtaccatccgctaccccgacccgctcatcaaggccaacgacaccatcaagatcgatctggagaccaacaagatcatggacttcatcaagtttgacgtcggcaacgtggtcatggtgaccggcgggaggaacaccgggcgtgtaggtgtgatcaagaacagggagaagcacaagggcggcttcgataccatccacgtcgaggactccatgggccaccagttcgccacccgcatgggcaacgtgttcaccattggcaagggcaacaagccgtgggtgagcctgcccaagggcaagggtatcaagctcagcatcatcgaggagcagaggaggcgcgactttgctgcccaggctgctgccaaggcataagttctctgaatgtgctgcttggagctttttgctatgtctagttttatttttatctgcaaggatatagagctaccttcccaagacgttttatcatcatgttttgttgcttttggttcttgaacagcgtttgcagctagctgtaatgctttaattcgactttctatatattgttgaaccgtgttgtcgacaccatgcc

SEQ ID NO: 25793 - DNA, 826 bp, Zea mays
  Clone ID: LIB3959-021-F12_FLI
caatcctcccgcctcttcctaatccgcctcctcccgctcagtcgccgccgtggaggaaggagcaactcgatcgccagtcatgacccggggagagaaccaggagtcgcagaccgggaacgtctccgccgcatctgcggctgcgccgggaccgaagccggcatcggcgggggccgggaagggcgcggagggccagtcggtggtgcggcggctgcagtcggagctgatggcgctgatgatgggcggcgacccgggcgtgtcggcgttccccgagggggacaacatgcttcactgggtgggcaccatcgcgggatccgccgggacggcctacgagggcacctcctaccgcctcgcgctggccttcaccgccgagtacccgtacaagccgcccaaggtgcggttcgacaccccctgcttccaccccaacgtcgacgtgcacggcaacatctgcctggacatcctccaggacaagtggtcctccgcctacgacgtgcgcaccatcctcctctccatccagagcctgctcggagagccgaacaacgactcgccgctcaacacgcaggcggcggcgctttgggcgaaccaggaagagttcaggaagatggtggagaagctctacaaggccgccgcgtagaggacagcacacggcgcagatgccgcctcaggttcttcaagcaccgatctcacttggatcgattgacgtggatggttttgtttggttgggttcacagtctggtgctgtagcggtgtagcaggatcgcgtgggtagccttgagcctggcgattctgtaattgtcctgagttctgaaatgttgagagattcattctt

SEQ ID NO: 25794 - DNA, 1056 bp, Zea mays
  Clone ID: LIB3959-021-H7_FLI
ctcaaggaagggagcggatacccatatgtgtcatcaacacaattgatgacatgaagccagcaccatttaaatacattaccgaagtcatatatccagattggtatgaaaaagaaccaccaaaaggttgcaactgtacaaacggctgctcggactctattacatgtgcttgtgcagtgaaaaatggaggggaaatcatgttcaatttcaacggtgcgatcgtcgaggccaggcctctcatatatgagtgtggtccatcatgcaggtgcccgccaacatgccacaacagggtgagtcagcatggtgtcaaaattccactagaaatattcaagacaggcaagacaggttggggtgtaagatccctcagttctatatcatcaggcagtttcatatgtgagtataccggtgagctattggaagatgaagaagctgaaaagagagagaatgatgagtatctatttgatattggtcataactaccatgataaagaactttgggaggggctgaagtcagtggttggtctaggatctgctacctcatcttctgagaccatggaaggcttcacaatagatgcatctgagtgtggcaatgtgggaagatttatcaaccatagttgttcaccaaacctctatgcccaaaatgttctctgggaccatgatgatatgaggatgccacatgttatgttttttgctgttgagaatatcccgccactacaggagctgacctaccactataactataagataggggaggtctacataaatggcgaggagaaggttaaacattgctactgtggcgcctcggattgctgtggaaggctctactgaaacattattgactgttgttagctctatgttttgaacacctctgtcctgtctctgcggtacccttctattctcagttcgccttgtcttgtcggcgttctgatgtttacagcaagctgcatttgatcttgctgttttcatttagaaaaaaaaaaacattctgcttcgctctactgtgttttgaattgtgaatgaattttgaatggaaccccgttgtaccatgtgttcatgtggc

SEQ ID NO: 25795 - DNA, 1417 bp, Zea mays
  Clone ID: LIB3959-022-B2_FLI
ctttgatgaccgaagatatgcatgaagaaaggctccatgcagctgaagcttttggcaatgccattggtctatctggacagctggaaagggatatattatgttccgatatgtctgcttttaaagctgcaaacccagatgctgtctttgaagattttattcggtggcattcacctggtgaatggttgagcgaggacaaaacagatggtaatgcaggctggcctcccaaaggaaagctttctcaccgtatgtcccaacatgggaatgtgtggcgcaaaatctggaatgatgctctgccattgcctgtttctgaacagaagtctttgcttgaccctgttcgggaaggagaaaaggtgcttcattaccttgaaactttaaggccacagcagctccttgaacaaatggtgtgtacagctttcaaatcatcagctgatatcctgaataagaccatgtatggtggcttcaaggaaatgaagacaaaaatggatcgactatatgtcaccatggcgtcaacactgaaatcttttctagggaattctgatgtcaatgatttggttggaggcctgaaacggctttgtcaagtttttgagcacatcgagaagttactgattcttgctgcttccatcaatcggaagcttattgatgctccacgactagctcaagcaatattttacgactactacaacttctaccttccaaaaatgggaactagcctggaaagcatttgctatgagaaggagttcacaactaaggaaaaggtcgggatgtatgagagagatgctgtgtcgaacctgtttcctccccctactgctaatcagtcttggaggaaagttttgagcatgggaaatcttctgaacggccatgaaccgatgcaaagggaaatcatattctcagtccaggagagaataagcaacggtcattattcgagcccaaccccattatgtaccaacaatgagaagatccagacacataggatgtatatatctgggacatctaatgacctttgggttgcattgtctgtaacgtcctgggattgagctgcacgatgtatgagaggagcaattggtgttttaattagcttagaatcccgttggtgcagataaactatcattgtattttttttttgttggatgtaccagaagtccagaaggggccaccaggacatggctagtgacgcactgaggacaagcatccatttttgacatcagatcaaagtattgattatttacgtcttgtagcagtcagaactcagaaatgctaatatattcttggcttcctctagagaaatggttgtagacaagctctatttggctgacgtttttggtctgttaggtggtgggctggtgagttgcaacacacacactggggttgatgtacgtaaacatcttgtatgacttttgcaatgagctaggctttgttc

SEQ ID NO: 25796 - DNA, 1842 bp, Zea mays
  Clone ID: LIB3959-022-C7_FLI
tgaacagtcaccatgcaccccatttgcctgcattctcaggcgcatattcatcagcgcaagtgagggaggtcattgagagtgaaatggatcaggacagttcagatagagatggtgccagcaccatatatgaagagagcgagagtgtttctgttggagaagtgatgaagagccctgtgttcagtgaggatgagtcatcggagaactccttctgggttgatttgggacagagtccacttggttcagaccattcagagcaatcaagcaagggaaaattgggctctccattgccagcatcctggttttctggcaggaagagtgctaagaaggcgtcgccaaaggtgccatccaaactgtcaaggagccctattcatgataaccatgttatgtcatttgatgcagccgtgaggtcggtatcacaagagccagggcctgagaaaggggatccggatgaagataattcacatattaacatcaagaatactcctatcagtgagattgaagaagataataaagatgctaaagtaaataagaggtttgtaaagttttcttgtgccgacgacactgctgaaggtgaaggcaatgcaacttctgtttttgggagctgtaccgcccgtgagaatggctccacatccgagatttgctcagaaagtcaaggggaaaccaaagatagtgcaatcagaagagaaaatgaaggtgacttccgtctactgggaaggagagaagcatataatggcagattcaatggtggaagattctttggagtagaagaatcggaacgagtgccaagtatggggcacaatgtatcattcactttggatgatagcaagctttgtcgtaatgcagatgctggggaaacatctgggtatggaatggcagatgacgatgacgacgatgcatacagtgactatgatgaggctctggatggcaggaaagaacctgaaattatctgcaaacatcttgatcatgtgaatatgcttggacttagcaagaccacacttagattacgatacctaatcaattggttggtgacctcattactgcagctccggttgcctgattcaggggatggcgagggggtaccccttgtttatatatatggtccaaagatcaaatatgaccgtggagcagcagttgcattcaatataaaggactgcaacactggaacctccctgataaatcctgaaactgtacagaaactggcagaaaaagaaggcctctccttgggcgtcgggttcctaagtcatatacgcctcatagacaaccagaaacatggtgcggttgatgtggggttaagttcttccttgccagcggcaaatggccgtcgtgaaaagaaaaatagcaagaatgctattattgggaccgaagtggtcactgcatctcttgggttccttacaaattttgaggatgtctacaggttgtgggcatttgctgcaaaatttcttgattcatcatttcttgagcaagagaggctatcatctattcctgaggatacagaaagatagtattagatggttccagtttatggctattgcagctacttcataatagaggagggtggcaccagtgtaattgaaacgaggatagtagaagagatgtcatgttgcttctgcgtattgttttttaacgtctcagcatggagtcaaggggcaatacttggtagtgcggcttttatatttcttcattcttatttccatccttttctaggcatgcaacgtttttgtttgtagatttttttttggagatctatatgtaccagctaattattttgagcatcctttccatgtacttgcttgtaagttgtaaattggctccattggacatgaaatagatttgctcgcttgt

SEQ ID NO: 25797 - DNA, 1064 bp, Zea mays
  Clone ID: LIB3959-022-F8_FLI
ctcgccttcacccctcgtcgccgccgccgccaccgccgtcgccgtcgcaagcgacgatgctcaacatcaacttgttccgcactgacaagggcgacaacccagaccttattcgcgagtcccagcgtagtcggttcgcctccgtcgagctcgtcgacgaggtcatcgccctcgacaaggcatggcgcgaaaggcagttcgagctggataagatccggcaggagcttaacgctaccagcaagaagatcggcaagctcaaagccagcaagcaagaagaggaagcgaagaagctcatggagagcacagacgaaattaagaaaaggttgacaggcaaagaagttgaggtgtaggaggccaagagcaccctcgacgccaaggtcacgacgattggcaacatcgtgcatgagtctgtgccagtcagcaacgacgaggcaaacaataaaattgtacgggcatttggagagaagagagtagaggataatttgaagaaccacgtggacctttgcagataaaagttacatggatattgtcatcaaaggtggtgtatgggtcggtcatttactctctggttactccttgccaatggacatgccgtcgcaagtaaatgtaaagagttctgaagaggttgctggaatgtggaagcactccatcaaagtttcttatgaagcaacaaaggcagcatttcctggtggtgaagttatcgcacatcttgatcacaagatgggagagtgtcggatgcttcttcatatactatttcttggtccgtcaaatctgcttgacccaaatgcaagttttgctcaaatgtggcaaaaataattgtctcatcgattgttagcgcgcctgcttccagcaaagtttcagagaaggaaaagatggaatgtaactcaaattttggtggccgcacaagtgtggagacttgaattcatatatacttagttaggctcaatattagtgcaaacagttgataaccaagtttttcaattagtatttagttttggctttagagtacacttatgtatgagttatttgacaatatttatttatgagatattgaatggtacttatct

SEQ ID NO: 25798 - DNA, 1186 bp, Zea mays
  Clone ID: LIB3959-022-G10_FLI
gccacagcaccagcggcagccacccaaagcccaggaccgcctcaccgccaatggccgaccgcgtctaccccgccgcgaagccgaacccgcctccaggcgcggcgggcaacagcaacggcgcgcaggcgtcgtcgttccctgcgcccaagtcgcagatgtaccagcggcccatctaccgtccgcaggcccccgcgaagcggcagcgcgggcggtcgtgccggtgcagcttgtgctgctgcttctgctgggcgctggtggtggtgatcctgctggcgttcgtgggcgccgtgtgcggcggcgtcttctacctgctgtaccggccgcagcggccgtcgttcagcgtgtcgtcagtgcggctggcgtcgctgaacctgacgtcgtcggcgacggcgcccgtgctgagcgacgccatcacgctgaccgtgacggcgcggaacccgaacaagaagatggtgtacctgtacgacgacctgaccctgctggtggccacggccgccaacgccgtgccgctggggagcgccacggtgcccgggttcgcgcacgcggccggcaacaccaccgtgctgaccgccaccgtctccgccagcgcggtgggcgtggaccccagcggcgccagttccgacatcaagcggtccggcggcgggtcgttctccgtggtggtggacgcggacaccagcgccggcgtccgggtgggcgggctcaagacgaagaagatcggcatccaggtgcactgcgagggcatcaagctgacggcaccgcctccgccaccgccggcgcccaagagggccaaggggaagaacagcaccgccgcgctcgcgcctgctccggcgccgtccgccgccgacgcgacgccggcgaagacggccacggtgagcacggcggcgcactcgtgcaaggttagggtccgcgtcaagatctggaagtggactttctaggtacgggcagcgggaggagaggagacaccttaggggctgcagcgcgcaaaaaaagattttcgctttcattgctatttatttatctacatatataaatatatatatacggcgataagtttgttatcaccatgattactatatatcggagcgggcaggagtatatgtattgtaggaacaagacatgcgtgcgtcggtgtaaattcattcccccaggcattttcttttccttttgcttcaaccattttcccccc

SEQ ID NO: 25799 - DNA, 598 bp, Zea mays
  Clone ID: LIB3959-022-G11_FLI
gcgcagcacgatacaggtgtacccgggcgcgtgggcggcggtgctggtgtcccttgacaacgtcggcgtctggaacgtgcggtcccagaacctggactcgtggtacctggggcaggaggtctacgtcagggtcgtcaaccctgaggacaccggcaacaagaccgagatggccatccccgccaacgctctctactgcggccagctccacaagtaccagaaggagcagactccgcaccacaagatgggggcgtctgctgcagcgccacgctcgttggtgtccctagcgcgccggctgctcgcgacggcgctgctcctcgccggatccttcgtgttggcgccgtagagtgagtggcaaccgtacttctgcaccgaggcggcacccgtttatgtaggtttgattaggattagaggcgtaggccgcgtcattacctatgaaaattgttcatatgccagcagtgctggcctccgcctggtttcctatggtacagttctccctcgctttcgttgtgtgtgtgtgcgcgcgcgcgcgcgcgttagttagcctctgttaggaagggtcgatggtttctctctgattagttcattccttttgatggtg

SEQ ID NO: 25800 - DNA, 1627 bp, Zea mays
  Clone ID: LIB3959-022-H4_FLI
gcagcgaggcagtagctgcagccggccgcgcccccatctcatctcgggggtcgggacctgattaccccaatccgtttcctcaccaaatacgccacggcggcgcggcgcgctcgctacccacaatggcgctcaccaccgcctccacggtctcctctccctcccgaatcatccgccggttctcttcttctcaagactctcgccccccttcctcgctcctacatctcgccccgcgccgaggaaccgggaattccccgcgcgcctgtagctggcaccggctcgttgtgcgccggatgggctgggcggcgcgagcgctcctcggcggattatcggacgccggcgccagtgagagcgacgaggaggaggagcacgccctacgagtggggcagcgggagggcgagatcgacgacgccgtggagctctccgcgacggccgttgggccagagagatgggacgtgctgggcctcggccaggcgatggttgacttctcagggatggtggatgacgagttccttgacagattgggcatagagaagggcacgagaaaggtcataaaccatgaggagaggggacgggtcttgcgtgccatggatgggtgcagctacaaggctgcagctggaggctccctgtccaactcgctcgttgcgctggcaaggcttggtagtagccagtctgctggctaccctgagcttaatattgtgatgggcggcagtgtgggcagtgacccactaggtagtttctacagggcaaagttgcgccgtgctaatgtgcacttcttgtctaagccggtcaaagatggaacaactggaactgtcattgttctaacaacgccggatgcacagcgtactatgcttgcgtatcagggtacttcgtcaactctgagttacgattcagacttggccagtttagtgtctaaatcgaatgtactaattgtggaaggttatctatttgagctgcctcacacaattgaagctatcaagcaagcgtgtgaagatgctcacaagaatggtgcaatcattgctgttactgcatcagatgtatcttgcatcaagcgttgctacaatgactttcgggacattgtaagaaactatgcagatatactgttcgccaatgccaatgaagcaagggcgttgtgcgagctaccctcaacagacagtcccatgtcagccacaagatacttaagccactccgttcccctagtatctgtgactgatggcatgcatggctcctacattggggtgaaaggtgaagcaatatacatccctccaccacaatgcgtggccgtggacacttgtggtgctggcgacgcatacgcttctgggattctgtacggcgtcctccggggtgcttccgacctgaaaggcataggacttttggcgtcacgggtagctgctgtcgtcgtcgggcagcaaggcacgcgactgcgggtccaggatgcggacagactggctggatcgtttgagcaccatctggatagcttggagttctgctcagatgtttgaatagatcattctgcaaacgtctggtctgattgtatctgttttttttcccaagccttagaaatctatatgtacatacatcacttccctaggtctagtacatttcatcagggcatttagccgagctgggt

SEQ ID NO: 25801 - DNA, 1663 bp, Zea mays
  Clone ID: LIB3959-023-E4_FLI
gcccacagtccacgaggacacgatccccgacctcatatcaggttcccctccccatcccggagagcaaaagcgcttctctcgctagcgagttcggcagtagaaaccctaaaaaaaaaagacaccgccctctccttcgctagcggaaccgccctcccctcgccggggtaggggtttcgggggtagacgcccgccatggacgcgttccggaaacagctggacgtgctcatgggcgccaaccgcaacggcgacgtcgaggaggtgagccgcaactactacgaccgcgacgtctgccgcctcttcctcgccggtctctgcccacacgacctctttcagctcacgaaaatggatctcggtccttgttctaagattcattctcttcaactgcggaaagattatgaagaagcgaaagcaaaaggaacagaaaattttgatagagaactcgaggatatgatagaaaggctcattgtggagtgtgacaggaaaattcagagggccctaaaacggcttgcagatgatgatgccaatgctgctattgcgatatcggtctctgaggttactctgacggatgacatactgcagctgtcaaaacagataaaggagaaaatggcagaagttgatgcctttgattttgaagggagaactgatgacaaaataaaggcccaggaagtagtggaagagctaagagctaaaagagctgatatgcaggctaccctcttgcttgatgcttttaacaaggacagagcttcattaactcagcctgctccacctcaagtggcagcagttccaccaccagctccacctgatgctcgtactcaagaaattatcaacgaaaagcttaagaaagctgaagagcttggtgaacaaggcatggttgatgaagctcaaaaagctttggaagaggcagaagctctgaaaaagctggcgccacgttcagagccaccttcagacccttcgaaatatactgctgctgatgttcgaattactgatcaaaaattacgcctctgtgacatatgtggagcatttctgagtgtatatgataatgatcgacgtcttgctgaccattttggtgggaaattacacctaggctacatgctgattcgtgagaaacagaaagaacttcaggagcagagaaataaaaggagaccgggcaaagctgaagatgatagacgatcaagagagcacagcaaggatcgcaacggccggtcgtccagggatagagaaccagaaaggagagacagggttgagtctcgagatggtagaagagattatgaaagggatcgtgatagacgtcatgatagggacaggcgccatgaccgtgatcgggatagggattatgaccgctcccgtggacatgattcaaggaggagagagcgttcacgctccagggagcgcagcaggcgccacgagagatactaaatgttacaccatgcctgacagatttaggagtactggcggcgtctgttcaagatatggtttgagcttgtgcttcgtatcttctgaagaccggtctacttgacgctaaattcgcatggagtgttaagcatttattaaacgcatctggaatcaaatgaagttgtacttgcgaacggcttcccttaaaattcgtgcaatttcttcctttattttatatatatatttataaatatatatataatattataat

SEQ ID NO: 25802 - DNA, 425 bp, Zea mays
  Clone ID: LIB3959-023-G8_FLI
agcacacaaaagctctagagctttgcctgcttcacagaccaaccaaaccaaagcagcggtggtcgcgtcgccgccgcgtactcgcgtgcgtgccaggaagacgaaccaccagccagcccaggccccaggccaacacgcacgcacgcacgccgtcgctacctggcgaggaaggctgcctgcctgatggtccaggacgaaggctcgtcgtcgtcggtcacatcgtccccgctgcacaacttctccaccatgccgctccacgcgttcgcccggcggcgcgccgaccccgacgccgccgtggctggtgcgcgagctccgctccgacgagcgcgggctgtgcctcatccacctcctcctcaactgcgccgcggcggcgggcgcggggcggctggacgccgccaacgccgcgctggagcacatcgcgtcgc

SEQ ID NO: 25803 - DNA, 1596 bp, Zea mays
  Clone ID: LIB3959-024-B1_FLI
tcccgtcgcatcccatcccactaccacccatctcgtcgtccgccgattcgatccggttcttccaacccaggggcagtgatggcgacgaagaggagcgtgggcaccctcggcgaggcggatctgaaggggaagaaggtgttcgtgcgcgccgacctcaacgtcccgctcgacgatgcccagaagatcaccgacgacacccgcatccgcgcctccgtccccaccatcaagttcctcctcgagaagggcgccaaggtcatcctcgccagccacctgggtcgtccaaaaggtgtcaccccaaagtacagcttgaagcctcttgttccacgcttgtctgagctccttggagttgaagtcgtgatggccaatgattgcattggtgaagaagttgagaagttggctgccgctttgccagaaggtggagttctgctcctagagaatgttagattctacaaggaggaagagaagaacgaacctgagtttgctaagaagctagcatctgttgctgacctttatgtcaatgatgcttttggcacggcacacagagctcatgcttcaaccgaaggagttaccaagtatttgaagcctgctgttgccggcttcctcatgcagaaggaacttgactaccttgttggagctgttgccaacccaaagaagccatttgccgctattgttggtggatccaaggtctcaagtaagattggtgtcattgagtccttgctggcgaaggtcgatatcctcatccttggtggtggtatgatctacacattttacaaggcacaaggatattctgttggaaaatctctcgtggaagaggataaacttgagctcgcaacttctcttattgagaaggcgaaggcaaagggggtttctcttttgcttcccactgatattgtagtagcggacaagtttgcagctgatgctgagagcaagattgtccctgccactgctatccctgatgactggatgggtcttgatgttggccctgatgccaccaaaacattcaacgaagcattggacaccaccaagactgttatttggaacggccccatgggagtgtttgagttcgagaagtttgcagctggcactgaggcgattgccaagaagctagctgagcttacaaccacgaagggtgtcactaccatcatcggcggcggcgactctgttgctgctgtcgagaaggctgggctggccgacaagatgagccacatttcgaccggcggcggtgcgagcttggaactcttggaaggcaagactctacctggtgtccttgccctcgatgacgcctagatccgctgctgctgctgctactcaggttctgccagctttgcgtgtcatcttgtttcggaccttggtgtagcactgcaaggctaaggtttactcctccgcacatggacttttggggataggcttgccaccgtgttttgctagatgagtcgtggaataagcttttacttcctcgctgctgtgggtgaagtgactggaattcggaaatttggaactaacaaaaccccccgtggatttgtatgatatgttttgttcgacagtttgcgtcccatctttcactgtggtatctggtatggtatgttttgttctgac

SEQ ID NO: 25804 - DNA, 588 bp, Zea mays
  Clone ID: LIB3959-024-C4_FLI
gcgagagacagacgcgtatacccaggcggcggttgaggaggaggagaagaagaagaagaagatggcttcctccgcgtacgcctcatggtccaagcggtggatccgtcccgaggtgtacccgctgttcgtgccgatggccgtggccctgggtatctgctcgtaccagcttgtgcgcaacatcacgggcaaccccgaggtgcgggtgaccaaggagaagagggcggccggcgtcctggacaaccacgacgagggcgagaggtacgccatgcacggcctcaggaagttcgtccgcgggaagaagcccgagatcatggcttccatcaactccttcttcgccgaccctcccaaggacgattaagctagattccgtcatggatggatgagtatgttttaccaatcattagctgccgggggcgcgccttgattcgtagccatcgtcggtacttttttttttggtttctaaaattctaattctcccatataaatggaacatcatgcatttgtcgtgtgtgcttgcatggctgcgaacgaattcagcatgccttgtgattttcatcacatatttgattaataactgatgactatatg

SEQ ID NO: 25805 - DNA, 1878 bp, Zea mays
  Clone ID: LIB3959-024-F2_FLI
tgcgtatcaacgtatgcggatgcaggggcagcaccgtccacctccaccatctttcctcttcctcctcgcctccaccccttcccttccatctcctcccacccggcgactcctctccctctctgccgcgccgatcgattggcccacccatcgatcgagcacggggaagaagattccagtccggagcggtttcaattcggtcgggttcgttgcccgtgtgggtgggcgctatggcggcgatggatgcctcggcagataagaacgccgtcttccgcaagcttcgcgccaaatcggacaacaagatgtgcttcgattgcaacgccaagaacccgacgtgggcgtccgtcacctacggcgtcttcctctgcatcgactgctcggcggcgcaccgcagcctcggcgtccacgtctccttcgtcaggtcaacaaatttggattcatggactccagaacaactgaaaatgatggtctatggcggaaataaccgtgcgcaagctttctttaagcagcatggttggacagatggtggaaaaattgaagcaaagtatacttcaagagctgctgacttgtaccgacagttgcttgctaaagacgttgctaaaagctctacagaagatggaaacaatagttggccatcttccccagttgcagcatcccaggctccaaatcaagctgctgcatttccagatctcaagctgacagaggtgtcaaaagaaaatgtaagtgaaaagaaagattctgagattgttcgttcgcctagagctccaacccattctttcaagaagccgattggtgctaaaaagcctggaaataagactggtggacttggtgcacggaagcttacatcaaagccaaatgaaagcctctatgagcagaagcccgaggaaccagctcccgtcctgccatcatcggtgattgagagtactacaactaggagcaaatcacatacttcccgatttgattacgttgaaaatgcacctgctcttaagaatgggaatagctcagaaggcaaccacatgagtggacatgttgcacccccaatgtcgtcaaacttctttgctgaatttgggatggacagtggatatcagaaaaaatctacgtccagttcatccaaagtgcagatcgaggaaagcagggaagcaagacagaaattctcaaaagcgaaatcaatttcttcctctcagttttttggtgatcaggccagttttgaaaaggacgctcaagtctctctccaaaagttttctggttcctctgcgatatcaagtgctgacctatttggccatccggcaaacaattctagcgtggatctcagtgcttcagatttgatcaacagaatctcgttccaggccactcaggatctgtcttctctcaagaacatggcaggggaaaccgggaaaaagttgacatcgatggcatccaacatcatcactgatcttcaggaccgcatcctctgagctttaaactcacagtaaacttctgcgttgtttcagtggctggcttctcccgtcgacccgggtgacaaactggcctggcctggcctggcctgcagatctgtctaggagttcgtaggcgtctgaaaacttcctggcaatctggcatatctgtctaggagttcggaagcatctgaaaagtggcatatctgcctaggagttcgggagcagctaaaatcttgaagttagagagagagagagaaagagagagagagagggtgaaagaagagaacttatgaccaatactgtaattggctaaagtcatgtatgcttctggagctgtaacgcaaatgtcttttgccattggttttatctcgggtttgagatatatacttttgctttgtaatgatacatacatgttttctaattatgcgtagatatttcttgcccc

SEQ ID NO: 25806 - DNA, 1234 bp, Zea mays
  Clone ID: LIB3959-024-G4_FLI
ggtgacctgtcgaggtgtccgtgggacgagctcatctttgaagacgagtccgagaggggcagcaatgcgctgctcgcgcgagcgtggtcaccagggtggcagaacgctgacaaggcgctaacggccttcctcgacggtccactggtcgactactccgcgaaccacaagaaggccgacagcgccagcacgtccctgctgtctccgtacctgcacttcggcgagctcagcgtccgcaaggtcttccacctggtgcggatgaagcagctgatgtggagcaacgacggcgaccgcgccggtgaggagagctgcacgctattcctccgcgccatcggcctgcgggagtactcgaggtacctcaccttcaaccacccctgcagcctcgagaagccccttctgtcgcacctcaggttcttcccctgggtcgtcgatgaggtgcacttcaaggtctggagacaagggaggactggctaccctcttgtcgacgctggcatgagggagctctgggccaccggctgggttcacgaccggatacgtgtcgttgtctctagcttcttcgtcaaggtgctccagctgccatggcgctggggcatgaagtacttctgggacaccttgctggatgctgaccttgagagtgacgcactaggctggcagtacatttctgggtctctccctgatggccgtgagcttgaccgcattgacaaccctcagtttgaagggtacaagtttgatccgcacggggagtacgtacggcgatggctaccggagctggcgaggctgccgacggaatggatacaccacccctgggatgcacctgagtctgtgcttcaggctgcaggagtcgagctaggctccaactacccacgccccattgtggagttagatgcagccaattccaggttgcagggtgccctgtcagagatgtgggagcttgaggcagcctctcgtgctgccatcgagaacgggatggaagaaggcctcggcgattccacagatgagccgccgatcgacttccctcaagaattacggatggaagtggaccgacaaccagctcaacctgctatcatccacacgtcggtagtggctggttggagacgagaagaccagagggtgcctagcatgacttcctcgttaattagagctgagaccgaactcactgcagactttggcaacaccagtgaggacagtaggccagaagtgccgtcaaacattcatctgcaggctttccgggggtggt

SEQ ID NO: 25807 - DNA, 1375 bp, Zea mays
  Clone ID: LIB3960-001-D8_FLI
cttccctcccatcaattcttcaatgctgcgtaatccctactgaaagaggcaccaatcagccattctgcaacttgccttcccgtgcttgcctcactgacatgaactcatcgtctttcttcctctgatccataagatctggccaacaagatcggtggcgcacaggtatcgggtcatcacttggtctctgaattctcaggattggagttgaagaagagcatcatgcttggtgggcagagcgagaccgtcaagtacagggtctttgctggaacatggaacgtgggcggcttggcgccgccggatgacctggacttggaggattggctggacacgaagaacgactcctacgacatctatgttcttgggttccaggagattgtgccgctgaacgcgaggaacgtgcttggccccaagcagaggcgggcggccatgaagtggcagctgctcatcggcgacgcattgaacagcacgaggcatggagctgcaggaatgcatggtcaaggacaggggggcgcgttcaggtgcctcatgagcaagcagatggtcggaatcttcgtgtcggtctggacgaggagcagcctctgccggcacgtccgccaccccggcgtgtgcagcgtcggcgccggcgtcctcggccggctcggcaacaagggcgcggtgtccgtccggttcttgctccacggcacgagcttctgcttcgtctgctgccacctggcctcaggcggcgagaagggcgacgcgctgcgccggaacgccgacgccgcgggcatcctctccaggaccagcttcctcggcttcggcggcgtggcggcagcacccggtgaggtgcccaagaagattcttggccatgaccgcgtggtgttgctcggcgacctcaactaccggatcgccatggacgatgacgaagcacggcagctggtgagggccaggaaatggggcatgctgctggagggcgacgagctgctgctggagctctccagtggccgtcagttccacggctggcacgagggccacgtcaccttcgccccgacctacaagtatcgccgcaactccgaccacctccactggtgcgctgacggcgtcgccgccggccgcgagaagcagcaccgcgcgccggcatggtgcgaccgcatcctctggcgcgggaaggggatgaagcaggtccggtacgagcgctgcggttgctaccggctctccgatcaccgcccggtcagggctttgttccacgccgtgtgcgaactggcggatggctaagctgtaggctagcttgcgtgctttgaatgaaaagcgtttaattaacaaacgagactcttaattttacaaagtgttcaaaaatttcggccagaaatttcacacggaactggttactggttcctgc

SEQ ID NO: 25808 - DNA, 891 bp, Zea mays
  Clone ID: LIB3960-001-H9_FLI
cttccacaccgcctcccccgtcaccgacgacccggagcaaatggtggagccggcggtgcgcggcaccgagtacgtgatcaacgtggtcgacgagtcgtgctggagcgacctcgagttctgcgagaaaaccaggaactggtactgctacggcaaggcggtggcggagcaggcggcgtgggagacggcccggcggcggggcgtggacctggtggtggtgaaccccgtgctggtggtgggccccctgctgcaggcgacggtgaacgccagcatcgcgcacatcctcaagtacctggacggctcggcccgcaccttcgccaacgccgtgcaggcgtacgtggacgtgcgcgacgtggccgacgcgcacctccgcgtcttcgagagcccccgcgcgtccggccgccacctctgcgccgagcgcgtcctccaccgcgaggacgtcgtccgcatcctcgccaagctcttccccgagtaccccgtcccagccaggtgctccgacgaggtgaatccgcggaagcagccgtacaagttctccaaccagaagctccgggacctggggctgcagttccggccggtcagccagtcgctttacgacacggtgaagaacctccaggagaagggacacctgccggtgctcggagagcggacgacgacggaggccgccgacaaggatgcccccgcggccgagatgcagcagggagggatcgccatccgtgcctgagagggcgatgccacacatgaacacaaagcaatgttcatactgctgccctgcacctgctgtgtaaccaggcctgtgtttgttctggctgatagtgatgtaccctaagacttgtaacgtcatgttcgttcttgtgaactatagcgagtgaataaatttggttaatgttggatgtt

SEQ ID NO: 25809 - DNA, 1132 bp, Zea mays
  Clone ID: LIB3960-002-A3_FLI
cccggcctccgctcgcctcgccgcccgcctgtccctgtctgtctctctctctcctcgctgagtcgccgccagccatgaacaacctcctcacggattcctttgagctcccccggcgggactcctcaagagatacagacattgaaatgggaatgcatcaagctgatgcttcagacaacttaaaagatttcttgaagaaggtcgatacaattgagagtttaattgcaaagctgacaaatctattgaataagctacagactgcaaatgaggaatccaaagcagttacaaaagcaagttccatgaaagcaattaagcagcggatggagaaagatattgatgaagtggggaaaattgctcgtcaggcgaagacaaaagttgatgaattggaaaaagacaacttatcaaataggcaaaaacctggatgtggaaaaggttctgccgtggaccgatcaagagagcaaactactggagcagtgaaaaagaaattgaaggagcggatggatgactttcagaccttgagagaagcaatcaggcaagagtatcgggaggttgttgaaagaagggtttttactgtaactggtaatcgtcctgatgaagagacaattgatgacttgatagagaccggaaaaagtgagcaaatattcaaagatgctatccaacatcagggaagaggccagatactagacactgttgctgaaatacaggagcgacatgatgctgtaagggatctagagaggaagcttctggagttgcaacagatattcatggacatggcagttcttgttgaggcgcaaggagacatgatcaacaacatcgagacccatgtctcgaacgccaccaaccacatacagcaaggtgtgagcgcgctccagaacgcgaagaaactgcagaggaattcgaggaagtggatgtgctacgccatcatcatactgctggtgatagtcgtggtcattgtcgtcgcagtcatccagccatggaagaagggcacctagcgtggtggtgcctttttttcctgtttgtgtaatatgtgtgcagttttttttgtgggtgattcgtgatttgttgttgtacctatagtcgacgcaacaggagctctggcatttcgattcattctgtctagtgaaaggacactgcc

SEQ ID NO: 25810 - DNA, 1067 bp, Zea mays
  Clone ID: LIB3960-002-A4_FLI
ctgctcgacttctgcgaccgctacggcaagcccgtgcgcggccactgcatcttctgggccgtcgccaacaccgtgcagcagtgggtcaagaacctggacgacgaccagctcgcgtcggccgtgcggggccgcctgcagagcctgctcacccgctacgccggcaggttcccgcactacgacgtcaacaacgagatgctgcacggcagctactaccaggaccgcctgggcgacgacatcaacgccttcatgttccgcgaggccgcgcggctggacccgggcgccacgctcttcgtcaacgactacaacgtcgagggcggcagcgaccccaacgccacgcccgagaagtacatcgagcagatctgcgcgctgcagcagaagggcgcggcggtgggcggcatcggcctgcagggccacgtcaccaaccccgtcggcgagatcatctgcgacgcgctcgacaagctcgccaccaccgacctgcccgtctggctcacggaactggatgtgagcgagtccgacgtcgacctccgcgccgaggacctcgaggtggtgctccgggaggcgtacgcgcacccggccgtcgagggcgtcatcttctggggctgcatgcagggccacatgtggcgccaggacgcgtgcctcatcgacgccgacggcaacgtcaacgacgccggcgagagattcgtcgatctccggagggagtggacatcgcacgcgcgcgggcagatcgacagcgctggacacttcaaattcagggggtaccacggcacatacatcgtgcagctcgcgacggcgacggggaaggtgcacaagacgttctccgtggagaaaggggacacccctctcgtgctggacatgaacctttgacgatcacttctaccgttccctagttatatacagacacacatggcattgatttgacccaatggaacgcaaacagaaagcagcactccaaatgctacatgtatctatctatgattggtattgtaaggcaaacttaaggtattgtactccttaagaattattggtgatggtgaataaagtgaacgagctattcctcgttttgtagt

SEQ ID NO: 25811 - DNA, 1974 bp, Zea mays
  Clone ID: LIB3960-002-B7_FLI
gtagggagtgcagcggatccatcccgtgtcccgatccgaacccttcgctgctagtttaggattcatccttcgacgtttgggattggttcggttgggatggcgcgtcgcctgattagccccgcagcggcgtgccgaggctgcggtttggttaggaccgggtttctgcccgccatctcctccttccattatcgagccttgccatcgtgctcaccgaagaggacttcatcagtaaagaattgctttagcaacacttacaatataaggaaagagggttcacgttggatacaatccggtcctcccttgttgctaaatagggtaaagtttgttggcaagaggacatcctgttctgttgcaacagagccgccgcctgctgccactgaagaaccaggcatggatgtccccaaggagatattcttgaaagattacaaggcacctgattattattttgacacggtggatttacaatttcaacttggtgaagaaaagaccatagttacatctaaaatagttgtatctcctggagttgaaggcatctcagctccactagttcttcatgggcatgacctcaagctcatatcaatcaaagtcaatggcactgaattaaagggtgaagagtataaagtcaattctcgccatctgatgctttcaacacctcctgctgttgtattcaacttggaaattgtcacagaaatatatccccagctaaacacatcactggaggggctgtacaagtctactggtaacttctgcacccagtgtgaagcagaagggtttcggaagattacctactttcaggaccgcccagatgttatggcaaaatatacttgccgcattgaagctgataaaactttgtatccggttttattgtccaatgggaatcttattgagcagggagaccttgagggtggaaagcattacgcactgtgggaggatcccttcaagaaaccaagctacctgtttgctctagttgctggtcagctgggatgccgggaggattcatttgttacatgctctggccgcaacgtaacactaagaatttggactcctgcccaagatttaccaaaaacagcacatgctatgtattctcttaaagcagcaatgaaatgggatgaggaggtctttggtctggagtatgatcttgatttattcaacattgttgttgttcctgatttcaatatgggagcaatggaaaacaagagcttgaatatatttcaatctagacttgtgttggcatcaccggagactgccactgatggtgattatgctgctattttgggtgttgttggacatgagtatttccacaactggactgggaatagagtaacttgccgtgattggttccagctaaccctgaaagaaggactgaccgttttcagggatcaggagttctcttcagatcttggctgtcgtacggtaaaacgtattgctgatgtctccaaacttagaatctatcaattcccacaggacgccgggcctatggcacatcctatccgtccccattcttatatcaagatggacaacttctatactgttacggtttacgagaagggtgctgaagttgtcagaatgtacaagaccatgtttggagcatcagggttccgaaagggcatggatctttattttaaaaggcatgatgggcaagctgtcacttgtgaagacttctatgcagccatgtgtgatgcaaataatgcacaactgccaaactttttacaatggtactctcaagcaggtacgcctatagtcaaggtggcatcttcatatgatcctagttctcagacattctctttgaaacttagccaagaagtaccacccactcctggccagccggttaaggagcctatgttcatacctgttgctgttggacttgttgactctactggaaaagatatgcccctcacttccgtttacagtgatggaagtctccaaacagtctctactgatggccagccagtcttcactactgtgcttcagttt

SEQ ID NO: 25812 - DNA, 2453 bp, Zea mays
  Clone ID: LIB3960-002-F7_FLI
ctcctcccaaaaccctcgcatcctctcccacgcatgtcacaatcgccatgaccgacagaaaccccgccgccgcctcaagcaagcgtcactgtgacctctccctcgacgatcccacgccgtcggccaagctccagcggtgctccgagccgtcagaaccaacgccggcggggaaaccgaacggcggcgcggcgacgggagaggagagcgagatgatggccggcgcacggaaccctagggcgcagaggtacctggtcgccgtggagtacattggcacccgcttctccggctcacagaagcagcccaaccagcgcaccgtcactggggtcctcgaggaggcatttcaccgatttattgggcagccagtttcaataatcttttctagccgaacggatgcaggtgttcatgctttatcaaatgtttgtcatgttgatgttgagcggataagtaaaaggaagcctggcgaagttgtctgtacacaaaactcattttttttcttaacactgattaccgaccaggccttgtctacatctcttgacactctaaacttatttctttttttgatctttgcatgataagtatatttgtgacagttgttgttatgcctgatttaaatcttctaggttttccaaaataaaattctacaagcaatagaattaccttttctcctgaccttgcctctaaatcatctattttgtccgttccaaatcataattcactttagctttgccttaagtcatatttaaccaagtttaaataaaaatgcaccaacatctacaacatcaattagtttcattaaatttctatatgaaatgtcttgatagttcacaaaatgttgatgtcgttgaagacctggcggctggcgccactgctgaaacaagtcgctgtagtctgggcgtctggattgatgtattttggtgggagagttgtttggtaggttttgaactgtttgttgtgagtgttgttagtagttgagagtgattgttggtagttaaactatcacaatgttgattgtaagctggtaacatcagcagtggatatttgactattggtaagctttctaataaagctgggtgaatgcttttgatctaaaaaatgtcttgatagtgcacttgattggactttaagattttaatatgtttttattcctaaaaacttgttcagttagaggcattcgacttagaaccaaactaaagtgtcctataatttgtaaaagaggaaataaataaaaatatgttttctagaacagcgcctcttataactcctgctgctgatttgcttttccctttttacagttaacacctcatgagcctggagttgtaaaacgtgctgtgaaccactttctactgaagagtgaaggtgacataatggtgactgatgtctgctgtgttgcaccagattttcatgctagatacaaatctctagagcgcacgtagatatcactatcgcttgcttgctggacctgaatcaacatctgtttttgagaaaaactctgtttggcatatatctgaagatttggatattcagtcaatgaagaaagcatgcagcatacttgttgggcatcatgatttcagttcatttcgagcggctggatgtcaggcaaactctccagtgcgaactctggatgaacttagtgttacagaagtattccctttcatgttttttccttcaagtgtagaaagatcagagttggaattatcaaatgtctctcttgtttattcaaggaaaccagacatggaatcttctgggaaaggatctgatggttcctgtaccagtagtgtgaaatcagattttgagaatggaaaagattttggaaagcggtcaaggcaccgttgctttgttgttactgcaagggcacggtcttttctttaccaccaggtaaggttgatggtcggtcttctaaaatctgttgggactggagatctaacaactgcagatgttgagagaattctggatgcaaagacggttactgctgcacccagtatggcaccttcttgtggtctgtaccttgctaacgttaaatatgatctgaatacctgaagacaagttttatctagtggcttctgttggtgggcctccagattttgtcagctgttggctatcaaaggaattatatgctgccacttgccaaagctttcagttgcctgttttgtccactgaatcttgcatggtgattgaaaacctagaattaagtttatctgtcagcacaagagccggcttcattctcttcttgtacacagagctcttctgcatgttcagaaacaaaataggtagcttcattttagttaagttcaactatccactctttaaatttcagctggatccacccgattttgttgggtgtacgtagatttgacctggtaggggcaaaattttatttcttggttttctcatgactgtacttggttcttgatatataattaattagccaaatgcgttgtgtgcatattgaaaat

SEQ ID NO: 25813 - DNA, 1245 bp, Zea mays
  Clone ID: LIB3960-002-G3_FLI
cttcttcctccaccacagtcatcagtggcgttatcctcttcgttctcgcctccctggttgttgttggctgggtgttggcgagctgggagtagagaccgagaagtggagcggccatgaagatccagtgcgacgcgtgcgagggcgcggctgccacggtggtgtgctgcgccgacgaggccgcgctgtgcgcgcgctgcgacgtcgagatccacgccgccaacaagctcgcgagcaagcaccagcgcctcccgctcgaggcgctctccgccaagctcccgcgctgcgacgtctgccaggtacgtacgtcgtcacgcactagctagtatttagctaaccagcgcatgcggcggcggcatgcgcagatgcgctacacgcacgacgtacggcgcaagcaagctaaccttgcttcgcggtcgcaggagaaagcggcgttcatcttctgcgtggaggaccgggcgctcttctgccaggactgcgacgagcccatccacgtcccgggcacgctctccgggaaccaccagcgctacctggccaccggcatccgcgtcggcctcgcctcggcttccgcctgcagcgacgcctgcgacgcccacgactccgaccaccacgccccgcccaaggccaccatcgagccaccgcacgccgccgtctccgccgcggtgcagcaggtgccctcgccgccgcagttcctgccgcagggctgggccgtcgacgagctcctgcagttctccgactacgagtccagcgacaaggcaagacgatagcgcaagctccggtccatgtccgcgtgcacccaccggatcccgtctcacgttcttgctctgtttaatgtgttttgcagctgcacaaggagccgacgctcgggttcaaggagctggagtggttcgccgacatcgacctcttccacgagcaggcgcccaaagccagcaggacgttggcggaggtgccggagcttttcggataccaggcggcgaacgacgcggcgtactacaggccggccaaagccgccggcggcggcggcgctggggttcgccagagcaagaaggcccggatcgaggtcaccgacgacgaggattacctcatagtccctgatcttggttaaataagagagcgcaggagttttgtttcttctcctgatgtgtaccagagaagaattttactgtgtacaagctagtgtcatgtgttgtgcatctttgactgtagtgtcgctcaattctgaacatctattaagccacttttgttgct

SEQ ID NO: 25814 - DNA, 1368 bp, Zea mays
  Clone ID: LIB3960-002-H5_FLI
ggggagacggacgctccggtcatggtgaagatacaagaactgctccgaggggccaaggatgtgatgtcgcttgcgcagggagttgtttactggcaacctcccgagtcagctatggataagatcgaaaagatcatcagggaaccaatagtcagtaaatatggttctgatgatgggcttcctgagcttcgagaagcacttctcgaaaagctaagcagagagaacaagcttaccaaatcatctgtcatggtcactgctggtgcaaatcaggcttttgtgaacttggtcctcactctttgtgatgctggtgattccgttgtcatgtttgcaccgtattatttcaatgcctacatgtcattccagatgacaggtgttactgacatattagttggtggctgcgatcccaagacacttcatcctgatgttgattggttggagaaggttctgaaagaaaatgagcctatccctaaacttgtcactgttgtgaatccggggaacccctctggagcttttattccaaggcctatgcttgagaggatttcagatctgtgcaaaaatgctggtgcatggcttgtggttgacaatacctatgagtactttatgtatgatggaatggagcactactgcttagaagatgctcatattgtcaacctcttctcgttctcaaaggcttatggaatgatggggtggcgtgtaggatacattgcatttccaaatgaagctgatggcttccatgatcagctcctcaaggtgcaagacaacataccgatctgcgcctccatcatcgggcagcgcctggcgctctactcgctggaggccggccccgagtggatcaaagaacgggtgaaagacctggtgaaaaaccgggcgctgctggtggaggcactgtccccgctcggcgaggacaacgtcaagggcggggagggcgccatctacctctgggcaaagctaccggacagctgctcggacgacttcgaggctgtcaggtggctcgcgaacaagcacggagtcgccgtgatccccgggagcgccagcggaggacccgggtacatccgcgtctccttcggagggctcaaggaagaggacaccaggctggccgctgagaggctcaggcgcggcctgcaggagctggtgaccgatggaatggtacagtgacggctccatgggtgtaagtaaaagctccaattttccaacggtgtgtaattccgccgtgattaattcgggagaagaaaaggaacttgttttcaagaatgcactgcgttgctcggacgagagacgggacggaataaaatgcgtctggtctgctgagtcacctatgttatgaatcatatggtagtgcatatatatatatcatgtgtgagtaattgtttc

SEQ ID NO: 25815 - DNA, 703 bp, Zea mays
  Clone ID: LIB3960-003-A11_FLI
gccgccacgccatggccaagtacaacgtggtgcagaagaacaagcgccagtgcaatcaggaccgcaagcgcgccgcgcatggggagcccgggaccggcaagctcaagcagcggaccgcgcccgtctccatgtccggcaagcggaagaagaagctcgagcgccgcctcaaccggaagcagaaagaggctgcgatgattaaggcgctggagaacaacatgggggatgtcgacatgatctcagttgaagggtcttcagaagctgcaaagggcaagtcccaagtgaagttcagtgtgaagaaaaactcaagaatacagataaagagattaaagggcaaaggcaggaagaaagccaaaaatgcaaaaccacctgccaaggagagagttgatgccatggtagaatgacagttgatgccatggtaccatgacggacaagactacatacatccctttgtatgttttctcagagtttgcagcatggaccgacctcaccgaacactggcgcgtgtctcttgcatcttctgcctgaatgttaaatagaagctacttaggcctggtgttaatgtacttcaaacatgaatctacctttaatagtggactatgcgaatttattcatgttcttattgcgtttatggggatgcttcattgtgaatgtcggcttctatagtaagcaactagcataatcttatcccccacattcttctggt

SEQ ID NO: 25816 - DNA, 1448 bp, Zea mays
  Clone ID: LIB3960-003-B5_FLI
aaatgttgctggtacacccatggttgaacttgaactggagaggcagtagccagagtgtgagctgacggcggacgtgctcgcctctcctctcctcacatttccggctcccctctccgcattccatggcaccgcattaccggtatttttagccgccggaggagacgggttgcgtagagagaggggaaaccagagctcctgactgttcctctctccctcctcacgggcgggctccgtctgttccgtccatccaccgccccggtcgtctcccggccagatccctctcctgcaaggtttctttgcgagtggccggagaagatgatgggcgggttcctctccagggtcctcctgctggcttttggctatgcctatcctgcctatgaatgctacaagaccgttgaactgaacaaaccacagattgagcagctcatattttggtgtcagtattggattttagttgccctgttgacagttttggagagatttggagattttacaatatcatggctaccgttttactcagaagcaaaggtgttgttctttgtatatttgtggtaccctaagacaaagggaactacgtatgtttatggaactttctttaagccatatatttctcagcatgagaatgaaatcgaccgaaatcttcttgagctcagagctcgagccaccgatatggttgtcctttacttccataaggctgcttcggtagggcaaaatactttctttgacgttttaaaatatgttgctgcccagtccccttctcggaaatcaaggctgcaccctcatcaggaaccacagcagcagcaaccacaagtgcaggtggagctgcagcagccgcaaccacaaaaacaagcagcacctgttatgcgcagaggagcatctattgctgctcggcaagcagcaatggcacagcaatctctggagactatacccgttccatcttcacccaagatcaagcgtcaaacatcagggagacctggttcggtggcatccacaaagcctgcagcagctgcatccacaccaaaacctggcggtagcccaaagaaaggtgaggtcaaacctgctgtcgacccagttcaaactccagccacaagtgcagattcaccaaaatccgagcctagtgccccaccactttctgagaccgaagaagtagacaacatggcaatcgatgaggtcagtggtgatgctgcagagggcgcggaagagcttgaccctgcgctcgaggagacgctgatggaggagacgatccgtgtgacgcgcgccaagctaaggaggcgcaccgccaccgaggattctgctgggaattagctgcatgccgttgttttccctgcacattgtattgatctttttccgagttttaggctcacatgttgtttgctggaatggagatatgttgttgttcacttggttcttgtgacacagagttaattatcttatttccgtgctttctt

SEQ ID NO: 25817 - DNA, 1829 bp, Zea mays
  Clone ID: LIB3960-003-F12_FLI
gtttagttggtgctggtgctggtggaggaagaagcagcgcagcaggtggcagggatgggtcgcggcggcgggatggggaacccagtcaacgtgggcatcgcggtgcaggcggactgggagaaccgcgagttcatctccaacatctccctcaacgtccgacgcctcttcgacttcctcctcagattcggtcagctcctcttccattccatttccccgcggcctgccctctctcgatctggatctccaacttttggatctggtccgccgccttcgtgcttcataccataccacgcggagcttaattgtccttgctacccgcatattaccttgccctgcccgagcttatgtttagtcattgtgggatggcagacaattgctcaaactacccatgagaccggatgctttaactagtcattgtgggataatcaatattccggcgacgtttgaattgatgtcagacaacacatcctaacagccatccatctacatagcctgcctacctactcgttcggcctgttgctacttaccagcctcatgctcgttgtcaattaggctcgggttttgcatggaatggctgtaacttgcggtcactaagtaccttttaaaaaatagttgatagttgaatcccacacagcaccaacatgggattcagacctcacaaccacttgttgatagttggatcttttgatggtatgtgaatccctttcgagttgctgtgggagaagcaattgttgtacatgaggatgcagcaagagctatgggaaggaaacgcttatgaacaatagatacctggtcgtcctaatttcatgaagctacgacgaagagcaagctggcaagtttgaacgagaagctggacatcctagagcggaagctggaggtgcttgaagtccaagtgggcagcgcgacgaccaacccttccgtcttcaactaggaatcgcgggtttatatgtttaaataaataaatgtagaagaggaggaggcacagcaccttgtcaaatgatgaactctcagaagctgcagctgcccgttcaggatctgatgagtctgagagggagatcattcatcatcagcaaggtgatgatgcaccagtgcactgcagctgcttcgtcgtcgtcttcacctgctcctgctgctagaggcctgcaggttgctgcccatcccagtcccagcaggaggcggcgtcctcgtggcctcgttgccgcggccggcagtgacgacgacgaatgcgcttcagatggtggtgagtccgagtcgtcgtcgtcgggcgggaaagacgacggcggcggattgtcccgagaggatctggaacgcctggtcgggagtgacgacgatgccaagttcaatgggttggatcttgcaaacctcatcaggaagaagtacggtagatcgtacgatgtgacgctgataaagaaagagttcatggggaggaatctgctggccatgaatgtgatgtggaagtacagggagcaaagatcgttcccgctgagcgaggaggagtacctgctgcggctggacgatgtcgccaacacgctcaagtgctggggagccgtggcgcacgtgcgcaacacgctggagaagctcaaggagaggccgcgcatcggcaaggccgtcagcatcttcatcgacatggaccagaccggaggccgctccaacgaatggatttacaagtagcttcccactccatcgatcatgtatatgcatccatcgcccatgaacaaacacattcatcaggtgtatggagaatgaatgtgggtaccaatttcatctccaacaatcaagcacatcgcaaagatcataccatcacatgatcttattgattcttagatcgc

SEQ ID NO: 25818 - DNA, 1077 bp, Zea mays
  Clone ID: LIB3960-003-H2_FLI
ccagccacagatgaagaaagcgcaagccaccaggaggagctagcaaaagaaggaggaacgaagagaagagagaaattaacagctcgagagaaacggagctagatagtagcaggggcgctgctcgctagaggccgttgatatggcgcttcgcgacgtgctgctgtccatagcgcagacgccgcaccggctgcgcaggagggcgctggtgacgtggacgccgacgcaggagctgaacgaggtgcgggaccggtccggggcgcgcatgaagcggcggctggagtggtacgacctcgtggggctcggcgtgggcggcatgctcggcgcgggcgtcttcgtcaccacggggagggtggcgcgcgacaccgcggggcccgccgtcttcgcgtcctacgtcgtcgccggcgtctccgcgctgctgtcgtccttgtgctacgccgagttctccgtgcgcgtccccgtcgccggcggcgccttcagctacctcagagtaacgttcggtaggttaataattacgactctttcatttcctctcgcgccatggtttcacgctgctactgtacgtttaaaaggaaggaggaatcacttgaatcaattaatgaaacgtaacggtcagatatatgtgtaccgtaaattaaaaaaaatgtgttcatgtcctaattaataataaaggacaggtacttaataaaagtggacaatgcaaagcaaaacccctctatgatccttcctagctagctacatcttgtcaggcgagttcgtggggttcttcggcggagcgaacattctgatggagtacgtgctgtcaaacgcggcggtggcgaggagcttcacggactacctggcatcgacgttcggggtcacggagcgcaacgcgtggaggatcgtcgtcgacggcatcgccgacgggtacaatgagctggacgtgccggccgtcgcgctcatccttctcataaccgtatgcctgtgctatagcaccaaggagagctcgatgctgaacatggtgctcacggtgttccacctgctcttcttcgccttcatcgtcgctgccggcctgtggaacggcagcgcgaggaacctcgt

SEQ ID NO: 25819 - DNA, 1171 bp, Zea mays
  Clone ID: LIB3960-003-H4_FLI
tccctccaggctccagccaaagcccagcacgaccaaaacccagaacctgagaatggcgcagttccttcgcggcaaggccgccgccgccgccaccggggcggcggcgctgcgcgcgtcgtctccggcgccatggcggcggacggcctccgcgtcgtaccaccacacgatccaggctgtaccgcgggagacagccggcccgcgcgccgcggcgcgcgagcgccgccacggccgcgtcccggcggtcctgctcacgctcgcgggcgccgcgccagggaacggaattgcccaccggcacctccttaccgccgacaggaggcagctcgcggagatgctcaagcagtcgccctacttcctctccacccccgtccgcctccaggtccgcgcgggcgagcgatccaacgccatcctccacgccggcaccgtcctccccatcaaggtgcatagagatgaaaattctgggaatatactgaatttggtaatggtgaaggcagatgaaggaacaatgctgaaggtggatttgcctgtagagttcaagggagaggatgcttgccctgggttgaagaaaggaggctttttgcagaaaataaggaccagcctggtgtatctctgcccagctgagcacatccctccaaaaattgaggtggacctgacaaatcttgatgtcggagatagggtattgatgcatgacattcccgtccatccatcgctcaagttgctgagtaaaaacgagaccatgcccgtctgcaagatcttggcctcaaagccagacgagtaggaggcgctgcaaatacttcagagctgataacattgtacctttaggtggtacagccctccagcagctccgtccctagttcttggcttgctttttggtcatctgtcccctaggtttcaatgtgatagtggattcagacaagctatgggcttcaagtaaagatacgaaggaacaaaatgaagaaatatcactggagagacattgtctgtaccaaccgctatagaataacatcctttctcattcagtttgggttcagggacacatgacatgtaagacgactatcctttgctgtggcctgggtgaattcattctctaagctactcttgcagcggctcacaattcatcgtcctgactgcatgcattgtactgtcatgattctacgtattgaatgttgtattc

SEQ ID NO: 25820 - DNA, 1141 bp, Zea mays
  Clone ID: LIB3960-004-A1_FLI
cgccctccgaccctccacgcgcaaacagcccgcctccatccaccaggatccccgatgagctaggagaagtgttgatttggatattcgtggagtgtgcaatggtggactttgttcgacggctcgcctctgccctgctcaagtgctgcgaccttgacatacccaatcggccaaagggcctcgaggaccccgaacgcctggctagagaaactgtttttaatgtgaatgaaatcgaggctctgtatgagctgttcaagaagattagcagtgctgtggttgatgatggcttgattaacaaggtttgtaggttctaagctcttagtgtgaagtggcagtgaatgacaactttgtttccatgaagtcattgtgtctgatctctccttggagctttgatgtattatctgcaggatgaattccaattagccttgtttaagaccaacagaaaggatagcatgtttgctgaccgggtatttgacttgtttgacacgaaacacaatggaattctcgagtttgaggaatttgctcgagccctttctgtgttccatccgagtgcaccaatcgatgacaaaattgattttgctttcaaattgtatgatctcaagcaacaaggtttcattgaaaagcaggaggtcaagcaaatggtggtcgcaacacttgctgaatcaggaatgaatctttcagatgatattattgaaggcattattgataaaacatttgaggaagcagatacaaagcacgacggcaaaattgataaggaggaatggcgcagccttgtcttgaggcatccatctctgttaaaaaatatgaccctcccatatctccgggatatcaccacaacatttccaagctttgtgttcaactctcaagtagaggatgcgtgaggtcccagcgtctacggcaccattgaagcccctggggcacagcagatcaggttctgtgggggcacttagttgtttttgtttccttgaaaatgtaaattttatgtggtggcatgtcctcctgtatagtgagtattgctattgtgcacagaattggggcatgaagcgtttcttgtcgctgtttataaaatattcttcaaacatattgctcataaaaaactactcaaagtaagaatcaaattgagtacaaaactactcaaagtaag

SEQ ID NO: 25821 - DNA, 2617 bp, Zea mays
  Clone ID: LIB3960-004-B7_FLI
cgtggtccctgctcggttcatcagaatacaggaggcaccggaggtagtccaccaaaacaaaacaccactccatctctcctcttcccagcgatttcctcttcccctcctcgcccgccgagaggccgcccgtcctccgtccgccgtcccagcgagagctttaagattgtgcagacacataatttggatgctcctgcctatgcaagatgtcaaccaccagagatattgtttagtgctgggaaagttatgcagttttggatcataaattctacatagacaagataattatggaccgtgcagacacatcagggtttgtcagtggtggttgctttggtactacactcctgctgatattctttcatttcgtctattctacagtccgtgtctgaaagatcgtcagtaacgctgcagctgcctgggcagaaatatcatcaggccccctgttctttgagatctctggtgttttatctcattttcttttccaccatcggtatattgtcttaactgtgatggataacggcttcatggacatcccccatccgcctctgatgaatgacccttttgtgttagtgggatgctcagcgccaagctccacggtggagaacatgggccaaagcacactctgtatggatggcctgaacccagcaattgttaattgcagccatgttaatggaaatacacagataatgaatgacataacagcgagagatgatggcagcaggttagtccttggtttgggtccaacaccgaatttttattctgcagtgtccactggctcaaaacaagctcagagattgtcaggccagagttcaactttcactgattcagggatgctgaggcttggccttcacaccgatggtgagggagcaattcaatgtctgcaagcaccgaatggagcactccattctttaggtattgtcgacgaggcttcaacatctactactgtaaggagcatgggtggttacatgccatccctactctttgctccccgctccaatcctactgccaatgagacacaattagaaatcccagattctctaaacctcacgcacagcaccagcaacagtcagcatattcaacgtcacctccagttcagccctgaaccctctgcaatgaccgagtcttcatttggtgtgagttctgatgttgtcaccgcaacaactacatcagaacgtagccattctcgacatcctaagaaatgcaggttcaagggatgttccaaaggtgcaagaggcgcatcaggattgtgtattgcccatggaggtgggcagagatgtcataaacctggatgccataaaggagccgagagcagctctgcatactgcaaagcccacggtggcggtcgtcggtgtgaggaacttggttgtaccaaaagcgcagaaggaaaaacagattattgcattgctcatggtggaggccgccgctgcgaacatcctggctgtcctaaagctgcccggggtaagtctgggcggtgcatcaagcatggtggtgggaagaggtgtttggttaaaggttgcattcggagtgcggaggggaaggctggattgtgcatttctcatggcggtggccgacggtgccagtatccagattgtggcaagggggcacagggcagcacattgtactgcaagggacatggtggtggcaagaggtgcgtcttcgatggttgcagcaaaggcgcagagggtagcacacctctgtgcaaagcacatggtggcgggaagcggtgcatgtttgaaggaggtggtgtctgtgcaaaaagtgtgcacggggctactgaatattgcgtggcgcatggaggaggaaagcgctgttccgtgcccggctgcaccaagagtgctcgtggccgcactgactgctgtgtgaagcacggtggcggcaagcggtgcaaggttgagaactgtggcaagagcgcccaggggagcacggacttctgcaaagcccatggcggaggaaagcggtgcacatggggcacaggctgtgaaaagttctcccgtggcaagagtggcttctgtgcggcacatggtaccttgatggccaggcagcgagaacaagaggcggcgaagaatgtaggaagcatgattggaccaggtctcttcagcggcattgttgtgtcatctgccaccgcagcaagcagcatgacgaacgagcactcgtcctctggtgtcagcaccgcttccgactgcgacggcactgtgaggagccaatcaatgattcctccacaggtgctggttcctcgctctatgatgccttcttggtcgactgagcctgtagatggaggcagagagggaggtcatgttgttcccgaggggagggtccatggtggtggcctcctgtcacttatcggtggcagcttcaggaacgccgatttggagaagcttcaaagctagtgcttttccatcagcagattcggtcagtttgtttgtacataaacaggccgcgtttcggcccattgtattcttattgtgccttttcttgtctagataaacatttcaaccttcatgttgtactggtttaagtccattgtaaagtggtgactggcaattgttgtgaacgcttttggcttgttggttcagctgtagtcagtactgcaataatttcgtgtgttgtttaagctgctctt

SEQ ID NO: 25822 - DNA, 1098 bp, Zea mays
  Clone ID: LIB3960-004-B8_FLI
gacaaattcagcaaacaacaaacaagcaaaaggcacgaccaccaccgccggccgggaagcaagctcaaaccctaatcgccgtccgccggcgacgccagcacgatggcccgctacgaccgcgccatcaccgttttctcccccgacggccacctcttccaggtggagtacgctctcgaggccgtccgcaagggcaacgccgccgtgggcgtccgcggcacggacaccgtcgtcctcggcgtcgagaagaagtccacacccaagctccaggactccaggtccgtgcgcaagatcgcgtgcctagacactcacatagctctggcgtgcgcggggctgaaggcggacgcgcgcgtgctcatcaaccgcgcgcgggtcgagtgccagagccaccgactcgccgtcgaggaccccgtcaccgtcgagtacatcacccgctacatcgctgggctgcagcagaagtatacgcagagtggtggagtccgccccttcggcctttccaccctcattgtcggcttcgacccctacaccgacaagccagcgctgtaccagaccgatccatccggtaccttctctgcttggaaggccaatgccacgggaaggaactccaactctatgcgtgagttcctggagaagaactacaaggagacctccggcaaggagaccatcaaacttgctatccgtgcacttctagaggttgttgaaagtggtgggaagaacatcgaggttgcagtgatgacaaagaaggacggtctccgggaactcgaggagtctgagattgatgagtacgttgccgagatcgaggcagagaaggctgcagctgaggctgcaaagaagggtgcctcgaagaacgcctaatttcccagtcttgtgctatggctcccttcaacactgtgtgtgtcccgtttttatgttccatagcaccatcttaactgttctagaaggatgctagatctttaggtgaaactacgcttatatgcctgtgggttaaatgatgtacaatgtgatcgtctacatgccttcttcggaggctttcaatttcgtgtattctgtcatctggacagtgacagttcaaatattcattttacctgattccttgtcatg

SEQ ID NO: 25823 - DNA, 1881 bp, Zea mays
  Clone ID: LIB3960-004-C6_FLI
gcgagttctcagcaccggccgatccatcctcctccgcctccctcggttcggcctctggcctgcacaccatgaactctcgcttccggagcctctggagagccatggctggggctttgcagccgccgtgccgcctcggagctgccgcgtgtagcttgctcgctaagcagcagctatagtagctgagcgagtgcgtccatcgatcggagtcgtccacctccgtctccctttgcgattcggcgtcgtgaactcgtgttcttgagcgtgggggcaaggggcagagcaacaaggagacacttcttcttcttctttacaacaaataagaaagcaacggcaatggagggagctggtctgcagtgacagtgacacgagccatggatcccgagccattcgtgcggctctcagttgggcagctcggtctgaagctccccggcgggaacgctagcaaggcggccggccggctctgcgactgcgagatccggctgggcgggttcccggtgcagaccgctccggtgccgctggtccactccccggcgttcaacctcgacccattcaccaacgcggcggttttctccctcgaggaatccgacctcaaggcgctggcggcgccggggtgcttccgggccccgcggtcgtcgtgccttgaggtcgcggtgtactacctggcccgcttcggcgcttcacgctgtggtgtcctcgcctgcgggaggaagcggctggttggcgtgttcagggtggagctcgcttcgtcggaatggcgggacggcaagcccgtgctgctgcaccatgggtgggcgggcatcggcaagggggcggccaggccggagctccacctcagggtgaagctggaggctgacccccgctacatcttccagtttgacgacgagatcgcgctcaacccgcaggttgtccagctccatggcagcatccggcagcccgtgttcagctgcaagttcatccgcgacaggcggccatctcagagtgaccctttgggcggcgggcagtactggtcgagctccagcagcgaggagcaggacatggagatggtgaggcgggagaggaaggcctggaaggtggtgatccacgacctgtccggctcggccgtagccgcggcgtttatggccaccccgtttgtgccggcgccgggcggggacacggtggcacggtccaacccgggcgcctggctcatcgtgcgcgccgacaccacggggtcctcggacagttggcagccgtggggccggctggaggcgtggcgcgaggcggcggcggcggcggcgagcagcggcaaggacacggtgcgcctgcggctgcacctgctcccggaccgccacgacgactgcgtgctcgtgtcggaggcgcccctgagcagcgacaagggcggggagttcttcatcgacatggacaggcaggcgccctccgccacggcggcggagcactgcgcggcgagcctgggcgccgcgtgcgccggcggcggcttcgtcatgagctgcagggtggagggggaggcgaggagcagcaggccgttcgtgcagcttgccatgcggcatgtcacgtgcatggaggacgccgccatgttcgtcgcgctcgccgcggccgtcgacctcagcgtcaaggcgtgccgcccgttccgcaggaaaccgaacaagaaggccgcctcgccgtcgcccgaccacctcgagctcgacacctaggaacgcagaacaggaaggccccgccgactagcacccatggccgcccatggatccatctaactcgacctgtaaattcacttaatttcaagagctggactgaatcgtttgccacaatcaaaactctgttgtttgactggcctcagcagttagtacatgtttggaagtaaattaattttacagtcataatttatag

SEQ ID NO: 25824 - DNA, 1254 bp, Zea mays
  Clone ID: LIB3960-004-D5_FLI
cgaacagttgaagctactagcgtgtagctagggaagagaagcgcgcgagtagctagcagacgtacgtaggcagaagcctagctgggtttgaagggccccgatcgatgatcccctacgcgactgcggcggaggcggagggagcactggggcgcaccatgacgtgggctgagacagcatggtacgagtactcggcggtgatgccagattcctggctgcactgccacaccacatttatcctgttcgtcatctacagcatcgccccgctgcccctgctactcctagagcagttcgctccgtccgtcgtgctgccgtacaagctgcagccccgggtacggctgcccccggcagcctccctcagctgctacatggacgcggcctgcatctttccgctcgccgttggccttcagttcgtctcctatcctgcggtcgccaagatactaaggacccgaatgggactgccgttgccgtcggtgagggagaccatcgcgcagctagtcgtatactctctagtggaggattacctcagctactggatgcaccgtctgctgcacacccagtggtgctacgagaagatccaccgcgtccaccacgagttcacggctcctacaggcttcgccatgtcgtacagccactgggccgagaacgtcgtcctttctatcccggccttggccggcccagtgctcgtgccatgccatgtcaccacgcagtggctatggttctccatccgcctaattgagggcattaacacgcacagcggttaccatttcccgttcagcccttgcaggctgattccattctacggaggggctgcataccatgactaccatcactatgcaggaggccgtagccaaagcaactttgcacccctgttcacctactgtgattatttatataggacagacaaaggctacagataccacaagctaaagcaagagaagctgaagagtctagcagaaaatagtgcggataaaggaggcaactactcattcgacgaagggaaaaagaacagatatttttgtgcctgagcgtacgaagaataatcaaggctattacttcgtcctgttcgaagggaagatttgcaaataaataattcgaatttactgcagaagctcttgattggtcgacgaacaaatatattgttgcaatccgtttcgtgtattctatatatctaatatgaaacttttttgtcggaatatatggatcatcccgatacattactttataagtaatgaataccacataagtttttgttgg

SEQ ID NO: 25825 - DNA, 1193 bp, Zea mays
  Clone ID: LIB3960-004-F1_FLI
ggatgcaatcttctggttggccatttggcaacggcaacccagaagattgcatcccatatctaccagccatcccataggaccagtttgccgaccacatcccaccgaacaccgatcaaggtaaacctgttcgctgctccgccagaagccgaggtcgagctgttcacggcagcgagcatgcaccacgatcccaaccccttcgacgagggcgccgacgagaaccccttctcgaatggaggcggaggagcgcgtggcggaggcgtcaagccgcagtacgggttccggccgacggagcccgcggggttcggcggcggcaggggcgatgcgaccaccgacatccctctggacaccatgaacgattcgaagggcaaggcgaaggagctgtctcagtgggagtcagatctcaggaggagggagtcggatatcaggaggagggaggaagctctcaagagcgctggggtgcccatggaggacaagaactggccgcctttcttcccaatcatccaccatgatattgccaatgagataccagcaaacgctcagaagttgcagtatcttgcgtttgcgagctggcttggtattgtgctttgcctcttttggaattttattgctgtcatagtctgttggatcagagggggagattctaaactatttttcctggctaccatctatggtatgcttggcatccctttgtcctacttgatgtggtatagacctctgtaccgagcaatgagaactgacagtgctttcagctttggatggtttttcctttgttacctgctccatattggtttttgcatatttgctgccattgctcctgcagttgtattccgtggaaaatcattaacgggtatactggcagcgatcgacaccttttctgatcatgcaatagttgggatcttttactttgtcggatttgccttgttttgcttggagacacttgtgagcatatgggttcttcagaaagtatacatgtacttcagagggcacaagtaggctatggaagcacttgcaatagtcaaccaactaccatctcatctgattgccatgtggttttgtatgttaggacaacgtatatttttccgtttgcattgtggagggtaagtacgactatatgtataattttcggtttgcatggtggagggtaaatacgactatattgtagcgtctctctcgactgatctgtttttaacccc

SEQ ID NO: 25826 - DNA, 2214 bp, Zea mays
  Clone ID: LIB3960-005-E3_FLI
gtgctagtgcgccccggcgcagtcctaacggtacgtaggtctctccacggtggtttagtgaagttaagaacaccgccatggtgacaggccgggtcaaggcggccatgggcttccagcgcagccccaagtcgcaggtgccggaggcggcgtctccttctcgggcgcctacgtcggggtccgtgtccaccgccgggtcggcgccgtccaaggcgtcggcgctcgcgcggtccttcggcgcgtacttcccgcgctcttcggcgcaggtgcgccccgccgcccgcgcgccgccgcaggtcgccgagctgctgcgcgccatcgagcagctccaggagcgggagtcgcgcctccgcgtggagctgctggagcagaagatactcaaggagaccgtcgccatcgtcccgttcctggaggccgagctcgcggccaagaaggccgagctccagaggtgcagggacaccgcggagcggctggaggccgagaacgggcggctgtgcgccgagctcgacgccgccgcgctcgaggtcacgagcaggaagcagaggatcgtcgagctggagaaggagatggcggagctgaggacgcggcaggacgcggcagcggacgccgacgactgctcctcgtccgcttcggcgccgagcgagcgtctcgagagctccagcgctgcgccaaagccaaaccgcgcgagtttagctcagcttgatcctccagcgccgccagcgccagggccagcgcctttgaagtccaagtcctacttctccgcgagctcgtcgcacccttcgcccgcaagctcgtcgccgccgccctcgccgtcttcctccacgtcgacctcgtcttcgccagcgcactcccgctcgtcgtcggacacggcagccgctccaaggccccgcgtggtagagctctcaaagctcccgcccatacctccgccgccgccgccttgccctcctccgccacctcccagcaggagcaagagatcctctcccccgaactcagccagcgtggacggaagcgcagccgccgctccgcctcccccgccgccgccgccgccgccgcctccccctccggcaaggaggcagttcggcgccgcgccagcaccgcctgcaggggcatcgtcggggcagggcgacgtgaggcgcgtgcccgaggtggtggagttctaccactcgttaatgcggcgggagtccaagagggacggcagcggcacagcaagtgaggccgcgaacggaggcggcggcggcgcggcggcgacgcgcgacatgatcggagagatcgagaaccggtctgcgcatctcctcgcgatcaagtcggacgtggagaggcagggcgacttcatccggttcctgatcaaggaggtggagggcgcggcgttcgtggacatcgaggacgtcgtgagcttcgtcaagtggctggacgacgagctctcgcgcctggtggacgagcgcgcggtgctgaagcacttcgagtggccggagaacaaggcggacgcgctccgcgaggcggcgttcggctactgcgacctcaagaagctggagcgggaggcggcctccttccgcgacgacgcgcgccagccctgcgccgcggcgctcaagaagatgcaggcgctcttcgagaagctggagcacggcgtgtataacctcgcccgcgtccgggacgccgccaccggccgctacacccggttccagatcccgtgggagtggatgaagcaggacaccggcatcgtcagccagatcaaactccagtcggtgaagctggcaatgaagcacctgaaacgggtttcctccgagctcgaggtgatcaagggaggccctgaagaggaggagcaggagctgatgctccaaggagtacggttcgccttcagggtacaccagttcgcaggtgggttcgacgtggacaccatgcgagccttccaggagctcaaggagaaggcgtccatgtgccgggtacagcggcagaagcagcaccgtcacctgcgccagcacaggctcgttgccagggcctgagaggaggagactgaggagtgtgtgaggaccagagcatgcagttcttattttttatatggtcggattatctatacgccatcatctcgtcgtcgccgccacagtgccatagtatgatttgttcattgtttttttttttgcgagaaatagttgatcgtgtattctgctgtaaacgctccagtactgtaactaatgaacagcctttgtacctttttttagg

SEQ ID NO: 25827 - DNA, 2240 bp, Zea mays
  Clone ID: LIB3960-006-G4_FLI
gtggggcgctactgtttccatcctcctgctctgacttctctgcttcgtccgatcccctctcccccacctgccagactccccgccgtccaccgctcgccgcccccggccgccatccagccgccggtacagggctcatcctcccggtcgcagccgtgtccacttccttcacgaagagaggcgcgtagactggggagctggagcgaggacaaggagacgagggaaaggatgcagcagctgcaaccgaagcagatgcactgggtgagggccgactcctccgacttcgggggcgaccgtcccgccccccgcagcgggcacactgcggttatcattggcaagtccaaggtggtcgtcttcggaggattcgccgacaagcgcttcctcgctgatgtttccgtctacgacgtcgagaataagctatggtacacacctgagtgcactggtaatgggtcggatgggcaggccggcccaagcccaagggcttttcacatagctgttgtcattgactgcaacatgttcatctttggtggccgatctgggggcaagcgtttaggtgatttctggatgctagacactgacttatggcaatggtcggagatgactggctttggtgatttaccgtcaccacgagagtttgctgctgcttcagccataggaaacagaaagattgttatgtatggtggatgggatggcaaaaaatggctttcagatgtatacatcatggacacaatgtcactggagtggacagaattagctgttactggatctgtgccacctccaagatgtgggcattcggcaaccatgattgagaagagactccttatatttggaggcagaggtggagcaggaccaataatgggtgatttatgggctttaaagggtattactgaagaagacaatgaggcgccaggttggacacagttgaaacttccagggcaatctccctcaccacgatgcggtcattcagtaacatctggtggaccttatctcttgctgtttggaggacatggaactggtggttggctaagtagatatgatgtgtactataatgaatgcattattttagacagggtatctgttcaatggaagcgcttaccaacaagcaatgaaccacctcctcctcgggcatatcattccataacttccatagggtctcgatttcttttatttggtggctttgatggaaagaatacatttggtgatttgtggtggcttgttcctgaagacgatcctattgcgaaacgagacttagttcctagcatcgattcaaacagcaaacctagcactgtgactgatgataaccagctattgaacctaaaggagtcacaagctctagaaaatccaataacagaattggccaaacgtctggggattgcactttctgaagaagtttcagcaagttttgttgacgaagccaatgataaagaacttgtggaattgtcatctagacttgctggtcaatcgcttccagctagtgaccaggttgcatcaattcaggtacttcgtgatcattggaaaagttctccagcaagctcactacaactacaggaactaggacctttgctgagggactatcaacgcctcatcttgcgacactatacgggaaattcattgccagcttttcgtgaaatggaagctctccgttttttccatctaaaaagtgcttcacagttgcgcatggatgacattcccgtcctgttgagcgagtatggaaggctgctttcaacatgagatggtgtcttgcaagctgtgccctcctgcttggtcctaacagaacttctgctccatgtaatttgcggagaactttctgcctgacaaaagcacacccgtggagccattccttgccatcagttggtctgttagtgcaagtcatagtcgtagcagcgatagcgcactgagctgaattcctttttcttttgaggactggacgcagacgcacacatatttcgtgcagcctggctgggcgctggaatggggtcatggtcatgggctcatggccatccacacgtggttaggcctagcttaggcgaggagctgggcggcgtggcaaacttggcaggccgcccatggtcgcgtggaattccaagaaaacggggttttgtgtgatgtgaggctggaaacctggggggtcagcagcacatgtttccagtctattgcactccctctgaccgaaagggcgctgcactgcaattttattttactacctttgttcaaaaataatgggcgtctccttttcagatgtc

SEQ ID NO: 25828 - DNA, 248 bp, Zea mays
  Clone ID: LIB3960-007-B5_FLI
tcaaattgtaacaccacagaaaaaaaacccgataagtttcaccatgattgttattgtccatgtgcacattgccataatgttactgtgctagtttttcgaaagaagattcgtcaatgagctggagcaacagatgtttactaaaaaaagactgctgtaatggttggtgtagattagcagttgggggttgttcacttgatatctggtgctgaaagatttcagaagtgatccaatcaagagaccacatcctc

SEQ ID NO: 25829 - DNA, 1278 bp, Zea mays
  Clone ID: LIB3960-007-D11_FLI
cagaggaaaagggcaaaagccaaaaggcatcaccgccgcgacgacgatggcagcctcgctccaagccgcggccaccctgatgcagccggccaagatcggcggccgggcgccctttgcctcgctgccgtcccgcccgtcgtcgcaactcgcctgcagggcgttcggcgtcgacgccggcgccgccaggatcacgtgctccctgcaggacgtcgccagcaggtgcgtcgacgccgcgaagctcgccggcttcgcgctcgccacctcggcgctcctcgtctcggtaagcatgcatgcattgttagctagcgagctcgcttgcctgctcctcaaggtcggccgaaccgaagttggtggtgacatgtgtgtgtgtctgcgtgcagggcgcgagcgcggagggcacgcccaagaggctgacctacgacgagatccagagcaaaacgtacatggaggtgaagggcacgggcacggcgaaccagtgcccgaccatcgacggcggcgtggagtcgttcccgttcaaggccggcaagtaccagatgaagaagctgtgcctggagccgacgtccttcaccgtcaaggcggagggcatcgccaagaacgccccgcccgagttccagaagaccaagctcatgacccgcctcacgtacacgctggacgagatcgagggcccgctcgaggtcggctccgacggcacgctcaagttcgaggagaaggacggcatcgactacgccgccgtcaccgtgcagctcccggggggcgagcgcgtgccgttcctcttcaccgtcaagcagctcgtcgccaccggcaagcccgagagcttcggcgggcccttcctcgtgcccagctaccgtggctcctccttcctcgaccccaagggccgcggcggctccaccggctacgacaacgccgtcgcgctccccgccgggggcagaggtgacgaggaggagctccagaaggagaacatcaagaacgccgcctcctccaccggcaacatcacgttgagcgtcaccaagagcaacccggagaccggcgaggtcatcggcgtcttcgagagcgtgcagccgtccgacaccgacctcggggccaaggcgcccaaggatgtcaagatccagggggtctggtacgctcagctcgagtgattcgagtgtctaactgctaggtgtccgaccgccgtcatggatcttgggaaggtgtatgtataccatggaaaactttggagagcagaggaggaatcgtgtatgtaatgtacttgttaatgcaaattcgggctgtcgctttttt

SEQ ID NO: 25830 - DNA, 1455 bp, Zea mays
  Clone ID: LIB3960-007-F5_FLI
ccccccctctctctctctcatctcctgccgataagaagcttcgccgccgtctcctctttctccgtcctagcaaaatcctccccgtattgagagccaaagaagaaaaaaaaaaggcaggaggccggcgaactacgcgaggaaaaattttctttcccgggaggctcgggagtcggacacgccacacgctttggtcaaaatcgtttccggttgttagcgcggctgctgctgccgctgctgtcgggggcgagcaggaaggggagcgaacgagcttgggcagctcaagaagaggggacgggggagggagcctgtggaaggcacctgagtacgcgtgaaggagcccgcgcgagagtaggggggaaaccaaatcgagagacatggactcggagcactggatctcgcgcctggccgccgccaagcgttactacgcggcgcagctcggccgcgtcgacgatgtgcccgggatggggacggaagaggtggagatggaggtggaggacgacggggacatggagatggagttggagatggcgctggagctcggggacgcgacgtggccggaggtcgcctgcccctactgctacgaggaccatgacgtcgcatccctctgcatccacctcgaggaggaccacccctacgagccccacgccgcgccctgccccatttgctcccaaaggattacaagggatatgcttaaccatatcaccatgcaacatggttacttgttcaagaatggtcacagatcccgtagatttattgttccagagagccatgcgatttcattattgagtcgagatctacgtggtactcatttacaggctcttctagggggtggtcatggccacagatcaaataacgcagtgaccacaaacatttccagtgatcctcttctttcatcgtttggcctgagcttctcagcatctgatgcaccagaaccatcaaaatcagcatcttctattccagacggtaccgcaatacgtaaggagacaccagttcagccttgggaatcaagtattgattcatctctcacgagcgaggaaagggagcaaaagcggaaacaggccaccgggagggcaacctttgtgcaaggcctagtgatgtctactctattcggagattgatcgctcaagcagccctaggttcttgcacttgctagatcggctctttctcctgcctggtccgtcgtcagatagtgctccacccggttcggactctgatggcagggaaaattcgccccaggaaacttagccgcgttcacctttttttttttcagaaaagtgcgccgttgattctagcatgatgcagcttgatttaagctagctgttgctgtacctgtacctttgtttttatcaatttatcggccagcaattcttatctgtaactcactggtacatcgtgttcgttaccaacatacatggtagctgtggcatctgcttacacaatgcaagaaaagacttg

SEQ ID NO: 25831 - DNA, 1023 bp, Zea mays
  Clone ID: LIB3960-007-G4_FLI
gccacgaaattctccacgctccgatccaatcgcaacaatgaagttcggcaagagcctcaacaaccagatcgtggagacgctcccggactggcgcgacaagttcctgtcctacaaggacctcaagaagcggctgaagcagatcggcgccggctctggcgagcggcggagcaagcgccagcgggtgggggacgggcgcggcggatcctcgccgcctgcgatgaccccggaggaggccggattcgtcgcgctcctcgacgccgagctcgacaagttcaacgccttcttcctcgagaaggaggaggactacgtcatccggctgaaggagttgcaggacagggtggtgagcgccgcggaggtggggtcggcggaggagctgctgcgggtgcgcaaggagatcgtcgacttccacggcgagatggtcttgctggagaactacagcgcgctcaactacaccgggctggtcaagatcctcaagaagtacgacaagaggaccggcgcgctgatccgcctgcccttcatccggaacgtgatgcaggagccgttctgcgccaccgacgtgctgtacaagctcgtcaaggggtgcgaggagatgctggaccagctcctcctgccccggaaccagcagcggcccgtgccgagcgacaacggcggggaaggagacagcgacggcgacgacgacaagcaacgaccggcggagccaggcgcctcatcgctgcccagcggcggcggcggtggcgctggcgacatggagctggaggagatcgaggacatggagagcatgtacatgaagagtacggtggccgcgctcagggcgctcagggagatcaggagcgggagctccacggtgagcgcgttctccctgccgccactacggtgattgacacgttgtgttcggttcagtagcgaagcgagacagaacggggccgactgcgctgttgctgtaggtagtgtttggttcaaagaagacacgaacaaaatgaaagaaaatctgtaaaatgatagtaatattcatctagtattctc

SEQ ID NO: 25832 - DNA, 1987 bp, Zea mays
  Clone ID: LIB3960-008-E11_FLI
ccagctcctgccttgcttcctctcctcccggttcccgaataaaatttcctggacccggagcgcgcagcgcgctcccctgcctcccaaggaaacttatctagcattccggcggtcgatccatcttcccgtccagggagagcaaggaataatcaatcaatcggccagtgaaacgttaggaggaggagagccggagtccgtccagcgcggcgcgggttgatcccttgcgtctccgccactgccccgcgccggcgacacctttttgcggtgcttgcgttgcgtcgaggagggacaggcgcgctgcgtccttcgcacggcaacggcaagacggcggcgttgaagatgcgggtgttggaggaggacctcttcccctccaccccaggcaaggtgaagatcgagcgggcgggcgccatgaaccggcagctccaccgctgcttcgcatccaccagcaccatgttcctgtgggcgctgttcctcgtcgccatgacggcgtcctacctcagcttccagtccttcgtcgacacctcctccaagtacttggccgcctcctggggcggcctgcactgggagcggcagatccgtgcgtccgccgcgccgaggcggccccccgggtccgccgctggggctgggatgtcggtgctggtcacgggcgccgcgggcttcgtcggtacccactgctccctcgcgctccgcaagcgtggcgacggcgtcgtcggcgtcgacaacttcaacgcctactacgacccgtcgctcaagaaggcgcgcagggcgctgctggcctcccacggggtgttcgtcgtcgagggcgacatcaacgacggccgcctcctggccaagctcttcgacgtcgtgccattcacccacgtgctccacctcgccgctcaggccggcgtgcgctacgccatgcagaacccggcgtcgtacgtgcactccaacatcgcggggctcgtcacgctcctcgaggcctgcaaggacgccgacccgcaaccggccatcgtctgggcctcctcctcctccgtctacggcctcaacgacaaggtccccttctccgagcgcgaccgcaccgaccagccggcctcgctctacgcggccaccaagaaggccggcgaggagatcacgcacacgtacaaccatatctacggcctatccatcaccggcctccgcttcttcaccgtgtacgggccctggggccgccccgacatggcctacttctccttcacccgcaacatcctgcaggggaaacccatcacggtgtaccgcggcaaggaccgcgtcgacctggcccgcgacttcacctacatcgacgacattgtcaagggctgcctcggctccctggacacggccggcaagagcaccggcaccggcggcaagaagcgcgggccggcgccctacaggatcttcaacctcggcaacaccgcgcccgtcacggtgcctaacctggtgtccatcctggagaagcacctccgcgtcaaggccaagaagaacgtggtcgagatgcccggcaatggcgacgtgcccttcacccacgccaacatcaccctcgccaggcagcagctcgggtacaagcccaccaccaacctcgatgtcggcctcaagaagttcgtcaagtggtaccagtcctactacggctacaccaggggatccaagaactcgcgacaatgatccatgctaattcttccttcttcctttctcgctttggcccggccgcggccacccactctcggatcaaacattgacattcttatcaggattttttggtggaaatatgttatgttagggtgttcctttattaagtagagaaataccggggacaaattctttgcttggtgaggagatgggaggagagtgctggaggaagaaaagcaatcgagggctggaggaagaaaagcaatggggagcaacctttactttttctcttttctcctcctgtgtctttcttctctctgtaaattggtcggcgctctacaggatcttaatccttttccgctcc

SEQ ID NO: 25833 - DNA, 1445 bp, Zea mays
  Clone ID: LIB3960-010-C5_FLI
gccactgcgttggccgcggtcgcagctagcagtccaaggcagagctctcacgcggacggcggacctggccacctggggggcgcggacggagccttcgctttcccccctcccctccctttcgaacgactaccgaggaggcatccgaggtggccagccacgatgatggccgcggcggcgctgaggccgcacaagtcttcgccggcgcgggtgcccacgcggtgcgtggccgcgctctgcgccgcctgcttcctcgtcggcgtcggcgtcgtcaacaggtactggcctgttcctgagcctcatcccggttgccccgacaaggctggccctgaccactcgagggccgtgttgaaccaagcgtcacagactcgcgaagtcgtcatggcgttggacaagacgatatccgacatcgagatgcgcctggctgcggctagagccgcccaggcgatgagccagggcatgtcaccgggcgactcggactcggagggcgaccagggaaccgcgcggcgtaggatgtcttttgtcatgggcgttttcaccactcttgctaaccggaagcggagagattcaataaggcagacgtggatgccacagggtgatcagttgcgaagattggaagacaagggcgttgttatccgttttgttgttggacgcagtgcaaatccaaacctggaaaatgaggtcgaccatgcaattgatatggaggatgaagaatacggtgatattttgagaattaatcatgtggaaggctatggagggctccctatgaaggttcagatgtttctttcgactgctcttacaatgtgggacgctgatttctatgtaaaagccgacgataatgtccatgtcaacattggtatcaccagatcgattttggcgcgacacaggatgaaacctcgggtgtacattggctgcatgaaatctggacctgttgttgctaagaatgactccaagtattatgagccagatcattggaagtttgggactgagggtaacaactactttaggcatgcaacacggcagttgtatgctgtaaccagggatttagcaacttacatatcagcaaaccggcatatcctgcacaagtattcaaatgaagatgtatcatttggctcttggttgatcgggttggaagttgagcatgttgatgagagaagcctttgctgtggtactcccccagactgcgaatggaaagggcaggccgggaacccatgtgcggcgtccttcgactggaactgcactggcatctgcaatccggtggagaggatgacagaggtacaccgacgatgttgggaaggccttggagccgaagggcacgcacagtctttgacttttgacagccaatagttggcgcttggcggatcattgtcgcaccattttcttcctcttctttagggccctgtaattaatatgcggagatgaacttgtatgcaatggctcggtttttc

SEQ ID NO: 25834 - DNA, 2957 bp, Zea mays
  Clone ID: LIB3960-010-D2_FLI
cacggtttggtggtgtggcgactggcgacgaagcgcacaagaacagaacaagagggcgagaaacacagggagaaaggaggagaggaacggagagctggaaaaggcaggaaagacccggcttttgaccccaagtaccctgttgagggcaatggcggccacctccgaggaggcaatcaagcagttctcggcgctcatggagcagctagaggagccgctaaagagcacattccaggtgtcgatctgctccgctcgctgttcggctgttcctgttggatatctgccgttttgtgcttgatttgattctggttgttttctgaacgaataccccggcagattttgcgcgtgtttttcaaagtcgagttttgctttagttctcgcattttttgtggacttggggtgctgctgagcgcttcaacataaaaaaaaatctgaagaactgcgagttagtctgttgccctgttagctgcgtagggcttagatctttggttttcattatgtccagagctcaatttcgctgaccttttactgccgatctcgttggaatttccatcgaattgaaaattgcgcatgctttaatttctttcgtttcctgctcccgctacttatttctgttatttgttctggcgtacatcaaatttggatcttagacttgttgttttgattcttttcatgagagaagctcattttacggcttgtgctcgagtatactttttgtctgtgctcattatttcgaattttcggcagaggtagaattttggccttttccctcgactttcttgtgttgtggattgaagtgattttgagctctcaacttggttctgtaaagaacgtctttttgttgccgtaaagcttaataaacttgttcttgtgtctgagtgtttttggaataatcaatttggtgcttttagaaacacctttatgatttcgaaaatgaacttttccttttttgtttgggttgcatactgagatatttgtttcgatatgtcacgaggtatatagatgaaagtagtactctggttgggtcctcactgcaactgcaattttggtacaagttgtggtgtcgatgtcatgtgctgttcccagttcaccatttggagcccaaatactcctcctcttgtttgactcgcaactaattctggtcttggctgccggctaggaggccgtctagacttcctactttctaagcatgtgttggaatactagaaatattttagggtcagacactcccaagacaagagattatataaagtattggtttggtgtgttgcatgctgcattagtcttttaacccatgagaggactctgtccaagcctgtagttggacgtgtgctgatggtggacctggatgttgacgtgttcctgacatctgtggcctggactgttcctggtggagatgtttcaattgtagattcggatttttatttggtccttaagtccttgtcatgactcatgataagtgtgacaaggcccatggttggtctcagaaccgaggacgtgtgcggttgtgcaaccactctggaatcacaatatgccccactaagaaacaatgttttttttctttcttttttacgtcagcatgctggcatcagaaggctggtgctagatgcattctgttagcttatgtgttttggacatgtgtattgcaatttgttgttaagttctatcgaccttgttctttcatcagtggacatcattttttttctgtagacacttgatataatattttaaaatacgaataatatcaccaaaaagtgattggttgaaatatgtttgcagaatgtgcatcaaggaaatctgagagggactttgatgcgttttctgaaggctagagaatggagtgtgcctaaagcttataaaatgctaatggattgcttaaactggagagtacagaatgagattgacatcgtgttagctaaacccattctgccatctgatatatatagagttattcgggacacgttacttgttggattgacagggtactccaagcagggacaacctgtttatgcatttggtgtgggtcttagtacttttgacaaggcctcggtgaactactatgtgcaatcacacatacagatgaatgaatatcgagatcgtgttgtcctgccggctgcatcaaagaagtttgggagacagattaatacctgcttgaaggttatggatatgactggcctcaagctgtctgcactgagccaaataaagatgttgacgatgattactactgttgatgaccttaattatcctgagaaaacggaaacttattacattgtaaatgctccatatgttttttcagcgtgttggaaggttgtgaagccactcttacaagaaagaactaaaaagaagatccaagtcctgtatggctctgggagggatgagttactgaaggtcatggactacgagtcacttccgcacttctgcaagagagaagggtcaggttcatccagcgactcgctggatggagtagattgctactcctacgaccaccctttccaccagcagctgtacaactacatgaagcagcagcaatctctgaatcaggactccgttggtcccagaaaacaaggctcggtccacgtggatgtgccctcgcctggccttgaggaggccaagattgcggagacgatcaaagcagagctccagaatttgaggggaaccggcggtctcgctcattcattcagcagcatccagatcgaaggtccatgagggcgcgcgccaggtgcctcctgcttgcagtcactggctgcaggcttgaccggggcgaatagagagcgggattctaataactgtatccgcgattgttgtgatttctaattaaccaagtgagtgtgtatcgccatgcttgtactatccctgtatgtatgtatatataacggccaactggatggagtttatgttaactccctgctaattacttagaatgctcatcttttattttactccaatatagtgaaaatttc

SEQ ID NO: 25835 - DNA, 1559 bp, Zea mays
  Clone ID: LIB3960-010-F12_FLI
tgagcccccagacccccagcagctagcagccgcctcctcgtcaggcccttcctccttcaccctcgccaaacccgcctcctccggtccgaactccgtctgcttcatctgagcgtccgggaggacaaaacacgcggcgaggaccaggatggcgattgtgcgggaggaggcagtggacacgtccatcagcccaagggtgagcgcgctgcggccgtccaaaaccatggccatcaccgatcaggccatggcgctgcggcaggccggcgtgccggttatcggtctagccgcgggggagccagacttcgacacgccgcccgcgatcgcggaggccgggatggatgcaattaggaatggttatacaagatacactcctaatgctgggactttggagctgaggaaggctatttgtactaaactccaggaggagaacggggtatcctacctcccagatgaggtgctggtgagcaatggagctaagcaatgcatcacacaagctgtgcttgcagtttgctcacctggtgatgaggttttgattccagccccatattgggtcagttatcctgagatggctagactggctgatgcgactccagtgattcttcctacaaacatatcagagaatttcttgttaaggccagagttgcttaccgacaagatcaatgagaaatcgaggctcttaattctctgctctccatctaatccaacagggtcagtatatccaaaggagttgcttgagaaaatagctgatatagtcaagaagcatccgaggcttttggttttatctgatgaaatttatgagcatattatctatcagcctgcaaaacacacaagctttgcttcactacctggaatgtgggaaagaacattaactgtaaatggtttttctaaggcttttgcaatgacgggttggcgtcttggttaccttgcagcccctaaacattttgttgcagcatgtggaaagatccaaagccagttcacctcaggtgccagcagcatatcacagaaggcaggggttgccgctctgaatcttggctatgctggtggtgaagcagtatcaactatggtcaaagcattccaggaacgccgtgactatcttgtgaaaaatttcaaggaactgcctggtgtgaaaatatcagaacctcagggtgccttttatttgttcattgacttcagcgcctactatgggtctgaagtagaggggtttggcactatcaagaattccgagtccctttgcatcttcctattagagaaagcacaggttgcccttgtccctggtgacgcatttggggatgacaagtgcattcgtatttcatatgctgcatccctaactacacttcagactgcgatgtcaaaattaaaggaagctgttgctctgctcaagccctgtgttgctgcgtagcaagatcactaaattgcaataaggagtgaccaaggcacctttaactaacctttcacattattttaaacacaatgttcgaattgttgggcagacttggtctgttgtttttatatgtaacattatggatttatgatgtgtacatgcaaataaaaatgttttgttt

SEQ ID NO: 25836 - DNA, 1663 bp, Zea mays
  Clone ID: LIB3960-010-F8_FLI
ctggccgtggacaacgccacgacgaccccgaccagagccagtccgctccgctccaccccttgctcacctccgcgacccgcaccaatggcgacgcccacggctccatcccgcttacccctcgccaccgcctccgcgtccacctccttctccgaccgcttcctccgcacgccgtgcgcgctccggccccgctcttggccccgcctgcgggcgggctccgtcaaggagtggcgcgagttcgaggacgacgcgggcgccgtcaaggagtggcgggagttcgaggacgccgtcaggaggaaggacctcccccgcgcgctccaattcctgcagtccgtggagcccgcggcggtgcaggtcgcggtccccgtgccgccggggcgggactgggaggtgctcgacgcctgcgtcgacgccgacgacatgcgcctcgtcggccgggcgtaccagttcctcgtcgaccgcggggtcctcgccagcttcggcaagtgcaagaacatcgttctggaagggccaagagaagtgacaccaacggttttgaaggagatgaccggtttggaagctgaaaaacttgcgccgaagaaatggggtctgtcgggaagttcaccgtatgttctcattggatttcttggaggcgtatcctttctactaacacaaggggtcgatctacggcctaaactgagtgctgtattgggattagcagcagccgatgcaatgttgctcggtggtacttgtcttgctcaaatctcatgtttctggcctccgtataaacgtcggatccttgtacacgaagcaggccatcttcttactgcttatctaatgggctgcccgatacgaggagtcattttggatccatttgtggcattgcgaatgggcatccagggccaggcagggactcaattctgggatgaaaagatggaaaaagaactagctgagggccatctatcaagcacagcgtttgacaggtactgcatgattatgttcgccggaattgctgctgaggcacttgtttacggggaggcagaaggtggagaaaacgacgagaacttattcaggagtctgtgcattctactgaacccaccccctgctgttgcacagatggcgaaccgagctcgatggtctgtcatgcagtcttacaacctcctgaagtggcacaagaaagctcatagagccgcggtcaaggcgctggaagacgggcacagtctcagcgttgtgatcagaaggatagaagaagccatcgcttctgacagcaaataaatatgaccgttgatcctttacatgtgttcctgtcaaccgatctttgttggcagcttccacaggacgcggaaggagagctttcataattcgcgcgaagagttagtgtgtgttggaacatgagtggcgcttttcaaagaaagaaaggcagaagatccttggagctggagggaatagcggagaccacgaccagggcgtctgacggacggactagatcgaatgatacatccgttggagattttaaggaagtcaaaaggctgttgtgaacttgtgattagtgtcgatgccagatatggcagatgtgcatagggagatatgaatatatgatgtcttgatgagtatgcagacatgagctattttgtaatggatggaaaagtaccgttggtacttgaggcacttctattgtttattattt

SEQ ID NO: 25837 - DNA, 1210 bp, Zea mays
  Clone ID: LIB3960-010-G9_FLI
gtcgcaagcggatcgcaaactcgcaatcaaggctgctcccctccgtctccgtgttcgccactcggttcaccgcccgccgccgccgagacctcctcctcgccggctactcctgaccccacaaaggcagcgctcggaggtggccctctgtcgggtggagtggtggacacatccgcgcccatggccaacggcggcgctgcggccggcaagctcaccgtcgccgagaccttctccaacctcagggagcaaggcaagagtgcattcatcccgttcataactgctggtgatcctgacctggtaaccacatcgaaagcattgaagattctcaattcctgcggttcggatgttatagaggttggcgtaccatactcggatccactggctgatgggccagttattcaggcttctgcaacacgggcgcttaagaaaggcactacacttgattctgtcatagagatgctgaagggggttacacctgagctttcttgccccattgttcttttcacatactataatccaattctgaaacgtggtgtgggaaacttcatgtctactatcaaacaagctggcatacatggacttgtagtgcctgatcttcctttggaggagacagcgttgctgaggagcgaggccattatgcacaacatagagctggtgctgcttacaacgccaaccacgccgacagatcggatgaagggaattgcacaagcttcagaaggatttctctatcttgtgagcgctgtaggggttacaggtgcacgctcaaatgtaaacttacgtgtagaacaccttcttagggagatcaagaaggttacagacaaaccggtagctgttggtttcggtgtatcgactccagagcatgtgaaacagatcgtgggctggggagcggacggtgtgattgttggcagtgcgattgtgaagcagttgtgtgaggctgctactcctgaagagggtctggaaaggctcgaggagtacgccaggagtatgaaggctgctatgccgtgagctgatctcactccccgtcacaggcaaggtaattagaacatggttttagcaatattctgggcatgggtttggcattcagaactcatcttagtgctgtacgggtcgttctccggtggtgagaacgaagtctggctttgcctataatagaaaagggttaaactgagttagtgcgacattttgatggaaaagtgagtgattgcgagatatc

SEQ ID NO: 25838 - DNA, 1832 bp, Zea mays
  Clone ID: LIB3960-010-H9_FLI
ccacccctcgccgccatctccgtctctctctctcccgcaaccaagcagttcaactcacacccgaagcggcgccgctagggtttgctccgacagccgcgaaacctagtccttactgcgccctcccacagaggccgtcattcactaatctacctgctacgcttcgcttcccgctccgatttggagctagggtttagcttatctccgagctcagcttcgggtcgcggcacgcggcatggcggggtacggggaagagaaccagaacgccatgaacgggtacgaggaggaagaggaggaagaagaagttgaagaagtcgaggaggtgtacgaagaggaggaggagggggacggggagggggaaggagacgagggggcagccgccgaggcagcagcgatggcggccgagacgagaagtgtcgatggaggccggggcctagcggaggccgttgggaatgttgatgccggaggcgaggatgagagggatgcagattctagcggcggtgacgcttcggggaaggttttcgtagggggtgtagcctgggagacaactgaagaaacattcacaaagcattttcagaagtatggagctataactgattctgtgatcatgaaggacaagcatactaggatgcctcgtggatttggatttgttacattttccgatccgtctgtgcttgacagggttctagaggatgaacatgtcatagatggaaggacggttgaagtcaaaaggactgttccaaaagagctgtcgtcgaaagatggccctaagacaaaaaagatctttgtgggtggtatcccaccatctcttactgaagataaattaaaggagcacttctcatcgtacgggaaggtggttgagcatcagattatgcttgatcatagcactggacgttcacggggctttggatttgtcacatttgaaagcgaggatgctgttgaaagggttatgtcagaggggagaatgcatgatcttggagggaagcaggttgaaattaagaaagctgaaccaaagaaacctggcgctggtgattcaagctcaaacggaagacacagccgtggtggtggtcatcgtgattcataccgtggtagtggtgtttctgtgaacagcggtggcggctatggatatggtggtggttaccgatcagctgctgcagcatattatggcagcacagcatatggtgcctatggcagagggtatggatatggtgctacttctggctatggctcaggttatggctctgcatatggtggctccatgtatggaggtccatatggtgcctacgggtcatatggtggtgcctatggaggtggtgcgtatggtgctccaggagggtatggtgggggaggatatggcagctacggtggtgctggaggcatgggtgggggtggcagcgctggtggtcggggctccagcagataccacccttatgggaaatgatcatccattctgtgtttctctaggatctgataataaagccatacctttcctcgtttctgctactgagaaaatggaacattccattcgtcttgttgaatcagcggcatctggacatttttttccttggaacttgcattgcacatcaacgattctatagtctatagtcgctgaaccctgaaccgcccccaccccgagctttctgtagaagctgcagctgaaattctcgtagtctggcatgagccttagaatgcccttgaaactattatctttgtggtagtaacattatggtgtaatggaacagatgtacgttgttgtaacattcactcactgatcagagacttgctatctctacatatgtggagagaagctttgcaaatgattgactgatactatt

SEQ ID NO: 25839 - DNA, 1462 bp, Zea mays
  Clone ID: LIB3960-011-D2_FLI
gctcccggttccgttccgcttccgcgatggggcagcaagagggccacagcaacccccaccccgacgaggcggcgctcccgacgaccaccgccgcaccgtcgccgtcgccgtcctcgtccaggctctacacggcgtggctggtggcgtcgtggtacgcgtccaacatcggcgtgctgctgctcaacaagtacctgctctccgtgtacggcttccgcttcccgctgctgctgaccgcgtgccacatgtccgcctgcgccgtcctctccacgctcgcccagcacgcctcgccccgcccccgcagcagctcctccccgcgctcccaccgccagctcgctcgcgtcgcgctcctcggcgccgtcttctgcgcgtccgtcgtcgccgggaacgtctcgctccgccacctccccgtctccttcaaccaggccgtcggcgccaccacgcctttcttcaccgcgctcctcgcctacgccgtcgccgcccgccgcgaggcctgcgccacctacgccgcgctcgtccccgtcgtcgccggcgtcgccatcgccaccgggggcgagccgagcttccacctcttcggattcgtcatgtgcgtggccgccacggtggggcgcgcgctcaagaccgtgctgcagggcatcctgctatcgtccgaggaggagaagatggactccatggacctcctccgctacatggcgccggtggccgtgctgctgctggtaccggcgacgctggccatggagcgggacgcgttcggcgtggtggcgggcctcgcgcgggaggaccccagcttcctctggctcctgctctgcaactcctgcctcgcctacttcgtcaacctcaccaacttcctcgtcaccaagcacaccagcccgctcactctccaggtcctcgggaacgccaaaggcgccgtcgccgtcgtcgtctccatcctcatcttcaggaaccccgtcacggtcgtgggcatgctgggctacggggtcacggtcgctggcgtcgtcttgtacggcgaggccaagaagaggagcaagtgaagcgacggacaggctcctgtacctgtacatttgctgtccggcattggaatgcaatgccggcgcggtgatagctagggagaagacaagcaagcaaagcgacagctggggtggtttgttcgtcgcatcgtttcagaaggaggtgaaccatacaatacaagaactcgtgtcgtagcacagagagagagagagagtgtgtgtcgtttagcatttgaacgagcttgccgtccaaagcctacgattttaatccggcctggagaagaagaaaaaaacgaagctagctagttatcaaaccaacacctagcatctgaacatatgtgcagcaatccaactgggtttccatattttaatgttgtcgatgaattggtccttcctaaacaacatttccgtttgaacatttacgaagagccaaagccaacggactgcattgttcactg

SEQ ID NO: 25840 - DNA, 523 bp, Zea mays
  Clone ID: LIB3960-011-H5_FLI
tcattgagtacagcttatggtagcaacaagggaaaatgccatgccaactatctccagtaacacagtgtggaatcctgttgctccaaacaagatgaagcactctgtttctacgcctaatcttgtgtctggtggatcctctgcccaagtatcattgagtacagcttatggtagcaacaaaagtcaggatcctcctcaaggtaaccaaactttgcctgttccagaggatttccgtgctgcaaacaaaactctggttgaaagaatgcgttctgctctgggaatggacgaggacaggtactctgcattcaaagagattgctggtgaataccgtcaaggtatcataggtactctggagtatctttcgtatgtcgagcagtttggactgtcacaccttgttcctgaaatggctaggctattgcctgatcctcaaaaacagagggaacttgctgatgcatattatacaaatactcgatttaaaagcctacaagaaaacggaggtggaactagctcacaagagggcaaccgt

SEQ ID NO: 25841 - DNA, 940 bp, Zea mays
  Clone ID: LIB3960-011-H7_FLI
ctctccctccaggcctctccactcccggcaacctcgccgccggggccatggaccggtggaccggcgtcgtctacgtcccactctccagaggcggacccctcttccgcgtcgctgcctcgctcctcctctcgccagccaaaacgctcgccactcgcctacggagcctgaactattccgatggaagcaggttccacgagtcaacgcgatccttttcacgggcgaccgcgtccgcggcacgggcgatccggtgatcgagcggctctctgacgccgcccacctggctggggtcctcgccgggaagctccctggggaggccaacgcgtgggtggtcgacgccgcgcgctttgctgggccgtttgcggtgtaccgagagctcgttccgaccgtcgacgccgctggagaccccaaggggtatgaccccactggcttccccgccgccgccggtgttgccaacatccttgcacgcagcattggtgaggtatagtgtttggtgaattccggcgaagtttgaaacttgcgaccttagttacgcagatacgattttcagtgcaaaacatctttggtgcagctgcaaaaaaaccatcggattgttgcttagtttatcttccgggtgcctattgctgaaccgttctcctctcaaaaggtttatttattactccactgctggtagagctgtagtggatttcctaatgcaggaaatgtggaaaaaagtgcttttttctttgcttattttagccacgaacatggtattcaaagctttaagctgctcttgcagcactcctgaactaatttgtattgaatatcttggatttttgttttataccgggataaggaggtgttgccatcttagtaaccggacaataaactagtttctttccttctttgtactaagaatgttgatcgagcttcactcatttggttcacgtttggtgacattagc

SEQ ID NO: 25842 - DNA, 1423 bp, Zea mays
  Clone ID: LIB3960-012-A6_FLI
ggcctttgtcactcttctctgtgtaacgacttcctccctttcctgccgcaccacgcaatcaccggggcggaggcggctgccggcgagcacttgggcgtctccggccaccgcctgcctcgttgtggctccccgttgactcccgcgatttgttacccgctggcgctgccgcacacagctcaaaaggagtagcagcgcccctggttgccggttggagcgtcaaggatgagcgggaggaagaatgcgggcaaggtttccccctggttgctcgtcctcatctgtttagggtgcttctttgtgacctacaacctcctgacgatgcccagccggggacgggatgggccgcgcaagttcctcggcggcggcggggatcgccactcaactgcctcgttggggtcaggctctgattcggaccccgcgaagcggttccacgtcgcgcttacggcgacggacgcactgtacagtcagtggcagtcgcggataatgcactactggtataaggagatgagggaccgacctggttccgacatgggtggcttcactaggatccttcactcgggcaagcctgatggattgatggatgagatacccaccatggtggttgatccccttcctgaaggcaaggatcagggatatattgtcttaaataggccttgggcttttgtccagtggatccagaaagcaaagatcgtagaagagtatatattaatggcagagccagatcatgtctttgtgaagcctttgccaaacttatctcatggtgatgagccagcggcatttccatttttctacatcaaaccgactgagaatgagaagatattgaggaagtttttcccagaagaaaaagggcctatttcaaatattgatcctattggcaactctccggttataatcaagaaggctcagcttgagaagattgctccaacctggatgaatgtttcattaaaaatgaaagaggatcaggagacagacaaagcattcggatgggtcttggaaatgtacgcatacgctgttgctagtgcactgcacggtgtgcaccatagtctccataaagattttatgattcagcctccttgggacctgaaaacggacaacacattcatcatccattatacgtatggatgcgattattcaatgaagggtcagcttacttatgggaaaatcggtgaatggcgttttgacaaaagatcttaccttcaatctcctccaccaagaaatctttcactgccccctccaggagttcctgaaagtgtggtcacccttgtgaagatggtcaatgaggccaccgcaaacattccggggtgggaggacgatagatgattgatggtctggctgagttgtagtttattccagcacccagctggtatggcttttgttcaaaaacatggaagaatatcattggtcaataaaagaaaagcatttgatt

SEQ ID NO: 25843 - DNA, 2348 bp, Zea mays
  Clone ID: LIB3960-012-B9_FLI
cttgggaaaccctagccgtcgggcgccctgggcaagcccaccggaggacgccggagccgaaggggagtcgcaaacgcagagatccggctacaacgtggctttcccgaccggttgtggcggcgatttcgcatcacatagatccgctcgtggccttcccttctgcgcggtcggtggatcctctggagctccgctggcgccccgagcagggctctctcggcgtggagggcggaggcaagggacgggtgtggcagcggcttcggccagcccacggctcccagcccctggcgggcagcactcagtccctggcggcgagctcgtattcccagaccttgcctccactttctggtggttctagcagcaattcgatttctggtgagaaatttcactccgaagatggttcaactctttttgcaagtgccggcagaatgcggcagtgttaatacagttgtcgtggaagggaggagatctctttttcacaatgttgagtccataatcaagtcattgacaaaatcagcaggcaggtatgaagctcggctgtggctctgtgccactgtctcgttggtccattcgctcagtgactgtggccagagggacctgtttcttgatctcttagagaggaagaattccaggcgtgatgtcgctgctcgcttgctgcgtatgattttcgataagaaacccagaatggttgggtctattctagcaagaaaaggccatatactggaggatttcttccgaggaaatccaaacaggataatgcagtggtttggccactttgctgttactggggaatccacacatagaaagggagctaaggcactttcgcagtttgcgtttgtaaatcgtgacaggtgctgggaagaacttgagtggaaaggcaagcatgggcaatctccggctgtagttgctaccaagcctcactattttcgtgatcttgatgttctcgagacagtggagaatttcttagagtatgtcccagatttctggtcttctgatgagcttgctaattctatcaaagatggtgaaatactgcaaatcgatgaagaatattttgtagatcaatttttatacttaatgtatgaggagaattccaaagatgcatggcatgtggttgaagattttttgatggacgagcagttctcttctctttgccagcatcttcttatccatctggatgaggaaaggcttcttggtttcttaaattctttaggcaagctcatcaatcctactatgcagtgcaaggaattgacattcccgtgttgttggcttgaagttcttttatcaggacattatgatcacatatctcttgatgatcttgtctttttgaactgtgtcattgccaagggtagacaactttggcggctcatgaacgatgaagaacaacacgaagaatgggggcaaatggaagaacttttgaagggcggaaaccatttgactgatgctgatcattttgctctcatgaaggaacttgtggagacagaattacctggtgtgcttaagtgggtaggcattcagtcctggataattttctgtgaattgtcgaaagaatgcaaatcaggagattcttgtgaatcttttttctctcataacaaaatagaatttcacaaggctgatgattactcattggttcggaattatgggttctcaatttcacatatgcctgatattgatgttgaagatctaactagaagcagccataaaaggagaaagaggaataggagaaagcgccataggtacgagtctgatgaggacaagtttgatgaactgcttgaacttggatcatctgatggaaagaatggtgttgagtcacagcgtggaagctggcgcctttcaactgatggtttctctgcttcttgggacatttcagacataccagatcacctttctacttgttatttcacaatttgggtaaagtgggcttgctttagatgattgtctacacagtatgtgtagtatatcaatctgggtgccttttcagctacagaatctatgagcatggagctcaggcaggcatatttctgcactaattctgcaacattttggtgatgggttctgatgatgcattctgggattgctgaacgctgcatgagatccaggacaactctctttagttgggatgctgaaggttgacacctgttgaagaattttggttgcataggcattgaatatggtccaggcatttccttgaaacccatttggactttggagttagttgtagagaactcaggtattgactaagctaagcaaaaacgagtttgtaattgtgttgtctagtgctagcgacattttgccaactacacctgttgtaaatataccagattgttgctgtgaatttgattggaattgggttg

SEQ ID NO: 25844 - DNA, 671 bp, Zea mays
  Clone ID: LIB3960-013-A2_FLI
gcatgcttgccatgccgtccgcccggagcttcgctcacagcaccttcttcttctttgcccctcttattcagttgtctggtgtgttgtgtgtgtgagtatctctgaataagaggggcaaagaagaagaaggtgctgtgagcgaagcactggtcgtcgcaccgccatcatcggcggtgtgagtgcatgcagcgaggaagcatgcttgccatgccgtccgcccggagcttcggcgccgcgggctggtggcgtgtgagcagggatgcttcggcggtgcacaagaaagaaggcaagtcttatcggcaagggaaggctaagcctttcttccaggtctccctctctccatctaaatcattctatgtgtttggaggagggggcaatcgatcgttacttactggtctcctgatccttagcggtcatgtctctgtgtgtgtgtgtgactgtgtgctccatctccgtgttgatttacagctagaataatgaccagttcagagtgaatgtgtgagcgtgtgtgttcaagtgtcagtgagtgaacctggcgttgtattttgaccgtgtgagtccgtgtcgtattttcagttgtctggtgtgttgtgtgtgtgagtatctctgaataagaatgtaatgctatatgtgtgccgtgttaattaacttgatcgagctgatctttaatt

SEQ ID NO: 25845 - DNA, 1361 bp, Zea mays
  Clone ID: LIB3960-013-B4_FLI
gtggccacgtacgagtgacctcgattattctgtttgctctcgttcaagtcatcgtctggtcgcgtcggcagcagacgcccagagccggagggagcgccatggccgcgtcggatctggagagcaaagccaaggaggccttcgtcgacgacgacttcgagctggccgccgaactctacacgcaggccatcgacgccgggcccgccactgccgatctctacgccgaccgcgcccaggcgcacatcaagctcggcaactacactgaggctgtggcagatgctaacaaagcaattggtcttgatcctacaatgcataaagcctactaccggaaaggtgctgcatgcattaagcttgaagaataccaaactgcaaaggctgctcttgagttaggttcttcctatgcaccaggcgattcaaggtttacccgtctattgaaggaatgtgatgagtgcattgctgaggaatctagccaggcaccagcaaagaatgtcgaggctcctgtagctgctactgttgaggacaaggaggatgtcgcaaatatggataatacaccgccagtggtagaacccccaagcaaacctaaatataggcatgactactacaacagtgccacagaagtggtcctcacaatatatgctaagggtgttcctgctgatagtgtagtcattgattttggtgatcagatgttgagtgtatccattgaagtacctggtgaagaaccgtaccattttcagccccgtctgttttctaagattatccctgagaaatgcaagtatcaagttttatccaccaaggtcgaaatacgccttgcaaaagctgagcaggtgacatggacaaccctggattatagtggaagaccaaaggctattccccagaagataagcacgccagctgaaacagccccaagaccttcatacccatcttcaaagtcaaaaaaggactgggataaactggaagctgaagtaaaaaaggaggagaaggaagaaaaacttgaaggtgatgctgcattgaacaagttcttccgtgatatctacaaggatgctgatgaagatatgcggagggccatggacaagtcattcagggaatctaatggtaccgttctctcaaccaattggaaagatgttggatcaaagacggtggaagcgagccctcctgatggtatggagctcaagaagtgggaaatttgaagtttggactgcccctcttgtaaatccaggtcttggaagttatgacctagttctgtccacccatttggtgtcgtaagtttggttaagtgtgtgtgtgtttttggttcagctgtcgttcgaggaaaagctattgtaagttgtggactgtgtaaaagctgcaatagattgtgggttgtg

SEQ ID NO: 25846 - DNA, 1244 bp, Zea mays
  Clone ID: LIB3960-013-C10_FLI
aagcagtcgtcgttcgtgaagcacaagctgccccccctcctctccctcttctcgtgtcagcgcctggaccaaagacgatggccgtccctgttggtcgcctcgccgcctccacgctcctccagctcctcgtctggctcccgctccccgcgtccgcctgcgaccgctgcgtgcgccactccaaggccgcatactactacacctcctcgctcaccctcgccggcggctcctgcgggtacggcaccgaggccgcctccttcagcgccgggctcctcgccgccgccggccccgcgctgtaccgcggcggcgccggctgcggcgcctgcttccaggtgcggtgcaaggacaggaagctgtgcggcgcggcgggcgccagggtggtggtcacggaccgcgccaggaccaacggcaccgacctcgtgctcagcagcaccgcgttcgcggccatggcgcgccccggcatggcccggcgcctcgccggcctccgcgccgtcgacatcgagtacaagagggtgccgtgcgagtacaagcacaggaacctgtcggtgagggtgcaggagaagaggcgctccccggggggccctggcgacctcgccatcaggtttctctaccagggcggccagaccgacatcgtcgccgtcgacgtcgcgcaggtgggctcgtccaactggaagtccatgacgcgccacagcggcgggccggcgtggagcacgaggcaggcgccggcggggccgctccagctcagggtggtggtgacgggcggctacgacggcaagtgggtgtgggcggagcgcgaggtgctgccgcggcggcggcgcgccggcgaggtctacgacacgggcgtccagatcaccgacgtcgcccgggagggatgcgtcccctgcgacacgcgcgagtgggagtgagtgatgcatgtggacgaaccacgccagtgacggcagaagcagaagcagaagcagaagcccaagcgctgaagcttcaactcaacttgaagagcctgcctgtagaattgctctagctagctcctccgtgccactgcccttttgggcttgcctcaaaggtcaccggagacgacgagggagacgactaattaacagacgctgacagagtgacgcgcgagaggagaggagagttccgaacccccccccctctccgctgtactgtacatgagctgctgacgtgtcggataagtagtagtagctagcgtcccggcgggtgctggaaagaataataataataatgtaacg

SEQ ID NO: 25847 - DNA, 1846 bp, Zea mays
  Clone ID: LIB3960-013-E3_FLI
caaatccacatgtttgcgtggaattgcgacagtcgcacagagcacttttgctaaatcgctagttcgtttcctaaaccctagcaaagtaggaatggcgtcggcgagcatgctcgcgcgctcccttctccgcaccccagaccctacccaaacgagccacccgaaccgccggagcgccgctgtcgtctccttcccccgccgccaccgccgcctgtccgtgcgcgcctccgtctccacggcctccccttccccaccgccacagcccgcggcggcggctgccggcgtgccgaagcactgcttccggcgcggggccgatggctacctgtactgcgagggagtgcgggtggaggacgcgatgacggctgccgagcgcagccccttctacctctacagcaagccacagatcctccgcaacctcgccgcttaccgcgatgctctccaggggctccgctccatcatcgggtatgccgtgaaggccaacaacaacctccccgtgctacgcgtcctgcgtgagcttggctgcggcgccgttctcgtcagcggcaacgagctccgactcgccctccaggcgggattcgaccccgccaggtgtatatttaacggaaatgggaagacactcgaagatcttaaattagctgctgagagtggagtatttgtaaatgtggatagcgaatttgatttggagaatattgtcagagctgcaagagctactggaaagaaagtgcctgttttgcttcgaataaatccagatgtggatccacaggtacatccgtatgttgccacgggaaataaaacgtctaaatttgggatccgcaatgagaaattgcaatggtttttggactctatcaagtcatacccgaatgaaatcaaacttgttggtgttcattgccatctgggatctactattacaaaggttgatatattcagagatgctgcagttcttatggtgaattatgtcgatgaaattcgagcacaaggttttaagttggagtacctgaatatcggaggtggtttgggaatagattaccatcataccaatgcagtcttacctacacctatggatctcatcaacactgtgcgagaattagttctctctcaagatctcactcttattattgaacccggaagatccttgattgctaatacttgctgcttcgtcaatagagtaactggtgttaaatctaatggtacaaagaatttcattgttgttgatggcagcatggcagaactcatcagacctagtctgtatggagcataccagcatatcgaactggtctctccccccactcctggtgctgaagtagcgaccttcgatattgttggaccagtttgtgagtctgcagatttccttggaaaagatagggaacttccaacacctgatgagggagctggactggttgttcatgatgcaggtgcctactgcatgagcatggcttccacctacaacctgaagttgaggccaccggaatactgggtggaagcggacggttcgatcgtaaagatcaggcatggagagaagcttgatgactacatgaagttctttgatggtcttcctgcctagatgtttattatctgcgactgctacggacgatgttttcttggggataattggattttctttgtcaagctcatttttgctttcttgtggttatgtaatgtttctggatagctagttggtgcatcctcctcaacttccttttcatttctgttagtttcgtcaccaagttcgttctcaattactatttggttgtaacccagctgtaggatgcctggcttgcctgtatccgtctgagcgtgatttggttgggaactgacggtttcacctggtacctggtgagacatgcctgcg

SEQ ID NO: 25848 - DNA, 1149 bp, Zea mays
  Clone ID: LIB3960-013-H7_FLI
gtctcctccccagatccatcaattcgttcggaccgcccttctcgtgtccccgttccaaagcgcggcaggctgagcggttccgtcagatttgagtcgtcatgaatcccgagtatgattaccttttcaaacttctgcttatcggtgattctggtgttggaaaatcatgcttgcttctcagatttgcagatgattcatatctggacagctacatcagcacaattggagttgactttaaaattaggacagtagagcaagacgggaagaccataaagcttcaaatttgggatactgctggacaagagcgcttcaggacaatcactagcagctactaccgcggagctcacggaatcattgtaagttggccacctgaactagcgacttctgaaacttgtcaaccatattgatcatgttactatactggctgggttctgctgttggcttgcagattgtatatgacgtgacagaccaagaaagcttcaataatgtgaagcaatggttaaacgagattgaccgttatgcaagtgacaatgttaacaagctccttgttgggaacaagagcgatctaactgctaacaaagttgtggcaaccgagacagcaaaggcgtttgctgatgagatgggcatcccattcatggagacgagtgccaaaaacgccatcaatgtggagcaggccttcatggctatggctgcatccatcaaggacaggatggccagccaaccagctgcggctaacgcaaggccagcgaccgtgcagatccgcggtcaacccgtcaaccagaagacgtcttgctgctcatcctaaggttgcctgatttttttttgtactttgtgtaaactcaaacacacaactactaccttttgtgtgcgcttgcaaatgtatttgcattattttcagaagacgctgctgatagcatctattcattgatcggacgattagggctagcttgtcgaactccatttttccaagggatttctatttttctaagagaaattatttttattttttcttaaaaaaataagaatttttttggaaaaatggagttaccaaactagctattagggagctgcaaatatgtaagcaggtacttggtgcactctcgactttccattcctttctaccctatcatacagcttcaccgtttataagcc

SEQ ID NO: 25849 - DNA, 1610 bp, Zea mays
  Clone ID: LIB3960-014-B8_FLI
gctgggctggtgctggctgctcgtgccgtccggccgtccctgctctgctggagtgctggacgctcggagaggcggagagcagacgccggcagagacgcagagggcagaccgtgtcctctctccactgtccagtgatccagtctcctccggcctccgcggccgtgggtgcacggagccggacagccgatcagccggccgcgagcccgccgcgaggacaaaggaggccgccggaccggagcctggagactggagagccagccgccagagccgaggtatcctgttgccggcttgccgctgttggatctagcggccaggagggcgatttggtgccgttgccgtactgccgtgagccaagagtgactgctgttggcgctcggcgattgggcccatattgccatacactgtctctatggagctgaagtgttatgtattggcagcgtgactggtacttgacaatactctagattaccgaacaacagtttgagccagggattatagccaaaagggattatacccccaaggggttcaagtgataaagaggggattaactcaatccctcctggattcaatacctctctggaataaaaacctgtaaaccgaacatgcccctagggaagtaatccattgcaaacgaacatgccctcagggtttactattgtgtccgctcccaccgggtctgcgcatcagagaccgacaagactgggaaatccagagatgcatttttctaccgatcagctgatcggctcggcgttcattgcctttgggctcacattgttcgtgtgtttcttctacgttgccgtcgtgtccaagctgcttccgccacatcaaaatggattcctggccgccatccaaaacgactggtattactgtctgcttgtgccgttgacgcttcctgtaataatcgtggctgtctacctgcactggctcagcatgaagatgttcaagcacgcatgaagcagtcatgcagcttccttccggtttcagaatcctggtcaaaatcgaggagtgtagcaccaattagttcgagtgatgtctctctgcccacatcatcattagatctcccagatgttgcagatctctttgctccccctgcagacaatgcatcaaggaagagggaatcaaatgggtctgctcttcatgactcgcgcaataaatttccaaggatgcaatcacaatcccaaggcataggaagtgctgcagggaacgccctaattccaccgcagcttcgtggaaggagcaatgttgttaccgaagacatgagcaaactctttgtggctaaacgaaaagagtagcatcttaaccttttctggacctgaacctctgtttggactccatagactgataaacgcatgtactgagtgcaatggatgtgccggcatgatccaaggttgttgctgaatcctaaagaaccggacgaaggatgctaacggtaggacgacctggtctcttagcctaccgtgggctgttgtcagatgtcaaaaatgccctcttagaagtttagaacatttctttggtgctcactcgcgtttcatgttcaacggtgctacatgactggtgctggatgcatgtaaactctgcaaccctatcatgtcatggcagctagatgctac

SEQ ID NO: 25850 - DNA, 992 bp, Zea mays
  Clone ID: LIB3960-014-D8_FLI
ggaatcctcgggtccgtccggccacgcaagcggcggcaccaccattcatctacgaatccatgggaggagattggagtggggccagctaacggatcggagtcggagtccttcttgtgcttctcctgctctgctggtgccgctgccatgggtttccccagcacccccaacctgaagctggagcctcgccctcgcacgcggaggctcctgcgctgcgccctcagctctgagcctgtgcctcccatgactgtttccatcactggagccacaggtttcattggacgcagattggttcacaagcttctatcggatgatcacaaggtttgcatcttaacaaggtctgcctccaaggctgcgtcagtttttcctgcttccacctatcctggactcacaatagcccagcaaggggattgggaggcatgcgtcagaggctccactgctgttgtcaacctggcaggcatgcccataagcactagatggtcacccgagattaagcaggaaatcaaacagagccgggtcaatgttacatcaaaggtgtgcagagaatgggaggccacggcatgccaagtaaaccaggaggatgttaggcttgtacttctccggattggggttgttcttggcaaggacggcggtgctctaggttgctgtgtttcatttaattccttttctcccctcttgtccttttattttccttcctcaagagaaggaccattccaatctacgctgcttattcacctggttcatctgtccatctgcagcaaagatgatacccctttttatgatgtttgctggtggtcctctggggacgggacgccaatggttgcttctctctcttgtgctacagacttatagtatacgctgggatcctagtcattctgttttcagacagatgggatttgatcgttagtacattcaacttcagcatattgtaccaattaattgattatctgattgctaggttttcttggattcatctggatgacctagtcaacctc

SEQ ID NO: 25851 - DNA, 808 bp, Zea mays
  Clone ID: LIB3960-014-F2_FLI
cccagtctcggaagagaactatccagaagcgcaagactccaaagccgtcgccttcctatccatcccttcctcgccacgggggtcgcctgagatcacataaacaatggtgaaggctgttgctgtgcttggtagcagcgatggtgtcaagggcaccatctttttcacccaagtgggagatggccctaccactgtcaccggaagtgtctctggcctcaagcctggcctccatgggtttcatgtgcatgcgcttggtgacaccaccaatggctgcatgtcaactggaccacactacaatcctgcgagcaaggaacatggagcaccagaagatgagaaccgccatgccggtgatcttggaaatgtgacagctggagcagatggtgttgcaaacattaatgttaccgacagccagatcccactgactgggccaaactcaatcattggcagagctgttgttgttcacgctgaccccgatgatcttggaaagggtggacacgagctcagcaagagcaccggaaacgctggcggccgtgttgcttgtgggatcatcggactccagggctgaactgaaacgaatggtcgctggacttcgggggcgcctgggagtgccgtcaccactcaccagcaggctagaataacatcccgagacatcgtgaaataataataataagagcgcctgatatgtgatcagtggtgtactcgccattaagcacctgtggcaaccgatgagctgaactgtgttggactgttggataatgctggttcgcctgagcatgtgttacaagtctgtcggttttgatggcattccgac

SEQ ID NO: 25852 - DNA, 2920 bp, Zea mays
  Clone ID: LIB3960-014-G11_FLI
cacaccgaatctcccctctcgtctaccctcctctccttcctcgccgcacacacagacacacgcaaaaacatttctcccccctcccgactgctactgccgctgcctcctccccctttccgcccgccttcgctccctcccaacccccttcctcctccgtctagggtttcccgccgccgcctgatccgagtcagatgccgcccgcaacagccatggcgccgccgtcccagcccccgtctaactcaggggatccgctgtacccggagctctggcgcgcctgcgccggcccgctcgtcaccgtcccccgcgtcggcgacctcgtcttctacttcccccaggggcacatcgagcaggtggaggcgtccatgaaccaggtcgccgggaaccagatgcgcctctacgatctgccccccaagctgctctgccgcgtgctcaacgtcgagctcaaggcggagacggacaccgacgaggtctacgcgcagatcatgctcatgccggagcccgagcaaaccgatgtgccggctgagaagccgagttctgcacctgctgcgtcgccgaggccagcagtcaggtccttctgcaagacgctcaccgcctcggacaccagcacacacggtggcttctctgtgctgcgccgacacgctgacgagtgcctccctcccctggatatgacccagtcgcctcccacacaggagctggtggcgaaggatctgcatggcatggagtggcgcttccgccacatctttagagggcagccaaggaggcatctccttcagagtggttggagtgtttttgttagttctaaaaggcttgttgctggtgatgccttcattttcctcagaggagaaaatggtgaacttcgagttggtgttaggcgggcaatgaggcaattgtctaatgtaccttcttcagtcatatctagccaaagcatgcacctcggagtccttgcgactgcatggcacgccattaacacgaagtccatgttcactgtctactacaagcctaggacgagcccttcagagttcatcataccgtacgatcaatatatggagtcggtaaaaaataattattctattggcatgagattcaggatgaggtttgaaggagaagaggcgccagagcagaggtttactggtacaatagttggttgtgaaaatcttgacccactatggcctgattccagttggagatacttgaaggtgcgttgggatgagccttctactatcccgcggccagatagggtctctccttggaagatagagcctgcttcatcgcctcctgttaatccactcgtgcattcttctagagcaaaaagacctagacaaaacgttcctccaccttcacttgaatcatctgttctcacaaaagaaggtgcaaccaaggtcgaaatcgattcagctcaaacacaacaccaaaattcggtcttgcaaggtcaggagcagatgaccttgaggaacaacctgactgaaagcgctgattctgattccactgttcagaagccgatgatgtggtccccatcactcaatgggaaagcccacactcattttcagcagagacctgctatggataattggatgccattgggaaggcgtgaaaatgacttcaaggacacccgttctgccttcaaggatgcccgcaccgcctctcaatcatttggagatacacagggtttttttgtgcaagcttatgatgacaatcatcaccgtctctctttcaaaaatcagggttcaactcatcgcttcgcagatccgtacttctatatgcctcaacaatcgtcagtgacggttgaatcaagcacaaggacacaaacagcaaacaatgacttgtgtttctggggtgaccagaatgctatgtacggcaatccaagtgaccaacaacagggtttcaactttggacaaaacccatcaagttggttgaaccagccatttccccaggttgaacagccacgagtggtcaggcctcatgcaacggttgctccatttgatctggagaagactagagaaggaagtggcttcaagatttttgggttccaagttgatacaaccagtccatctcctgtccaattgagctctccattgcccgctatccaggagcatgtgttacaaactcgaccatcggcaccggtgaatgaattgcaacctgtgcaaattgagtgcttgcctgagggatctgtaagcacagctggaactgcaacggagaacattcagcaagccccgcagagttcaaaagatatccaaagcaagtcccagggtgcttcaacaaggagctgtacaaaggttcataagcaaggagtcgcacttggcaggtcggtggacctctctaaattcaccgactacggcgaactccaagcagagctggacaagatgtttgacttcgagggtgaattggtatctggcagccaaaactggcagatcgtctataccgacgacgagggcgatatgatgcttgtgggagacgacccgtgggaagagttctgcagcatagtgcgcaagatctacatctacacgaaggaggaggtccagaagatgaactcgaaatcagctgcgccaaggaaggaggaatctccggcagcgggcggcggaggaggttgcgccgccgccacaaacgagtagtatggtggtttgctcttggtggcaagttgaggccaaggttttactactgctattgttattgctgatttgctctccccgccttccggtgtaaatatctgtgtgtacccagtcccggccttgtgctagtaagtagcaagcagtgttaccttttggtattttaaccagcagctaagttcgcggcattttagtccctgtaagcggtaagcagctctgtagcgtgagatagatggccaagcgccggtacgtacgtgtagtgtctggtcttctcactgagtgtactataaagagttaatataggagctgaccctgtg

SEQ ID NO: 25853 - DNA, 1663 bp, Zea mays
  Clone ID: LIB3960-014-G3_FLI
gccgcagaccgggagtagccgacgcgccgtcactgaatcctcagatcacggctagccgtaatcacgacactctgctgactcccggcgagcagtgtaacattttccttcagccatgggcaaggagaagactcacatcaacattgtggtcattggacatgtcgactctggcaagtcgaccaccactggccacctgatctacaagctcggcggtattgacaagcgtgtgattgagaggttcgagaaagaggccgcggagatgaacaagcggtcattcaagtatgcctgggtgcttgacaagctcaaggccgagcgtgagagaggtatcacaattgatattgctctgtggaagttcgagaccaccaagtactactgcactgtcattgatgcccctggacaccgtgacttcatcaagaatatgattactggcacttcccaagctgactgcgctgttcttatcattgactccaccactggtggttttgaggctggtatctccaaggatggacagacccgtgagcatgctctccttgctttcacgcttggagtgaagcagatgatttgctgttgcaacaagatggatgccaccacacccaagtactccaaggcccgttatgatgagattgtgaaggaagtctcttcctacctgaagaaggttggatacaaccctgacaagatccacttcgttcccatctctggtttcgaaggtgacaacatgattgagaggtccaccaaccttgactggtacaagggcccaaccctacttgaggctttggacttgatcaatgagccgaagaggccttcagacaagcccctgcgtctccccctacaggatgtgtacaagattggtggtattggaactgttcctgttgggcgtgttgagactggtatcatcaagcctggtatggttgttacctttggtcctagtggccttactactgaggtgaagtctgttgaaatgcaccatgaggctctccaggaggcccttcctggtgacaatgttggcttcaatgttaagaatgttgctgtgaaggatctgaagcgtgggtatgtggcctccaactctaaggatgaccctgccaaggaggctgctagcttcacatcccaggtcatcatcatgaaccaccctgggcagattggcaacggctatgccccagtgctggactgccacacctcgcacattgctgtcaagtttgcggagctcattaccaagattgataggcggtctggcaaggagcttgagaaggagcccaaatttctcaagaatggtgatgctggtatggtgaagatggttcccactaagcccatggtagtggagaccttttctgaatatcctcctcttggtcgctttgctgtccgtgacatgaggcaaacggtggctgtcggagtcatcaagagtgtggagaagaaggacccaactggagccaaggtgaccaaggctgccgcaaagaagaaatgatgtgtctggctggttctgtgtttgcttgagggatacctagtggaaacataaaatatctcgtcttgttcacgtcattgtctgaactatgctcgcaacgtttgcctggtcgatttagaactgttattttcgttaaaaccagagtgttatttaagacttaaccgaacatctggtgagccatatatggttactagttttgttactaccctt

SEQ ID NO: 25854 - DNA, 1618 bp, Zea mays
  Clone ID: LIB3960-014-H2_FLI
tcattagaaaacgacgtctcgccgttcttcgtcttcagatctagggttctctcgtgctctgttctcatcttctgctcgctggtgtcccctccctctcacccatggcttcggcggcggcggcaactcaggtggggacttacttcctgcggaactactacaacctgctgcaacaaacccccgatgtcgtccaccagttctacagcgaagccagcaccatggtccgcgtcgacgacctcaccggcacgaccgcggctgccaacaacatgatggacatacactcactcatcatgtctttgaacttcacccaaattgagatcaagactgccaattttgtgaactcatggggcgatggggtgctagttatggtctctggtctagtgcagaccaaggagtacagccaccaaaggaaatttatccagatgttcttccttgcccctcaagagaagggttactttgtcctcaacgattactttcacttcgttgaccaagaacatgtgcagcctgcgccagtgattgctcaggaagactacgagagcaatttggcacccaacacagttgttgagaccgctcctgagtacgttcacgaggaagaagctcaacaaatagcacctgaagtacatgatgtggtcgaaaactatacttattctgagccacaacagcaagtagtgtcggacaactggggagaggagcctcttcctgaagaaccgccttctttctcaaatgaaatggcagtcgctcctgaggagccagtgcaagctccacctgtgccacttcctcacgtggatgagcctgtttgtgaaccagtaaagaagacttatgcttccatcctaaaaaccgcaaaggctcctcctgcattcccagtagcccagcaagtacctgtgagtaagacttctcaccctacaacagagtcaaaccaaacccagcattcagttatggcttcatcaatgggaaccgagaaaccgaggtctgatgtctttggtgagggtgcttcccatgatgacgaagagagcaaatctgtgtatgtcggcaacgtgccatcatctgtaagtgaggctgatcttgaaaacgagttcaagaaatttggccggcttattcctgacggtgttgctatcagaagccgaaaggagactggcggctattatgctttcgtggaattcgaggaactcagcggtgtacacaatgcgttaaaggcttcaccaattgaaataaatgggcggcagatatatgttgaggagaggaagccaaatagcggaataagaggtggaaggaggggaggacgtggccgtttcagtggtggaggccggggatattcgagaggtggaggcgacgagtacaatagtaaccgtgggaggtcaaacggttacggtcgtgctcctcaccaagagaggggcatacttgggagccacactccaaggaactgattcagtcgagcagcaaacataaggttttgatccgtgtcgtcaaagcgagagagagagagatcctaaacaatccgcctatcagctactaggccgcgtttgggttttggggcttgttttgtcgatgaatgtgtgtgcgcgcgtcatcgacctatgtgacacttaaaacttttgctagtctgacgctatctctttacatt

SEQ ID NO: 25855 - DNA, 1631 bp, Zea mays
  Clone ID: LIB3960-015-F4_FLI
catccgtttgcctcttctccctcttgccggtcccgaataaagagcagcagcgcaagaggtcggtagagcgagaagaaggcaatggcggccgagagcttccttttcacctcggagtccgtgaacgaggggcaccccgacaagctgtgcgaccaggtgtcggacgccgtgcttgacgcatgcctcgcgcaggaccccgacagcaaggtggcctgcgagacctgcaccaagaccaacatggtgatggtgttcggcgagatcacgaccaaggcgaccgtggactacgagaagatcgtgcgcgacacctgccgcgagatcgggttcacctccgacgacgtgggcctcgacgccgaccgctgcaaggtgctggtgaacatcgagcagcagtcccccgacatcgcgcagggcgtgcacgggcacttcacgaagcggcccgaggagatcggcgcgggcgaccagggccacatgttcgggtacgccaccgacgagacccccgagctgatgccgctgagccacgtgctggccaccaagctgggcgcgcgcctcaccgaggtgcgcaagaacggcacctgcgcctggctgaggcccgacggcaagacccaggtgacggtggagtacgtgaacgagggcggcgccatggtgcccgtccgcgtgcacaccgtgctcatctccacccagcacgacgagaccgtcaccaacgacgagatcgccgccgacctcaaggagcacgtcatcaagcccgtgatccctgagaagtacctcgacgagaagaccatcttccacctcaacccgtccgggcgcttcgtcatcggcgggccccacggtgacgccggcctcaccggccgcaagatcatcatcgacacgtacggcggctggggagcccacggcggtggcgccttctccggcaaggaccccaccaaggtggaccgcagcggcgcctacgtggccaggcaggccgccaagagcatcgtggccagcggcctcgcccgccgctgcctcgtgcaggtgtcgtacgccatcggcgtgccggagcccctgtccgtgttcgtcaactcgtacggcaccggcacgatccccgacaaggagatcctcaagatcgtgaaggagaacttcgacttcaggcccgggatgatcagcatcaacctcgacctgaagaagggcggcaacaggttcatcaagaccgccgcctacggccacttcggccgtgacgacgccgacttcacctgggaggtggtgaagcccctcaagttcgacaaggcatcggcttaaggttgggagtgtcactgtggacatgaggactaccttcctctggctctgctgttacctgcaagcattgctgctgctggatgtgtgtgtttgatcagtgactggctgctgctccatagaagatgaacggagagaaggatgatgaagggctttggcaatcgccgctgcaactgcaacccatgccatgccggcttagtgattgggtataatttggcttggcagcagccagcattattatgtgctgatctgttatcttttactagtttggtcgtccgatatctttctttctttttccccccttttcgactctgtactgaaactgctgagagattcgcagtattgttgtatcgtattcatatgctactgtt

SEQ ID NO: 25856 - DNA, 1869 bp, Zea mays
  Clone ID: LIB3960-015-G10_FLI
tctctctccactatctcccacagccgaaccaacatgcaggggcgcagcagggacgccgccaccattgctgcagcggtggcgtgcgcagctgtgctgctcctcggcgacgcctggagcgtctcggcgcaggcggcggcggaggaggacaagataagcgccctgccggggcagccgccggtgggcttcgcacagtactccggttacatcccggtggacgccgcggggaagcgctccctcttctactacttcgccgaggcggaggcggatccggcggccaagccgctcgtgctctggctcaatggagggcctgggtgctcatccgtgggagtgggggcgttctcagagaatgggccgttcaggcctagcggcaatgcgctaacgaggaacgagtacagctggaacaaaggtgagcgtttcttcttgtatgttgcggtagctataccaaatggtgtacgtgtactactacaatggctggtgcaaaaaaagaagaaggaggacaggaaattaggaagtgttaaaaactccccttttggtacccctgtttgctgtgtgtgtgtttcagaggccaatatgctgtatctggagagccctgcaggggttggcttttcatactccactgatcctgccttctatgagggtgttggtgacagcatgacaggtgaatcacagattatttctttctttcttttccacacttgcagacccatataattcgtctttgggtgttttggatttctgaagccagagacaacttgaagttcttgcaaggctggttcgccaggttcccgcagtacaagggcagggacctgtatatcacaggagagagctacgctggccactacgttccacagttagcccagcgcatggttgagttcaacaagaaggagaagctattcaacctgaaaggcattgctcttggcaaccctgtgctggagttctccaccgacttcaactcgcgggcggagttcttctggtcgcacggcctgatatcggactccacctacaacatcttcacgacggtgtgcaactactcgcggtacgtgagcgagtactaccgcggctccctgagcacggcctgcgacagggtgatgagccaggtggcgagggagacgagcaggttcgtcgacaagtacgacgtcaccctggacgtctgcatctcgtcggtgctcatgcagtcccaggtcctcgtccctcagcaagggagcagggagctggacgtgtgcgtggaggacgagacgatgcggtacctgaaccggaaggacgtgcagcaggccatgcacgcgcgcctcgacggcgtgcagaggtggacggtctgcagcagcgttctggagtacaagcagctggacctccagatcccgaccgtgaacaccgtgggcgcgctcgtgaaggcgggcatccccgcgctggtgtacagcggcgaccaggactcggtgatcccgctgacgggcagcaggacgctggtggggcggctggcggccaggctccggctcaacgccacggcgccgtaccgggcctggttccaggggaagcaggtgggcgggtggacgcaggtgttcggcggcggcgccctgtccttcgccacggtgcgcggcgcgtcccacgaggcgcccttctcgcagcccgagcgctcgctcggcctcttcagggcgttcctcgccggacagcagttgccggaatcgttccagtgacgacggaacgttcctcttcctcgtctagtgtatgttcattgtaagcgtgtacgtgcagctcaccgtatgtcgtcatcatccggccgctcgacactggcaaaacaacccaaatgggttcttgttcttctccaggtgtaatcaggacgaaaataatatcattgggagggatgagattgtgtgt

SEQ ID NO: 25857 - DNA, 2003 bp, Zea mays
  Clone ID: LIB3960-017-B4_FLI
tggcttctcctccccctccggttcgggttcgggttcgtgaggttctccggggttcggtttcgtgggtgagcggatcgagatggcggcgtcggatgttgagtaccgctgcttcgtcggcggcctcgcctgggccacggacgaccactccctccacaacgccttcagcacctacggcgaggtcctcgagtccaagatcatcctcgatcgggagacgcagaggtcccgcggcttcggcttcgtcaccttctccacggaggaggcgatgcggaacgccatcgagggcatgaacggcaaggagctggacggccgcaacatcaccgtcaacgaggcccagtcccgcggcggccccggaccagcctaagcatgtccgcccctccaaccaggcccagtacaagaagggccatctccgcccgcatcaccacgcggccgacaaggacgcggccaagaagcaccaccatcttgatgtcaacaccttgagggggcatactgactccgtcactgcacttgccttctccaatgacgcctgcaacctagttaccgtatgtgctgatggagccatcagggtattcaggatcgatgatacctctagcaagagcttcaagattctgaggataaacttgccagctggagcgcaccctacggctgttactttctcagagggctcatcatctgttgttgtggcggcgcaggcgcttctgggatcatctctttatatgtatgcggatgttagcgctcctccaaccgcggaaaacaaactgcagggaaagctttctccacctgaaatcaagtggagtcaccccaagatacatggcaaggagtctgtgctcaaccttgcagcggcccgtgcaactcatgggtctggtgatgggagcactattatcatttcatgctcagaagcaactgatatcaaagtttggcatgggaagagtgggaaggagtttggtacagttgacaccaatcagttaaaaaataatatggctgacatatccccaaatggtcgcttcatagctgctgcggcttttactgctgatgtcaaggtgtgggagatagtttactcgaaggatggttcagtgaaggaggttaataaagttatgcaactcaagggtcataagagtgctgttacttgcttgtgctttgctcccaattctgagcaaattattactgcatccaaagatggttccattcgagtatggaacattaatgtaagataccaccttgatgaggatccaaaaaccttgagagttatgccaattccacttcatgactctaaaggttctgtttgccagtatgatcacatgacagtctctcctgatggtaaaattctggctgtaacaagtggatcaacgttgcaatggttacttgtggaaactggtgcagttttggatacagctgacaaagcacatgaaggtgatataactggcattgcttgggctccacggacaattcccaatggtggcgtgcatgtttttattttggcgactgctggtgtggacaaaaaggtgaaactttggacagctccagatgttggttcaacatgagtggtcgaggattgaatctgcataagacagctttgccaagggcacagaattgaaggtgagacaatagatggatgcaggcttgatgtagcccagaacagtaggtgctccactgataatattgcactgaaccgaggcagacattgttagttttgttgcgtagagtttgagaggaggaagggaagggaggcctggctgttactgatgagaccccaatgcatcacgcaggcggcagccttggggctgtagtttcgctaccttttatacaataaactgaatgttgtctgcatttgtattttttttctttccttcctttttactgttggaatgatctggctgtgtgatcaacataatttaagctgctgctgcttggaatagacgtcattttattttgtcaagcaaatgtgctgctttgcgcattgtttgacattatattgtttgataaagtgtgctaagtatgaaaatgcc

SEQ ID NO: 25858 - DNA, 2156 bp, Zea mays
  Clone ID: LIB3960-017-G12_FLI
ggccgccggcgcccgccagccgacgtcctcccatttcgctcccctcctccgctgcggtcgagcaaaagttccggccatccggcaatcccccggcacccggcggttcaaatcgtatctgacctgacgcggctacgacgtcgctcctccggtcccttcgatccggtggggtccgtttctttcaagcgcggcctcgctggccgcctcgtggcagtgaccgtcgaaccctctataaatcccgtgccccgagcacccttcctcgatcacacaacccaaagcagccacagcagcctccttcctggcttcctcctctcactctcgctcgtgctgcgctcgctacctcgcttcgcattccattcgaggagagcggtgagaggggaggaaaggcaagatgttcatcgagagcttccgcgtcgagagcccccacgtgcggtacggcccgacggagatcgagtcggagtaccggtacgacacgacggagctggtacacgagggcaaggacggcgcctcacgctgggtcgtccgccccaagtccgtcaagtacaacttccggaccagaaccgccgtccccaagctcggggtgatgcttgtggggtggggaggcaacaacgggtccacgctgacggctggggtcattgccaacagggaggggatctcatgggcgaccaaggacaaggtgcagcaagccaactactacggctccctcacccaggcctccaccatcagagtcggcagctataacggggaggagatctatgcgccgttcaagagcctccttcccatggtgaacccagacgacattgtgttcggaggctgggacattagcaacatgaacctggccgactccatgaccagggccaaggtgctggatattgacctgcagaagcagctcaggccctacatggagtccatggtgccacttcccggtatctatgatccggacttcatcgcggctaaccagggctctcgcgccaacagtgtcatcaagggcaccaagaaagaacaggtggagcagatcatcaaggatatcagggagtttaaggagaagaacaaagtggacaagatagttgtgttgtggactgcaaacactgaaaggtacagcaatgtgtgcgctggtctcaacgacacgatggagaatctgctggcatctgtggacaagaacgaggcggagatctcgccatcaacactatatgccattgcctgtgtcatggagggggtgccgttcatcaacgggagcccccagaacacctttgtgcctgggctgattgatcttgctatcaaaaacaactgcttgattggtggtgacgacttcaagagtggacagaccaagatgaaatctgtcttggtcgatttccttgttggtgctggaataaagcccacctcaatcgtgagctacaaccacttgggaaacaacgatggcatgaacctgtctgcccctcaaacattcaggtccaaggagatctccaagagcaacgtggtggatgacatggtctcgagcaatgccatcctctatgagcccggcgagcatcccgatcatgtcgttgtcatcaagtatgtgccgtacgtgggagacagcaagagggctatggacgagtacacctctgagatcttcatgggcggcaagaacaccatcgtgctgcacaacacctgtgaggactcgctcctcgccgcacctatcatccttgacctggtgctcctggctgagctcagcaccaggatccagctgaaagctgagggagaggacaaattccactccttccacccggtggccaccatcctgagctacctcaccaaggcacccctggttccccctggcacaccggtggtgaacgctctggcaaagcagagggcgatgttggagaacatcatgagggcctgcgttgggctggccccagagaacaacatgatcctggagtacaagtgagccgagtggcgtggcctgcagcgcgaggttagctgctggaagggaactagaaaggcgagattagctgtgggattgtgttgggcttctcgtgttttattttgcgttctttcctagtcatcgctgttgcgcttgtgtatttgtcggacccgtaactaccagggctctgctattagcggcacggagcctgtaattgtactgtatgataatgtgatcgagggtgctacttcccctcggc

SEQ ID NO: 25859 - DNA, 1084 bp, Zea mays
  Clone ID: LIB3960-017-H12_FLI
cgagaaagagcagagggacaccgaaacagagaggagcagaggggagcgacgacaggtcagcggagatggaagcagcggcaggaggagtggaggcggagggggtgatgagggtgctggtggtggacgactcccccgtcgaccgccgggtggcgcagctgcttctcagcagcgactcctgcgccggctcattccacgtcatcgccgtcgacagcgcgaggaaggcgatggagttcctcggcctcaaggacggcggcgaggagcaggccgtcgacatggtgctcacggactactgcatgcccgagatgaccggctacgacctcctcaaggccatcaaggcactgaaccccctggagccgatcccggtcgtcgtcatgtcgtcagaagacgagccccagaggatcagccgatgcctgagcgccggcgccgaggacttcatcgtgaagcccctgcagagcaaggacgtgcagcgcctgcggaactgctccgccgccgcgaggcccagcaagggcgcgacgcagtgcgaggccgccgtcgtggccaagaggaatcataagccgcatcctgccgctgccggcgccggcgccgcgtcgccgtctggacggcgagcgagcctcgccggagtcgccatggtgctgcactcgtcgggcgtggagtacctgccgctcctgctcaagctcgtcgtgctggcgtacgcggcgctgtgcctgggcgagctcctgcacaggtgggcgtcgtcggacggccgctgctcgctctccccgtggtgcgcctgagcagcggtgcgtgtcctgggcaccagcaggagactggtgatgcaaatgcagagtttttcagttgctgaaccaaaaaaaaaaaactccaacagccgtggaggtctagcttagcctttaatttaggcactgtagaagattgactgctttgggattgggtacgctcgcgtctgccgtctgcgtggcgtttgtttcttgatttgagggagacgtatgtatgtacgtacgatacgaggccacggggggtacgctcccctgtatcctctcctctgtatagaatccactgaatcagaatgcaacgcgtgacccgagcc

SEQ ID NO: 25860 - DNA, 1203 bp, Zea mays
  Clone ID: LIB3960-018-H9_FLI
gtgacgacgagtgaggagtctgtgtgaccagtgctcggcgtcgtcccctgcctctgctagccgctaggcgacgggcccttcgccgggcgacgagcacaccggccctgttaccatggcagcgatgaatactggtatgggaggtttaggtggcaggccgatacatccacaagcaaatccttttggacctgctttgcagggtgctggaccaggattgatccgtactgggctagaaacatatggcggaaggattttagattcaagttctgagtttatgcagagcaatataacacaatatttgtccgaccctcagtactactttcaagtcaacagccagtatgtgaggaacaaactgaaggtcatcttgttccctttcttgcacaggggccactggacaagaataactgaaccagtaggaggaaggctatcctacaaacctccagtccaggatatcaatgcaccggacttgtacatccctttgatggcatttggcacctacattgtagctgctgggtatgccttgggtgttcttggaaggtttacccctgaggcactgaccctacagttttctaaagggatacttgggtggtttctgcaagtcgtcctcatcaaaggtctgctgtactccctgggaagcggtgaagctcccttgctggacatcgtggcgtatgctggatatggcttcgctggcacttcccttgcaatggtggcccgcatcttctggagctacctgtattacttcatcatgccatggttctgcctctgcacgggagtcttccttgtgaagaccatgaagagggttcttctgggcgggccaaggagctacgagagacaccccggccggaaccactacttcctgatcttcttggcggtcgtgcaattccccatgctgttctggctcggcaacatatgtggctgacctttgatcctattggtcgggccacagacctgtttcttcttcttcttcagaataggcatgtgctacttctggcttgctgatgaaacttaggtttatcgtggagatggtacagaactattagctatagatatctgggcaatcgaataaactgtttttgtttctgttagctatagaggcgaaagtaaaaacaatcgtttgggataggataaagatgaactgcttcgtgtgtacccttttgtgtcacgagcggctagccacgaccctgcaatctgatttgttttttaatg

SEQ ID NO: 25861 - DNA, 1429 bp, Zea mays
  Clone ID: LIB3960-019-C12_FLI
gggcaggacgacacaggcagagccgccggccctcgcttggtggtggggtctagtttctttctcgcctctgcctgtgcctgctggtggtaagtaataacagcgacacggtacccacgcgcggcggcggcggcggcggcggcgacgaagacgaagacgaagacgacatgaccgtcggcgacgacgcggcggcgccggggcgcgggcagacggtgtgcgtgaccggcgccggcggctacgtcgggtcgtggatcgtcaagctcctgctcgagcggggctacgccgtccgcggcaccgtgcgcaaccctgacgacgcgaagaacgcgcacctgctggcgctccccggcgcggcggagcggctggcgctgtgcaaggccgacctgctcgactacggcgcgctgcgggcggccgtcgccggctgccacggcgtcttccacgccgcgtcgccggtcaccgacgacccggaggagatggtggagccggcggtgcgggggacgcggtacgtcatcgacgcggcggccgagtccggcacggtccgccgcgtcgtcctgacgtcgtcgatcggcgcggtggccatggacccccgccgcgagccggacgccgtcgtcgacgagtcgtgctggagcgacctcgacttctgcaagaagaccaagaactggtactgctacggcaaggctgcggcggagcgggcggcgtgggaggcggcggcggcgcgcggggtggacctggtggtggtggtgccggtgctggtgcagggcccggcgctgcagccgtcggtgaacgccagcctgatgcacgtgctcaagtacctgaacgggtccgccaagacgtacgccaacgcggtgcaggcgtacgtgcacgtccgcgacgccgccgacgcgcacgtccgcgtcttcgaggcgccccgcgccgccggccgctacatctgcgccgacgccgtgctccaccgcgaggacgtcgtccgcaccctccgcaagtccttcccgggctaccccgtcccggagaggtgctctgacgaggtgaacccgaggaagcagccgtacaagatctccaaccagcggctgagggagctgggcctggagttcaccccggcggcgcaggcgctgtacgacaccgtcgtgtgcttccaggagaagggcatcctccctctccctgtccccgccccaacgccggcgtcaccggacgcctgagctagctgatgagctggcccagaaccaacgaagaaacatgtttggcacgcaaaccgctattataacagtcgctgcttcgatcattctgccgctagagatagaatgtggagtgtgtgctactcgttgtgggcgtaagagtgtcagaagagtgcagcagtaactatatcgatgcgactttttatatgttgctatatcatgtgtgacaatctcctaataataaatatatggagtatcgtcgtcct

SEQ ID NO: 25862 - DNA, 1534 bp, Zea mays
  Clone ID: LIB3960-019-D5_FLI
gagaggaggcgccacacccagacgagaggcttcccgagtccaccgccagcacgagtccaccgccggcactttgactcggagccggagattcttgcgaggaactggcagggatctgctgcccatccgcatatcatgctgcaacagtagttcactcgtcggaggaaggcgcatcacacgaactaggtggaaggaaccggacggagcttggagagggcaagcgggcaaggggagtgagtagtggttctcggtgtcttctttaaccactctgtccgatccgctggtgtgtctgcgcgatcctgttgacgaatcaatcgccgggacggttaattaagcattccaatcctcagccatggccgtggacactactcaaccggagtactggctcaactggaggttcttgctgtgcgcgctctgggtctactcctgcatggccttggcattcttcctgattaagaagtacgagggggccagttcaccggacagcaatggcgatgacggtggagacagagaagaggcgttaccacgtgtcagacctggtgttgtttatcttgaagattgctggaagacatgccaaacttcgactccctgttgtattgaataaatttttgcagactataactcttacccctgaagaatttttctcccagtggaaagcgcttactgttcattcgctgaaggttcaagaagtggttaaaggtgtgaaacccatgcctctttctgagatggctaatcttttcatgagccttcacttggcggtcgctcctggacttgataacaacccgaacaatctggttgcatgcacgacattcttttctgaagcaacacgtgccatgctttgtctgatacgagttgaaacagatccacaagacaggacccaactgcggctaacagttgcctcgggcgaccaatatttgacattcgagttgaaagagttcatcaaagaacatctggttgatatcccaaggactcaggtcgccccacctcgcgcagcagtccagccacagttgcctactacagcacctgccacatacaatgaccctggtaccatgcttgctggattgctatgagaagtaacccgaaggaatagtgttttgatgtacatgacagttatttaatacgaggatctaacatctccacaagcatcttgctgccaagacgtacacgtggagcaaccaagaaagagctggcggagtgtagtctccatgaggattctaaaccgagaaagagcttagattctttttgtgcggtttgaaggccccctccctctccatgtagcagttgccgtattgtgtaagcgtaacttgttgtttctcattattatcatccccttttggtccatttgtataacctgtatcgcccatgtctggtggtggacaatcggtagtttttgtgtgttaatataaggtgctaggttttcccaccatgccgattgtaaagttgccctggtgcgcattgcactgcgatttgtacggaatagggaaggaaaaatttataggttttgctttgtgcatgttctatggtttgcatagctccc

SEQ ID NO: 25863 - DNA, 1574 bp, Zea mays
  Clone ID: LIB3960-019-D7_FLI
tagctccacacgcgcggaggtagtatagccgggaggggcacagagagaggagcgaacgagaggaaggagcagcggcaactacacgccagagagagggaaggggaggttggccagagagccgagagcagccctgcagtcgagagcatccgactgctagctactagcaatagcataggcagataagctcgggccgggccggggcacgcgcacaatgaggtcgcggcggtggcacagcgtggtcgccgtagcgctggcagcggcggcgtggtggtggtgcgcggcggcgcaggcgcaggcgcaggcgcagctgagccagagctactacgcgtcgacgtgccccgacgtggagacgctggtccgcggcgccgtcacccagaagctgcaggagaccttcaacgcggcgccgggcacgctccgcctcttcttccatgactgcttcgtcaggggctgcgacgcgtccgtgctgctgtcgggccccgacgacgagcacagcgcgggcgccgacaccacgctgtccccggacgcgctcgacctggtcacccgcgccaaggccgccgtggacgccgacccgcgctgcgccaacagggtgtcctgcgccgacatcctcgccctcgccgcccgcgacgtcgtctcccagacgggcgggccgtactaccaggtggagctggggcggctggacggcaaggtaggcacgcgtgccgcggtgaagcacagcctcccgggcgccggcttcgacctggaccagctcaacaagctcttcgccgccaacgggctcacgcagaccgacatgatcgcgctctcaggtgggcacacgatcggggtgacgcactgcgacaagttcgtgcggcggctgtacccgttcaagggcgccgccgccggcccgccgatgaacctctacttcctgcggcagatgcggcggacgtgcccgctgaactacggcccgtcggcgttcgcgatgctggacgccgtgacgccccgcgcgttcgacaacggctactaccggacgctgcagcagatgaagggcctgctggcctccgaccaggtgctcttcgctgaccgccgctcccgcgccaccgtcaaccgcttcgccgccaaccagaccgccttcttcgacgccttcgccaacgccatggccaagctcggccgcgtgggcgtcaagaccgccgccgacggcgaggtccgccgggtatgcaccagggtcaactagccctgcccagctccagatgcaatgcatgcgagccacgtccacgtgcacatgaaatgaagctagctagctgctagcctagctttagctagctcgttattactaggggcgccgggggttgggaaagaatgcttcatgagtcatgtccgtccattcatccatccatccatccatcacacggttcacagtcagtcacagtgtactattgattcgttggtccgccgattcttttctttccttggtgattgttgtgtatgtagcagaagtaataattaaaaaaaccatgtaacaagaagagggatgagctttgagctccacacttgtactgcatccaatccaatgtaaatgaatgccacggttcgtcgtcgtc

SEQ ID NO: 25864 - DNA, 3039 bp, Zea mays
  Clone ID: LIB3960-019-E8_FLI
ggatcaactcatatcaactgaccgagcgcttgtcaaaaaccaaacagaacaaggacccaggcaaaatccactgacggcaagagataggagggagatctcgtgatttccggtggcaaggttcggttttgatcccaaccccaggttcctcaccccgaggagaaaaggatccagattttcttcctctctagtaagttgcagttcgcggtggcgccgccccccgccgcttcctccgtgttgcgcggttccgatttggagtgagggggagcgcgtgccgtgggattcccgttcggatctacggagtgggcagctttcctgctccaattcggtcggccagcaacgaaggcccttgaatcttgttgatgcgcggccagatgcgggaagcgtactgggagaaggtttcttggaatcttcgtccgggctccgtggagtgaggtccctcgcccgccgggatcgccccgtcgtcctatgggctgcgtcagttccaagcaattccacggcggggacgaccatggggacggcaagccgcgccggcggccctcgagcaactcgctgaagcgcctggttagttacagttccagcaagaggcatgaggagttggaggaggaggatgaggtgggggcggctgtggcggccacgtcctcgagcggcggacgccgcgctgggaatgacgccagcacggcgaggctgatccggaagccgccagcactggtggtcgaggctgtgccggcattgtcggaggaggctgccactttggcggttggtgtagttgatgcagaaagggcggttgctgcagcgactgggaatcggaagcggcctcctgcagatgtacatatcaatggcgcggcagagcaaggactgagtagcgttggtgttagaacggagggggaggccaaaccaaggatcagggacgtgcccaatggcgtccagggggagcatgtggtggcagggtggccgagatggctcacagaggtggcggcagaggcggttcgtgggtggcaacctcggagggctgagtctttcgagaagctggacaagataggacaaggtacatatagcagcgtttataaagcacgtgatcttgagaatggaaaaattgtcgctctgaagaaagttcggtttgccaatatggaccctgagagtgtccgatttatggcaagggaaatccacatcttaagaaggcttgatcatccaaatgttatcaaacttgaaggtttggtgacgtcacgcatgtcaagcagcttgtatcttgtatttgaatacatggagcacgaccttgcaggacttgcagctacacctggcttaaaattctcagaacctcaggtcaagtgttacatgcaacagctactttctggacttgatcattgtcacaaccgtggtgttttgcatcgggatataaagggtgcaaatctcctacttgacaacaatggcattcttaaaatagcagattttggtctagctacattctttaatcccaaacaaaaacaacatttgacaagtcgtgtagtaacattgtggtaccggcctcctgagcttttgttgggtgctactaactatggtgctgctgttgatctatggagtgccggttgcattcttgctgagttgctatcagggaagcctatcatgccaggacgaactgaggtggaacagttgcacaaaatttttaagctctgcggttcaccatcagaggagttttgggctaatttgaagttatcccgagctaccatattcaagcctcagcatccgtaccgccgatgtgtgaatgatgtatataaggactttcctactactgctttaacacttttggaccatctacttgccgtagaacctgggaataggggtaccgctgcatctgcccttgacagtgaattttttacaacaaagccatatgcctgcgatccatcaagtctacccaagtatcccccaagcaaggaatatgatgctaagcttcgagatgaagaagctaggaggcaaagagcagctgctaaaggacaggaagctgaagctggacggaggaagcaacctcctgcacctgatggtaatagtggattgcagcaccgccgagttcagatgaatcctaaaagcagcagttacaagttcactccaaaggaggatgctgtttctggatttccaattgatccgccagcaagagctgctgcagacaatggttaccctcagcgcgttcctctgatgcaagctggccgttcttcctccactctgggtagatcaagtgggatggatccaaaggcccaaagattccacacctcccaaattgtcactactgagatgtccggccaatctactgcatctgggcagcgaggcaatgctcctaagatgtctaacctcggggaaagtgccaggagacaatatcttcgagagcatcggtccagttcaagatacagtcaactcactgctgcggacccttctgacaggcctgaatggaaccatcaattccaagagcggccatcgtcttcccatcggaaggatgatgctgtggcaaacaaggagcatacggtggtgaacgggacaaagaagaacagaatccactattcggggccattgatgcctcctggagtgaacatggatgagattcttagagagcacgagcgacagatccaacaagcagtgcgaagagcgcgccttgacaagggaaagggaaagcacagcggtgagagagaccagtcggagtcactgctgtgtaccaccgggaatctcagggctgatcgctaagttcagtttgagcagtcatcagaagcaaagaaaacagcatcgaatcccttatattttttcggttcccccgccccaccccaacccccaagcggagaggtttttgttctgccagaaactcaaactcctgatgcggtttggtacccaggaggtgggcagctgccaaaagaaaacctgttcctgtagagatttaccgccccagagtctagcatatgcggtctgaaatattttttccctgaagatttgttggttatccatagtcctcaattgtatatctcaaaagtactcacccccaaaaatgaaaaattgatccat

SEQ ID NO: 25865 - DNA, 826 bp, Zea mays
  Clone ID: LIB3960-019-F10_FLI
cagaagcggcggcggcggagcaaacgcaggcgaaggcgagggtgtgagggaaggagcaccagccatggtgcacgtcaacttctaccgcaactatggtaagacgttcaagaaaccaaggcgtccttatgagaaggagcgtcttgatgctgaactgaagctggttggtgagtatgggctgaggtgcaagcgtgagctttggagggtccagtatgcactgagcaggatccgtaatgctgcaaggcacttgctcacccttgacgagaagaacccccgtcgtatctttgagggtgaggcacttcttcgccgcatgaaccgctatgggctgcttgctgagggtcagaacaagcttgattatgttcttgccctcaccgctgagaacttcctcgcaaggcggcttcaaacacttgtcttcaaggctggcatggccaagtccattcaccatgctcgtgtcttgatcaagcagcgtcacatcagggttggcaggcaaattgtcaacgtcccatcattcatggtgagggtggagtctgagaagcacattgacttttcactgtcaagcccattcggtggaggccccgcaggaagggtgaagagaaagaatcagaagaaggcaagcggtggcggggatgctggtgatgaggatgaggagtgaggatggacaagtagtgttacaccaatataataatattatctagttttcttgaacttgttcgaatgatgagtgcttagctgtgtgatctgacgcagagtcccctgtgctgactctgtgtcatggatggtccattttatcttgtggtattatcagcctttacataactgctatgtttgg

SEQ ID NO: 25866 - DNA, 2440 bp, Zea mays
  Clone ID: LIB3960-019-F5_FLI
ccacacagagctctgcacaagaaaaggggaggaaggacgagccggagccactcagccgccacctcaccccccccatcggccgcctgcgtcccaccacccgctcctgctgccgggcctgccgcccgttgctctcgccactgaagccctcgccgccgcctccgcctccgcccgcttgcttgccctcctgccggctgcctcccggatgagaagcggcgcaacctgggcagcggaagcgtggtcggcctgagccttcgccggggtttctgccgagaaggatcctggagattaagcgcatgggttccttggaggcccggtacaggccggccggggcagctgaggacacagctaagagaaggacccaaaaaagcaaaagtttcaaagaggttgaaaaatttgatgtttttgtgctggagaaaagttctggttgcaagttccgatcgatgcaacttttgctcttcgctatcatgtctgctgcatttctaacaatcctatacacaccatctgtgtatgaacatcagttgcagtcaagctctcggcttgtcaatgggtggatatgggataagaggagttctgatccccgatatgtatcttctgctagcattcaatgggaggatgtatataaaagtatccaaaatctgaatgttggtgaacagaagctcagtgttggactcctgaattttaacaggactgagttcgacgcttggacacacatgctcccagaaagtgatttttcaatcataaggctggagcatgccaatgaaagcattacctggcaaactctctatcctgaatggatagatgaggaggaagaaactgagataccatcttgtccttcgcttccagatccaagtgtcccaagagcaacgcattttgatgttattgctgttaagctcccctgttctcgtgtggctggttggtcaagagatgttgcaaggttacatttgcagttatcagcagcaaaattagcagcgaccacagcaagaggcaatagtggaatccatgtgctgtttgtgactgattgcttcccgattccgaacctcttctcttgcaaggacctagtgaagcgtgaaggcaatgcttggatgtacaaacctgacgtgaaggcgttgaaggagaagctcaggctgcctgttggttcctgtgagcttgctgttccactcaacgcaaaagcacgactctacacagtagacagacgcagagaagcatatgctacaatactgcattcagcaagtgaatatgtttgcggcgcgatcacggcagctcaaagcattcgtcaggcaggatcaacaagagacctagttattctcgtcgacgacaccataagtgaccaccaccgcaaggggctggaatctgcggggtggaaggtcaggataatacagaggatccggaaccccaaagccgagcgcgacgcctacaacgagtggaactacagcaaattccggctgtggcagctcacggattacgacaaggtcatcttcatcgacgcggatctcctcatcctgaggaacatcgatttcctgttcgcgctgccggagatcacggcgacggggaacaacgcgacgctcttcaactcgggagtgatggtcatcgagccttcgaactgcacgttccggctactgatggagcacatcgacgagataacgtcgtacaacggcggggaccaggggtacctgaacgagatattcacgtggtggcaccggatcccgaagcacatgaacttcctgaagcatttctgggagggcgacgaggaggaggtgaaggcgaagaagacccggctgttcggcgcgaacccgccggtcctctacgtgctccactacctggggaggaagccgtggctgtgcttccgggactacgactgcaactggaacgtggagatcctgcgggagttcgcgagcgacgtcgcgcacgcccgctggtggaaggtgcacaaccggatgcccaggaagctccagagctactgccttctgaggtcgagcctgaaggccgggctggagtgggagcggcggcaggccgagaaggcgaacttcacggacgggcattggaagcggaacgtaacggacccgaggctgaagacctgcttcgagaagttctgcttctgggagagcatgctgtggcactggggcgagaagagcaagagcaactcgacgacgacgcggaacagcgccgtgccggcaacgacaacgacaacgcctgctgctgcgagcctgtcgagctcgtgagacttgtagatagctctgtctgccgagagtagtataccagtaccagatacagaacttctgaagctccatacatacatagcgacagctctgtaaaggtagctatgtaggccttttccttccccgaatgactatataccttcgtcttcgttcgccgtcacagctgcaggcagctccctccctcccgctggtttccgatggttaacaattcttttgtttttgcc

SEQ ID NO: 25867 - DNA, 1328 bp, Zea mays
  Clone ID: LIB3960-019-G2_FLI
cttcagcgtgcacattccttccccacttctctctctctctcgtgacgacggcgacggcaacgactggggcgacagtcgctgccgccctacttgccggttgctcggatcttcttcggcccgttagccgtcgacgagcaccaccagggcaaccagatacttcagtggcttcgcaaggatgtcctggtgcactattgagtctgatcctggtgtgttcactgagctgattcagcaaatgcaagtgaaaggtgtacaggtggaagagctttactctctcgatgtgggctctcttagtcaactgcggccagtatatgggctaatttttctcttcaagtggatacccggggagaaggatgaacggcctgttgtcagagatcctaacccaaaccttttctttgcgcaccaagtcatcactaatgcatgtgctactcaagctattctctcagttctcatgaatcgccctgaaattgacattggcccagaattatctcaattgaaggaattcacaggagcttttacaccagatctgaagggcttggctattagcaacagcgaatctatccggacagctcataacagctttgcaaggccagagccatttatttctgatgagcagagggccgcaactaaggatgatgatgtttaccatttcataagctatttaccttttgaaggtgtcctgtatgagctggatggactgaaggaagggcctgtgaatcttgggcagtgcgatggtgctgatgatcttgattggctacggatggtgcagccagttattcaagaaaggattgagcgctactcacaaagcgagatcaggttcaatctcatggccatcataaagaacaggaaagaggtgtacagtgctgagcttgaggaactggagaagagaagggagcagattttgcaggagatgaataatgcttcctccacagaatccttgagcagttcgcttacggaggtgatatcggcaatcgaaactgtcacggagaaggtcatcatggaagaagagaagttcaagaagtggaagaaggagaacattcggaggaaacataactacatccctttcttgttcaacttgctgaagatgcttgcagagaagcagcagctaaaacctctggtcgagaaggccaaacagcaaaagtcagcaagcccgagcacgagttgatggtgaaatgtcaatagactggtagcttttgccgatgtcttctgagcgtcgtgttatcttatcagatacattgccaagtcggcagctcagataaattatgaccgatgttatttataccatgttgcacgccgtgatgtatcagcagctatgccatttttttttttgc

SEQ ID NO: 25868 - DNA, 2137 bp, Zea mays
  Clone ID: LIB3960-020-C4_FLI
caaatgatgaagctgcaatgattggtgatgcaattgcggcacaaactacatatgatcgggagaatccaaaaatagtagtgggatcgacatttgttgataaggatgcctttatgctacttatcaaacaatatgctataataaatgaattcgaaacatttgtggtgcacagtgatagaagtcgatatagggcaaaatgtgcagatacatcgtgtgattggaaaattcatgccaagaaacttcttggttgtcctacgttcatggttaagtctatttcggagcaccacacatgtgccagcacaagcaaggtgttagggaaagaggctacaaaaggttggatagccaataaggcatctgagatattgaagtccaaccctaccattggagcaaagaagctgcaggttcagcttgagcaacaatatccgatcaacatgtcttacagcaaggtatgggaaggaatgcaatgtgcaaagaaagaactccatggcacttgggacaacagttttaaaatgttgtggagttttaaagctcaactagaagaaacatgcccaggaagcatagttgagattgattgcaagaagataaaaggacgtatgcatttcaataggatgtttgtggcaattagagcatgtgtgaatggctttcttgtgggttgtaggccttatcttggtgttgactctactcacctcacaggtaagtacagtggacagctagcagcagcaactgcaattgatgggcataattggatgtatcccgtagcttatgggatttttgacaaggagaacgactctaattggatttggtttatgatgcaattgaagatagctattggtacaccacatggattgacaatccacaccgatgcttgcaaaggtttggcaaatgcagtcctcagggtcttccaaggtgcagctgagcatagagagtgttttagacacctcatgaagaatttcagaaaaaagtaccagggtgatgtgttaaagtacatgtggccttgtgcttgggcatgcacacctcgtaggcaccaggtcttatgggaaaaaattagagaaagtagtcctgaagctattgtgtacttagaaacgaaccataaacagatatggtcatgagctaagttcagtgcagattgcatggttgattatgtgaataacaacatatcggagtgctttaacaactggattaaggactacaaaagctttctggtggatattctcatggatgctataaggggcaagatcatggaaaagatagcaacaaggcaaaaggtagctgcaaggctaaccggacgagtacttcctagtgttatcaatgagctgaacattaagagcagatccttgaaatatacaatcacaggaagtggtggtcttaaggccgaagtatctggattaactagggacaacacaccttggagacatggagtggatcttgacaagaaaacatgctcatgtggccaatggaagatttcaggcaagccttgcacccatgttatagctttcataacttcacgaagacaagttagaattgaagactatgtccatgagtactactcagttgaacgtttcaaagctacttattagtttgatattaacccgatggttgataaggctcagtggcccgtggttgatcctgggtttgtgatggttcctccgaagttagagaggcctgcgggtaggccgagagtacgtcgaatcagaagtagtggtgaggctgggaaaagaggcccttaccaatgcaagagatgctttcagtttggtcatattgaaaagacttgtcgtgagccccctgctgaattgggggatgagctcccatcaccgcctaaaacacaaaagagaaacggtgatgctgtcccgcacacaccaaaaaggtccaacacggcaaaaacaactgcatcaactcctccttcgacaggtccaataacaagaagcatggcagcttcaccttctacttctacaggtgaaggtcctgtcactagaggaatgacaaacatatcacctgggggcattgcaagaagagttatcattagttagtagctgtaatggagatggctgacttgatgttatgctgaaatggagaaggctgacttgatgctaaaaacctactcttatgtttagtgctaaaaaccttctgttgtgttcatgac

SEQ ID NO: 25869 - DNA, 1130 bp, Zea mays
  Clone ID: LIB3960-020-D3_FLI
caactcccaaatcctccctgaaaataagaatacgagggtgagcgatcgagcggtcgagggggttgtgcttgtgcgtcagatcaaccgactggtggcgaggctgcgggaggagatggccggcgaagggaatggggatgaagggtggaggcggagcggcatcgaggtcagcgccctgcagttcggctacgacgggcagccgccgctcttcgcgcgcttcaacctctgcgtcgcacccggctcccgctgcctcctcgtcggcgccaacggatcaggcaagaccacactcttgaagattcttgcgggaaagcatatggttggaggaagagatgtggtccgtgtcctcaatggttccgcttttcatgatacacagctagtgtgcaatggtgacctttcgtacttgggtggttcttggagccgtactattggttcagctggggatgttccactgcaaggcgacttctctgctgagcacatgatttttggaggcgagagaagctggttgatctgctagacattgatctgcagtggcgcatgcataaagtttcagatgggcagcgccgcagggtgcaaatctgcatgggtcttcttcatccatacaaggtgcttttgctcgatgagatcacggttgatctggacgtggtgaccaggatggacctgcttggtttcttcaaggaagagtgcgagcagagggaagctaccatcgtgtacgccacccatatatttgacggactcgagacgtgggctaccgactttgcgtacatccaagaaggcgagctgagaaggtccgggagatactccgacatcgaggagctaaggagcgccaagaacttgctgtcggtagtcgagtcgtggctgaggtcagagaccaaactcccgaagaaggaacccccaccacgtcctgagacccaggccaggcgttcctcgccgttcgatgcttctcctttccgttcgtcacgccacatggcctactaccgttgatggtttcccaactcgtactacaccattgcctcttgttattttgttgtcactcatatcgtatagtagctgtggagtttaatatgtgtcctcttcacggcccttgtagacatcaatcaatatatagcaggcagcacagaaataaaagtttggtt

SEQ ID NO: 25870 - DNA, 948 bp, Zea mays
  Clone ID: LIB3960-020-D9_FLI
cacggtggttgttgcgctgattcgttgtcttgtgagctgttctagggttccgagggaggaggatcagctgccgcgatgttcctcaggatctctcgtctcggggcgcggcttctgcgcgagtctggagcggagacgagagctggaaatttgctaagcagtccaggcattttgtatcaagctcatcttaaccagcattcgaccagagtgcggaatgtccttttctcaactgcaacaagtggtgatcaggatgaaagcagtcaggcaaaggataaaatctcggtaacatttgttaacaaggatggctcagaaaagacaatacgtgttccagttggaatgtccatgttagaagctgctcatgaaaatgacatagagcttgaaggagcatgtgagggttcacttgcgtgttctacttgtcatgtaatagtaatggatgtaaactactataacaaattagaagatccagcagatgaagaaaatgatatgcttgaccttgcatttgggctcacagagacatctcgcctcggctgccaagtgatcgcgaagcctgaactcgatggtattcggctggcattacctgtagccacaagaaacttcgcggtagatggctatgtaccgaaaccacactgaagacagttatgtacaccacactgaagacagttatgtacaccacactgaggcagtcatcttggggggcacggattcgtacaagtcaattttgtagtttataacctgtataacctaactacacctttgctacttgtagtcggggtagcttaggactaccttgttgagggagggttcgttcattgatgaacccctccattactcccagataacagtgcttccttcatctgggcgaataaacatctttcgttttgtgcgagagtatgtagtgtactcagaaatatttgcattgtagtgctcccaatatttgatcttttgctacct

SEQ ID NO: 25871 - DNA, 1151 bp, Zea mays
  Clone ID: LIB3960-020-F8_FLI
aaatctttttctcgcctctcctcgctcctcgccatttctctctcttcccctccgcttcgcccaccgcccgctccgaaatctgcgcgccgacgccgccggctgcccgtggagagcctcgaattagagcgcgttccgtcgagaggttttcaagcaactatgtttgagtttggttgatatgatactcattcacgttggggatgcagaccccccctctgtgggggttgattgaagaagttaactgtacacttaggagaacttgtgtcctactgaaagtttcttggtttcgaggcaagtatgtcagattcaaatgtgaatgtcttactaagagtagggctttggtggcatagatggatgaactgattgtcaacttcaacaagttgttgattacaggctcttgagctaccaagcatgtcagattcaaatgtgaagtggattgatgggctccagttcacatcattgtactggcctccacccctcgatgcggagcagaagcaggcacaaattttggcatatgtcgagtactttggccagtttacagctgacaccgatcaattccctgaagacatagctcagctcattcaaagttcctatccatcaaaagaaaatcgcttggtagatgaagtattggcaacttttgttcttcatcatccggagcatggtcatgcagttgcacatccaattctttcacgcatcatagatgggacgctgtgctatgatagacatggtcccccattcagttccttcatctctttattcagccataattctgagcaagagtactcagagcagtgggccttggcctgtggagaaattcttagggtcttaactcactacaataggccaatattcaaagttgagcgccaacatactgaagctgaatgtagcagcacatctgatcaggcaacatctagtgattccacagataagagatctaataattctccaggaaatgaatctgactggaagccattgaggccactaaccccgtggatcactgacatattgctagccgcacctttgggcattcgaagtgactattttcgatggtgtggcggtgtaatgggaaaatatgctgctggtggagagttgaagcctccaactactgcttgcagccgaggatctgggaagcacccacagctattttgagaagt

SEQ ID NO: 25872 - DNA, 1143 bp, Zea mays
  Clone ID: LIB3960-020-G11_FLI
gagaggggcagggagatggagagagcggcccccgtgaggagctcccacacctcgacggctggcctgctcgcgtggcctcaccccgatggcgccgggtcgctgccagcacgccggcctaaccagccgacggaggaattcaggaatgtggtgtttggggggcagctcacggagggggccgacggcctcaacaagacgaagaggaagacgggctcctcgcccaaggggaaggagacaacagggaccggcatatccaaggccgagagcgccgccgccgccgtcgcaactgcctcccgtgatcgtcaggctagccagatcaccttttcccaggacgggaccgttcctaccaggaaggcaacttcagtggctggggtggcaaggcagcgtgagcttagccataccgtcgagagtgagggggacagtaagatgaagaggcaggtgtccagtacgaaatccaaggagctcagtggtcacgacatctttgccgatcacgaagatcccaagcccaacaggtcaaggagatcagactatggcagctctgctgctcagtcaccagtgaaaaatgcaaatgtgagctccttctcgtttggagaggccgacattgacagcacagtgaaaacagcaaagaagaaagggtccagcaacttgtctactgatctgaacggcaagaccatgcccaagaaggattcagcgtctgcagagaaacagcctccgaaccgtgcgaggccgaaaggaatgagtggcagcagcaattttgcagacgggaaggcctcaacctcaacaaccggagatcatgaaggccgtcgtacccggcagcctcctggcggcgacagcagcattttgctgggctagcgtgcatatgaatcttgccctatgccgccgccgcacgggtggttggtccgtcagtctgtggtcttgttttcgtggtcaggccatgtgtcccatctccggtccttcagatgatctggttcgcatctgtcttgtgtatggttttgatatgtgttggttgtgacatgccccatggaacaaccctatcgctatgctgttttgttgtgtacaatggatgacgtgtgctgccgttttgttgtgtgtacaatggatatgtctggttgttgaataagaagaaattggtatatggtaccaaac

SEQ ID NO: 25873 - DNA, 1501 bp, Zea mays
  Clone ID: LIB3960-020-H4_FLI
gcgacggaggacttctccggcgtgccctacaacatgacgctgctcaactgcctcctatcggcttggtacggcctgccgttcgtgtccccgaacaacatcctggtgtcgacgatcaacgggacggggtcggtgatcgaggccatctacgtggtgatcttcctcatcttcgcggtggaccggcgggccaggctcagcatgctgggcctcctgggcatcgtcgcctccatcttcaccaccgtggtgctcgtctcgctgctggccctccacggcaacgcccgcaaggtcttctgcggcctcgccgccaccatcttctccatctgcatgtacgcctcgccgctctccatcatgaggctggtgatcaagacgaagagcgtggagttcatgccgttcctgctctccctggccgtgttcctgtgcggcacctcctggttcatctacggcctcctcggccgcgaccccttcattattgtacgcacacggttctctctctagtctagatcctgagccgcactcaccgcccggccgtacgcacgtgctatccgcgcatgttgtccgattggcactcggaaaccactgtagcagcactgtatcactagctgttgggactggacgtaactgcatctgatctggccagcacagtacccccgggctgggcgtcggttgccctttcgatgtcccgcccaagcccaaccaggcgcacatgcctgccgctgccgcagccgatgcacgggcatgggcgccggtagcgtctagcagcgtgggcgtggccacccacaggcagcgcacgccggtgctagctgccgatgggccgccgtgcccatgtccatgcagctggattggacccggcacaggcagaagcaacagcgcccgcgctctttcttgtcgcaatgctagttagcaaactgcacggtgcactccacttcagtacacaccaacgcgacagactgcgatgaaatatctaaggccgagtttttttttttttgcaaatctcatcatgtcggaatgattcatgcggtccaaacttcagcacacccccactgtcgctaaacccgcgctgtctgtgcatgcgtgcagatcccgaacgggtgcgggagcttcctgggcctgatgcagctcatcctgtacgccatctaccggaaaaacaagggccccgccgcgccggccggcaagggagaggccgccgccgccgccgcggaggtggaggacaccaagaaggtggccgctgccgtggagctggccgatgccacgaccaacaaggcagcggacgccgtcggcggcgacggcaaggtcgccagccaggtgtaggcgggcaaggcttatttgctgtctgggactgggaggaacatcctaaacgaggctgccttagtttgtcggtggagcagattggtgttggtttctgtgggcttttacggttgttgttactctcatctccatctctcccaggaggctaccccaagcatgtagtagcttccattctgattctgggacggtgttgcacgtt

SEQ ID NO: 25874 - DNA, 1507 bp, Zea mays
  Clone ID: LIB3960-021-C1_FLI
cctctccaaatctccaaccctacttgttccagaaaagaaaaagaactatccatcccgctgtgagccaagccagcccagctccggcgactggcagatgtttcagggtccccgtccgtttgccgcaggttccctgatatcggtggccagcagccgactttgtggttagtccattctcttccggcgggatacgttgcggaccacttcgctcagctgctcgcgacggcggcttgtaccctgatttgggtgtggttcttgtagagcggtcgtgtcgtccgagcgttgatctgaaccagcgcagtttatcagggacgtagcactgtagcagtgagttggggaggatgcctgatatccagctgggatgccacactataaggtcccatggtaccaaagtggcaacattacacatgtatgactggattatacttttatgtcttgctgtacttgatggactgttaaacataatcgagccctttcaccgctttgttggacgcgacatgatgaccgacttgagttatcccctcaagggcaacacaatcccattttgggctgttccactgattgcgatcgtgctacccttggttatctttgctgtcatttacttcaaaaagaaaaatgtctatgatttacaccacggcatactaggtatcttgtattcagtgcttataactgctgtgatcactgatgcaattaaggatggtgttggtcgccctcggccagatttcttttggcgttgttttcctgatggcaaacctaattttaataatataaccaccgatgtgatatgccatggagaaaagagtgtcatcaaggaaggtcataagagtttcccaagtgggcattcttcatggtctttcgctggtctaggttttcttgcatggtacttggctggaaaacttaaagcttttgatcgcaagggtcacattgcaaaactgtgcttagtttttctgcctctacttgtcgcgtcacttgtggctgtttctcgagttgatgattactggcatcactggcaagatgtctttgccggcggcatcataggtcttacagttgcttcattctgttacctgcagttcttcccatatccctttgacaatgatgccctatggccacacgcatacttccaacagctagctgagacacacagtaatggtaatgcaaactcaatcaacataagacctacagagtttgaagatgaaccagatgaccatggtgacattgtcctgagggacaccagccctatcttggagtcaatggagtctggcaggagaccatgaagaagcatgccactgggtttgtccaaggtgccctgaagcgtgatgagttttgtggtttcatcatgtagccgtccaacgtaaaaacagtatggaggtatatctaccaccacctgatgatttgatgaaccacagactgtcgtggttagctgtaaatgacagcgaatgtttatgtttctagtgacaatgtgaatatttggttttgcacggctgtgatatggaaagtttgtttcgaggtt

SEQ ID NO: 25875 - DNA, 1484 bp, Zea mays
  Clone ID: LIB3960-021-C12_FLI
ggcggacaggccacccccgcacctcattccacaattatttgcgcccgtcccatggtttatattcattattattattaaaatcacgctttctgtagttggatttcgttttctcctttttttaattattttgtaattacagtaatctctcgtgactggtgtaacagtcagtcggctttaaaaggacacgagcgcttaaacccccaccccatatccgcatccgctgcctccgcctctcgagtctcgtccacccgtcatcctcctagctcctctactcgccagtcgccatgggcaagattaagatcggaatcaacggcttcggaaggatcggcaggctcgtggccagggtcgccctccagagcgaggatgtcgagctcgtcgccgtcaacgaccccttcatcaccacggactacatgacctacatgttcaagtacgacaccgtccacggccactggaagcacagcgacatcacactcaaggactccaagacccttctcttcggtgacaagccggtcaccgtctttggcatcaggaaccctgaggaaatcccgtggggtgaggctggcgctgagtatgtcgtggagtccaccggcgtcttcactgacaaggacaaggctgctgcacatctcaagggtggtgccaagaaggttgttatctctgccccaagcaaagacgcacccatgtttgttgttggtgtcaatgaggacaagtacacctcggatgttaacattgtttccaatgctagctgcaccacaaactgccttgctccccttgctaaggtcattcatgacaacttcggcattgttgagggtttgatgacaactgttcatgccatcactgccacccagaaaactgttgacggaccctcagccaaggactggagaggtggcagggctgccagctttaacatcattcctagcagcaccggtgctgccaaggctgttggtaaagttcttcctgatctgaatggcaagctcactggtatgtccttccgtgttcctactgtggatgtctcggttgttgacctcaccgtcagaatcgagaagggggcctcctatgaggatatcaagaaagctattaaggctgcttccgagggtccactcaagggtatcatgggttatgcggaggaggatctggtttctaccgacttccttggtgacagcaggtcgagcatcttcgacgccaaggccgggatcgctctgaacgaccacttcgtcaagctcgtctcgtggtacgacaacgagtggggctacagcaaccgcgtcgtcgacctgatccgccacatgttcaagacccagtagaggggttttttccccctgcttctcatggatggttgctgcttgtgtatgccgagaataaatgtggatggcgcgtgcctctgggtcgccaggttcatgctgagtctggacatgttttgcacttttgcttcccttcctgctaccatctgtgacagaaccgctcgctaatatgggacctgagattagctt

SEQ ID NO: 25876 - DNA, 2106 bp, Zea mays
  Clone ID: LIB3960-021-C2_FLI
gtgccgcttcgagcaaggtgcgggagggaccgagggaggcggagcaagtgggagctctggagctggagcgggtggaagtgggctgggactgggagtcctagcaaagggccatcgcatcccctcttgcatactctctctcgtgattctcccgtgccccggtctctgtctctagtggcgacgactgcgctgcgccgccgccctacccaggtgcccaagtgtctatcttcgggactgcgccggcgacgagcacccaccagagattgttggacctgggtctgcccctggattcgagcttggggccaagctaattcgagctctgagcatttgatttctagcatcttacatgcaaaaggctagtacttggaatccgagcaagatctaacccagacagtgcagtggcaggtcttttcagttcagcgcagcatatcaagattgtctctgttaatttgtgtatgagatcagttaactgataaggatatgtaaagaaccaatgatcagtaatttttacactccagattgtagtatcctctaagatggacggaagagaatcagtcttatggtaaatcctggtgaatattcatgggaggtcagcaagttctggcctgactaagtctggtaaaaaaagttgcttcatctcagatcatcaatggtgagaatgaggttcccgaaacgttatctcatagtattgctgacattcatctgcacaaatgtttgctacattgagcgtgtgggtttctcgattgcttacactgttgcagctgatgccattggtgtgaatcaggccaacaagggcatgatactctctatgttctattatggttatgttttatcacagattcctggtggatgggcagcacagagaataggaggcagacgtgttctgctactgtcgtttgtattgtggtctatgatatgtggtttaatcccactcgaccccaacagagtaaccattctggtcctttctcgcctatttgtcggtgtagcacaaggttttatattccctgccattcacactgttctggcgcagtgggtgccaccgcaggagcgctctcgctcggtatctctcactacctcggggatgtatcttggtgcagctggtggcatgcttttcttcccaagtctggtgaagcacacgggaccccagtcagttttctttgtcgaagcagtgctgggagtagcatggtctgtcatatggttgaaattttccagcgacccacctcgtaccgatcttccaaaggtatcgatgccgaaagtggcatctcgggacatgattaaggcacaagcaggaggggttgttgcacctcgcacagtaaagatcccgtggcgaaggataatattcagtctacctgtttgggcaatcgttgtaaacaacttcaccttccactatgccctgtatgttcttatgaactggctccctacctattttgagcttggcctcaagcttagcctccaggacatgggttcctcaaagatgctcccttatttcaacatgttcattttctccaacatcggtggtgtgatcgccgatcacttgattacaaggaggattctgtctgttaccaagacgaggaagcttctgaacaccatcggattcatcatctcagcatttgcactcatggcccttcctttattcagcacaccctcaggcactgtaacgtgttcggcgatatccctcggttttcttgccctgggaagagcagggtttgccgtaaaccacatggatgttgctccgaagtttgcagggatagtgatgggcgtctctaacacggcggggacactggctgggattgttggtgtcggcctcactggtaatatcctggaggcggcgaaggcttctaacaaggatctaacggactcggaaacctggaaaacagtcttctttgttccggcatacctttgtatcttcagctctgtcatttttttaatcttttcgactggcgaaaagatattcgagtagaggatgattatatttttttgtttctcatttacagtgaggcaggatagcagaacgggaatctcacatgtacccgtagcatttttacaaaatttcatactgtatcatacacatgatctaaagctatgtcaggaaatctcacatttttcatt

SEQ ID NO: 25877 - DNA, 1343 bp, Zea mays
  Clone ID: LIB3960-021-D12_FLI
ctccctcactcccgttccatttccccatctcccagatccaattcgcgagttctccctcctctgccgccatggcgctctctgtggagaagacctcgtctggacgggagtacaaggtcaaggatctctcgcaggcggacttcggccgcctcgagattgagctggccgaggtcgaaatgcccggcctcatggcgtgccgcgccgagttcggcccgtccaagcccttcgccggcgctaggatctcggggtctctccacatgaccatccagaccgccgtcctcatcgagaaccctacctcacgtcccggatcccatccggcggccaaggggagttacacgctagccggcggtcggccagccgccgccaaccgcctcagccccaacagtcgcaccgccgccgccgaggcaaactcgaagccacccccgccgccgcagccacagccgcgccgagcttgagccgtcgttgctccgctgaatcgcccccatcgtctctcctgaagagagaggacatttattgagacagcatgcctaagataaagacaagtcgtgtcaagtatcctgaaggatgggagcttattgaaccaaccatccgtgagttggatgccaaaatgagagaagctgaaaatgatccacatgatggaaagagaaagtgcgaagctctctggcctatttttcgtatttctcatcaaaggagccgctacatatatgatctttactacagaaggaaggagatatcacgggagctttatgagttttgcctggaccagagctatgcagatcgtaacctgatcgcaaagtggaaaaagccaggatacgagcgcctttgctgccttcggtgcatacagacacgtgaccacaactttgcaacgacttgtgtctgccgagtccccaagcatctgagggaggagcaagtgatagaatgtgtccattgcggctgcaggggttgtgccagcggtgactaatcttgtcatcatgttgttgggctcacgactcatcaccatcctaaccacattagggcttgttcggttattcccaatacacatggattggatgggattggaaaaaattatgaagaagtttgacttgtttgggatttaaactcatccaatcctgctcaatccacatggattgagagctaaccgaacaagcccttagatgtctcgtgagcatggatcggctatggtgattagcatgaatgtgttgtggtaactagttggaagactaaatttcctgacgtttggatgtttgcaactgctatgtactataaagactcctcgtgccacagatgtttttgttaaattagtagcgcttttgcatcttgtatgattctgtaaattgtcttttatc

SEQ ID NO: 25878 - DNA, 1581 bp, Zea mays
  Clone ID: LIB3960-021-E12_FLI
ctggcacagaggaaaattggctacggtacaaaacaccgaggcatcgatggactcttccaccagctgacagctatgatttcccctgctcacctcgccttcgccgccgccttcctcctcgtcgtccggtcgtcggcgcctggcgctgctgccgcccgcccgatcttcgatggcaagccatccccctccgaggccaccgccactgcgaggtggctcgccgcccagaacacgtggggtgtcctcagcacaatatcaagtgacttaagtggagctccatttggcaatgtagtttcatatagtgatggagtaccaggcgagggccgtggaataccctacttttatctgacaactctggatcccagtgcaagagatgcactggaagatgaaaggacctcttttacccttagtgagttccctctgggaacttgtggggaaatagatcctgaaaaccccacttgtgcaaaacttactcttaatggaaaggtactaaaaattacatccatgataagatgatcgatcactcgccgtttgtatgcatttagcctatttgtttagttgtgtttgaactgacaatgatctatttgggcctgaactggttttctacctataaatttcacagctgatgtttctgtagaatgaatacacgctgatgggcttgaactgtcactatttgggccatgggctgtatacttatagctgcatgtgtgttttcatttcatgttagtaatgctaatgccttatgtatttctcataattaaacttttcgactggatcatgaagttttcaataaaaagaagggacaactcggtggtatcaatttctacaatcatgaaaaaccacatggaagtagcaaattcttataaattataattgtcacgacaactcggtggtatcaatttctacaatcatgaaaacatgtatttgaggctgtctcctcttaatttatctcttatggtaaaataatagaaagttaaagagtatatttttttatcacatgttagatttaacgcagtacgattcatcagagaagaaaatccttccctttactcctctcccacaatagacataagttgaatactataacatatggtttacaaactattatatattgtggatgccacattgctgtactcgtttttttccatacgataggcatttgctatttttgcagttgaagatggttgaccttcagtcatctgaagcagatttggccaagtcagcactttttaccaaacatcctgaaatgaaggattggccaaagaatcatcatttcaaaatcttcaaaatggaaatcgaaaacatattcttgattgattggtttgggggtcctaaacccatatccccctcccagtaccttgaatttggaagaaatcagggctcattgatgtactcataagcgaagaatgcttcatcgatcaatatcccgtctgtgtatgctcttctcaaaaatgaaatccatattgcacatattgtaaagacatctctgtgcacggaataaacctgtagtgttattaaaatgaaatccatatggcacatattgtaaagacatctctttgcatagaataaagttttagtgttattatt

SEQ ID NO: 25879 - DNA, 1863 bp, Zea mays
  Clone ID: LIB3960-021-F9_FLI
cactccgccgcacaggcgctcagctccgcaacgccgccggaaatggtcgccgccaccgccaccgccaccgccatggccaccgctgcatcgccgctactcaacgggacccgaatacctgcgcggctccgccatcgaggactcagcgtgcgctgcgctgctgtggcgggcggcgcggccgaggcaccggcttccaccggcgcgcggctgtccgcggactgcgtcgtggtgggcggaggcatcagtggcctctgcaccgcgcaggcgctggccacgcggcacggcgtcggggacgtgcttgtcacggaggcccgcgcccgccccggcggcaacattaccaccgtcgagcgccccgaggaagggtacctctgggaggagggtcccaacagcttccagccctccgaccccgttctcaccatggccgtggacagcggactgaaggatgacttggtttttggggacccaaacgcgccgcgtttcgtgctgtgggaggggaagctgaggcccgtgccatccaagcccgccgacctcccgttcttcgatctcatgagcatcccagggaagctcagggccggtctaggcgcgcttggcatccgcccgcctcctccaggccgcgaagagtcagtggaggagttcgtgcgccgcaacctcggtgctgaggtctttgagcgcctcattgagcctttctgctcaggtgtctatgctggtgatccttctaagctcagcatgaaggctgcatttgggaaggtttggcggttggaagaaactggaggtagtattattggtggaaccatcaagacaattcaggagaggagcaagaatccaaaaccaccgagggatgcccgccttccgaagccaaaagggcagacagttgcatctttcaggaagggtcttgccatgcttccaaatgccattacatccagcttgggtagtaaagtcaaactatcatggaaactcacgagcattacaaaatcagatgacaagggatatgttttggagtatgaaacgccagaaggggttgtttcggtgcaggctaaaagtgttatcatgactattccatcatatgttgctagcaacattttgcgtccactttcaagcgatgctgcagatgctctatcaagattctattatccaccggttgctgctgtaactgtttcgtatccaaaggaagcaattagaaaagaatgcttaattgatggggaactccagggctttggccagttgcatccacgtagtcaaggagttgagacattaggaacaatatacagttcctcactctttccaaatcgtgctcctgacggtagggtgttacttctaaactacataggaggtgctacaaacacaggaattgtttccaagactgaaagtgagctggtcgaagcagttgaccgtgacctccgaaaaatgcttataaattctacagcagtggaccctttagtccttggtgttcgagtttggccacaagccatacctcagttcctggtaggacatcttgatcttctggaagccgcaaaagctgccctggaccgaggtggctacgatgggctgttcctaggagggaactatgttgcaggagttgccctgggcagatgcgttgagggcgcgtatgaaagtgcctcgcaaatatctgacttcttgaccaagtatgcctacaagtgatgaaagaagtggagcgctacttgttaatcgtttatgttgcatagatgaggtgcctccggggaaaaaaagcttgaatagtattttttattcttattttgtaaattgcatttctgttcttttttctatcagtaattagttatattttagttctgtaggagattgttctgttcactgcccttcaaaagaaattttatttttcattctttt

SEQ ID NO: 25880 - DNA, 2159 bp, Zea mays
  Clone ID: LIB3960-022-A8_FLI
cgacgcgacgcgggtcgtctcctcagccctcctgttcagcctcctcgccagcgatggcttcgggcgccgacgccgcggcgctggtgacctccggcgccgacgagtgggcagcggcgtgtccgccgctgcggcggaacctgcagctgctcgcgcctgacgaggttgagctagcaaaaatgctgttgaatgagggccagattcacctatttgaacactggcctgaaccaggcattgatgacgacaagaaaagaggcttctttgatcaggttcgccggcttaattcaagctatcctggaggtctggtatcttacatcaagaatgccaaaaaacttcttgcagattcaaaggcaggaaaaaacccatatgatggtttcaccccttctgtgccttcaggggaaattttgaacttcggcgatgacaattttgtttcactggaagcagctgggataaaagaagcccacaatgctgcatttgttcttgtagctggagggcttggtgaaaggcttggttacaaaggaattaaggtagcacttccccgggaaacaacaactggaaaatgtttcattcaacattatatagagtctatcctggttttacaagaggccagctgcaaaacggttgatgatgggtgccaaaaaaaagattccatttgtcattatgacttctgatgatacaaatgcactaactatcaagcttttggagtcaaactcttactttggaatggaaccatctcaagtgaaattgctaaagcaggaaaaagtagcttgtctagctgacaatgatgcaaggcttgcattagacccaagtgacaagtacaaaattcagacaaagccacatgggcatggagatgttcattctcttctttattcaagtggcttgcttgagcaatggaagagtgaagggcggaagtgggttctctttttccaggatacaaatggattgcttttcaatgcaattccgtctgctttaggtgtcagtgccaccaagggttacaatgtaaattctctcgcagttcctaggaaggctaaggaagcaattggaggaattaccaaacttactcatgttgatggtagaacaatggtcatcaatgtagagtacaatcagcttgatccactccttcgtgcaactggttatcctgatggagatacaaattctgagacaggctattctccataccctggaaatataaaccagttgatactggagcttggaccatacattgaggagctaaagaaaacgcatggtgccatttctgaatttgtaaatcccaagtatactgattcgaccaagacatcatttaaatcatccactcgtctagagtgcatgatgcaagactatccaaagacgttgccaccctcaacaaaagttggattcacggtgatggatacatggcttgcttatgctcctgtgaagaataatcctgaagacgcggctaaagttccaaaaggcaatccttatcatagtgcaacctcaggagagatggcaatttacagggcaaacagccttattttgagaaaggctggtgcgcagatagctgaccctgtcgttgataccttcaacgggcaagaggtagaggtctggccacgcgtaacctggagtccacggtggggtctcaccttccagagcgtcaaggagaaagtgcatggcagctgttcagtttctcagaggtcagctttggtcatcgatggccggagtgtcttcctcgacggactttcattggacggcacccttattgtcaatgctgtggatggtgcagaggttaaagttactggtcatgtagaaaataagggctggactatccggcatgtggactacaaggacacctcggagaaggaagaggtcaggatccgtgggttcaagttcaacaagtctgagcagctagaggtgaactacaccgagccaggaaagcatagcttgagtgcgtgaaaagaaacattcttgacctgactagcttcgtaccaaaatggaaatagctcacatctgggtcgcctcccagattctgggagggaggccaatgccagcgtagctgaaaccgttcttctccttcccccacgtacaacaaggagcaaagtgcttcaccaagcactcaacattctttatgtatatcttgtacagaactcctcttcagtgcaatcagagttcattgtttgtttgggatc

SEQ ID NO: 25881 - DNA, 926 bp, Zea mays
  Clone ID: LIB3960-022-B11_FLI
gccgcgccctcctcctcctgtcctgctccaccgctcattggcaccagcgcagcagcgcatctctcgctcgtcgttggtccttgtcaacgatctcgccgcttccatggccgccaaacctgcagagacgacagggacagggagcaacaaagctgagtcctccttctcctcctccatggcggtggcggccgacgtttacaaaggcgagctgacgccgctgcagcggcacgtcgccttcttcgaccggaacaaggacggcgtcatctaccccgccgagacataccaagggttccgcgcgatcggggccggcgtcacgttgtctgccttcagctccgtcttcatcaacggcctccttggacccaagaccataccggagaacgagaaggctccagctttcaagctccccatctacgtgaagaacatccaaaaaggaaagcacggaagtgattcgggcgtgtacgatgccaatggaaggttcgttgctgaaaaatttgaggagatcttcaagaagcatgcccacactaggccagacgccctgacaggcaaagagctgaaggagctgctcaaagcaaacagggagcctaatgacttcaaaggatgtatgtttgggaaaatttactgcaggctgggtggtttcacagagtggaagatgctttactccctctgcaaagatgaaaaagggtttcttcacaaggacactgtcagggctgtctacgatggcagcctgtttgaaatgttggaacgcgagaggaacgctaaggagtctactaagacgaaatgagaagagcatcgtcttgcacccgttcgtgtggtcggtagtagaatttgtaaattgcggtgtgctgtgtgcatgtggaccagaaaaatagtacactagtttgattatgtacgtcattagatgcatatatgtttatttatatttatggagc

SEQ ID NO: 25882 - DNA, 1304 bp, Zea mays
  Clone ID: LIB3960-022-C10_FLI
agaggggaaaggcgagtcgtcgactcgtcgtccgggcagcttccctccctctcctctccgcccccgcttacctaggccggccccgcctacgcccccctcccgccgccgcacgatgagcacttctcccgccgccgccgacgtttcgcctttgccgcctactgctgccgccgacgaggccgcgcgggcgacagagacggtggtggtcgatgagagggtcgcctcacacgtggacccgttcctcgtcgaggcgctcgacaaccctcgccaccgtctcatggttctacggatggaactggatatacaaaactttatgcagaaccctcagctgcaggagtttgaattccagaactttccgacttcttacctccgctgtgctgctcatcgtgttgcacaacattatggcttagagactatagtagcagatagtttagtagaaggctcagttagcaggattgttgcaagaaaaacagcagaaagcaggtatcctgcaatttttttatcagaagttcctagcaatcaagcaagaaatgatcatgaaacagctgagaagcttaagtttgtcatttatcaaaggcccaaagcattccaaaatggaagcgctgattctagaaacaagagtggtgtaccaaaaactgttgatgagagaatagaggaatataataaagcacgagcacgcatcttcaatggttccatttctgcagattctgatgctgcaagtattatgggaactctttctactggcaaagatgaaccagtaaatgttgacccttctgttgatgaaaccaaagtcagcacaatgaacagtcgttccagagttgctgtttttaaggatactgaaaaggatcgtagtgacccagactacgatcgaaactacaaaaggtatgttaggagctcagtgcctggcttcaacttgagcccaggtgtttttaactttgttgtgcctcagtttatgcagtatgacattggttatgtgcaatctcctggcatgtccacaaaccagcatactatgtactttggccagcctgatctaacaatagggtcttctggagctgctgtttatcgacattggccaaccccaacaatgatgtatccccattgctatgataatgttagtccaatgatgtctcaggttcctctgtaccagtctttcaaccatgattaggagattctgcttgctggaaagttgggaacaattctctgttgaacttgctatgttgtgttgtcctatgttaagtggagttcctttagattcgagccgtttttattacaaaaaattgtataaggagtcctaattcgttgaaact

SEQ ID NO: 25883 - DNA, 995 bp, Zea mays
  Clone ID: LIB3960-022-C3_FLI
ccgaattccctgcgattcctctcccctcgcctcctcgtctccccctaggggatcgtcggagaggaatcgcaaagagggccgtctcatccgagttaaggaagccatggagcacaaggaggctgggtgccaggcccccgagggacccatcctctgcatcaataactgtggcttcttcggcagcgcggcgaccatgaacatgtgctccaagtgccacaaggagatgataacgaagcaggatcaggccaagctggctgcctcctctatcgacagcatcgtgaacggcagcgacgccgtcatggagccggttgttgctggcagcaacacggtagtagctgttgcccaagttgagttgcaaacaatgaacgtgcagcagcccgctgatgttgccggacccagcgagggggtggcggcgatctccaaaggggggaaggtagggccgaaccggtgcagcgcctgcaggaagagggttggacttacgggattcaactgccggtgtgggaacttgtactgcgcactccaccgctactccgacaagcacgactgcaagttcgactaccggactgctgccagggacgccattgccaaggctaatccggtggtgaaggcagacaagctcgacaagatctagggggggttccctacggttgggtatcaggaagattgtaaaccgcggtaactcgtcatgcggaactgctgccttgccccccgcgcctttctcttccatgtttgctgctacaatcttgttgttgggcattgcagtgcacggtgcacacttgtgtagcccgcctcgagaattcctgcctctgcatctggtcagttctaaaatgatttgcatgttggctatgttgtgtaagctctatttatggtggtctcgctgagacgggtatttggcttcgcagttatctagctatgtgatgtactgttgtcttgtccctgggtattatatggtacactgcagccagtaatagtaatctgcaactgtgcgttaaatggtc

SEQ ID NO: 25884 - DNA, 1844 bp, Zea mays
  Clone ID: LIB3960-022-C9_FLI
gcgagtcctctcctctccggggtattgaattcgaaccaaaaaatcaaaacaactcagcgattcgattcgcggcgagtcaagcgggatgccgccgcgcacggctccggcggcgacctcaaccccgccgcggaaggtgcccctccggaagctgctgcgtgcggcgtcggtcgcctgcggggtgcagttcggctgggcgctgcagctgtcgttgctgaccccgtacgtgcaggagctgggcatcccgcacgcctttgccagtctcgtctggctgtgcggtccgctgtccggcctcctcgtccagcccctcgtcggccacctctccgaccgcatcggccccgccgcttcgccgctcgggcgccgcaggcccttcatcgccgccggcgccgcgtgcatcgccgcagccgtgctcaccgtcggcttctccgctgacctcggccgactcttcggcgacgacgtcaccccgggctcaacgcgcctcggcgccatctgcgtctaccttgtaggattctggctgctcgacgtgggcaacaacggcacgcaggggccctgcagggcgttcctcgccgacctcacagagaatgacccaaggaggactcggatcgctaatgcatacttttcactcttcatggccctgggaaacatacttggatatgccaccggagcatacagtggatggtattcgatatttcctttcactgttacagagtcctgcggcatcagttgtgccaaccttaagtctgcctttcttcttgacattattgttctggtcatcacaacgtacactactgtaacatccgtgcaagaacctcaaacttttggaagtgatgaagcacaaaatccaggtgctgaacaggaagctttcctctgggaactttttgggtcattaagatacttcaccctaccaatttggatggtcttaattgtcactgcccttacttggatggcatggtttccttttaccctctttgatactgattggatgggccgagaaatctatcgaggaagcccagacaacccaggagagacccaaaggtaccatgatggtgtgagaatgggttcttttggtctaatgctcaactctgtcgtccttggattcacctctgttgtgctagaaaagttatgtaggaagtggggagctggacttgtatggggtgtctccaatattctaatgactttgtgcttcttggcaatgcttgtaataacatatgttgcaaagaacatggattatccatccagtggtgcacctccgactggcattgtcgttgcttctttggtggtttttacaattttaggggcacccctggcgatcacatacagtataccatatgcaatggctgctagtcgtgttgaaaatctcggtcttggccaaggcctagcaatgggtattctcaatttagctattgtcataccacaggttattgtgtcacttggcagtggcccatgggatcagctgtttggcggtggaaatgcacccgcttttgcggtggcagccggtgcatctttcatcggtgggctggtggctattctggggcttcctcgggcacgcattgcatcctcgtcctccaggaggagaggcgggacacaccgataagtctgctcatttaccattacaggcatcatcaagtctggaaactctttgtgggttggagaagagcacgctgggagctcttgaatgctgtgtgctctttggtggtttgccccgttgagctattttttgccttgtctccaaatcttttgttgttcaattcaactcgaatgtatgtacgcacgtatgcatgtatgtatttgtatgtatgtggatcatttgtagagagcttaagcaatgaataaaagttacaggagtt

SEQ ID NO: 25885 - DNA, 1929 bp, Zea mays
  Clone ID: LIB3960-022-D10_FLI
ctcttcgtctcatcagtagagagaaaggttaataggggggaaactaatgaagacctccgtagtcgttgctgctctagcagcggtgctgttcgcagcacagtcgtatgcttccctcgccggcgccagcggccccagggtcatcatcgtcggcgccggcatgtccgggatctcggcggggaagacgctgtgggaggccggggtccgggatctgctgatcctggaggcgacggggcgcgtgggcgggcggatgcacaagcacaacttcggcggcatcaacgtggagatcggggccaactgggtggagggcctcggcggcgaccagctcaaccccatctggcccctcgtcaactccacgctcaagctcaggaacttctactccgacttcgacagcgtcgtcggcaacgtctacaaggagaacggcggtgggctgtacgacgaggagtacgtgcagaagagaatggaccgtgcctacgaggtggaagagctgggcgccaaccttaccaagaagatgcaccccagtggccgcgacgacatctctgtcttagccatgcaacggctgttcaaccaccagccgaacgggccgacgacgcctgtggacatggcgctggactacttcatatacgactacgagttcgcagagccgccgcgcgtgacgagcctgcagaacacgcagccgacgcccaccaacgccgacttcggcgaggacaactacttcgtggcggaccagcgggggtacgagtccatcatacactccatcggcagctcctacctctccaccgacggcaacggcaagctcaaggaccgcaggatcctgctcaacaaggtggtgcggcagatcacctacaacaaacaaggggtggtcgtgaagacggaggacgggtcgtcgtaccgtgccgactacgtggtcgtctccaccagcttgggcgtcctgcagaccgatctcatacagttcaagccacagctgcccgtcagttcacatgcatctcactgctctgctatacctgcttaattaattaattataataccatggaggaatggcaactgatcgagtgacccggatggataataatatctagttatatatacactaacaagcaaaaacatcgtatcgtcagttctggaagatcgcggcgatctacagtttcgacatgggggtgtacaccaagatcttcctcaagttccccgagcggttctggcccgtgggcgaggggaagcagttcttcatgtacgcgagcagccggcgcggctactacgcgctgtggcagtcgttcgagcgggagtacccgggcgccaacgtgctcctggccaccgtcaccgacgacgagtcgcggcggatcgagcgccagagcgacgaccagacgaaggcggaggtggcggaggtgctgcgggacatgttccccgccgccgacgtgccgggccccgaccagatcgacgtctacgtgccgcgctggtggtccgaccgcttcttcaagggatcctactccaactggcccgtcggcgtcagccgctacgagtacgaccagctcagggcgccggttgggagggtctacttcactggtgagcacaccagcgagcgctacaacggctatgtccatggagcataccttgcaggtatagactccgcaaacatcctcatcaactacatcttcaagaacgaggagtacaaggtccgtggcaagtacgacgtcgacgacctaatcgcacaggctagatgaacgacgacgagtgcacacgccggatgccctgcgccacgatagagacagaataaactgccacggctttatttgccctgtggagcgatgcatgcttcccccttccctttcgagctagagcaaccccagcaggcgccctgcaccgtctggcgtctgctgttcatgtcccgtgtctctgtgtgtttttggattggatgccaatggaacaagaacgta

SEQ ID NO: 25886 - DNA, 1159 bp, Zea mays
  Clone ID: LIB3960-022-F12_FLI
ccaaaaggcatcaccgccgcgacgacgatggcagcctcgctccaagccgcggccaccctgatgcagccggccaagatcggcggccgggcgccctttgcctcgctgccgtcccgcccgtcgtcgcaactcgcctgcagggcgttcggcgtcgacgccggcgccgccaggatcacgtgctccctgcaggacgtcgccagcaggtgcgtcgacgccgcgaagctcgccggcttcgcgctcgccacctcggcgctcctcgtctcgggcgcgagcgcggagggcacgcccaagaggctgacctacgacgagatccagagcaaaacgtacatggaggtgaagggcacgggcacggcgaaccagtgcccgaccatcgacggcggcgtggagtcgttcccgttcaaggccggcaagtaccagatgaagaagctgtgcctggagccgacgtccttcaccgtcaaggcggagggcatcgccaagaacgccccgcccgagttccagaagaccaagctcatgacccgcctcacgtacacgctggacgagatcgagggcccgctcgaggtcggctccgacggcacgctcaagttcgaggagaaggacggcatcgactacgccgccgtcaccgtgcagctcccggggggcgagcgcgtgccgttcctcttcaccgtcaagcagctcgtcgccaccggcaagcccgagagcttcggcgggcccttcctcgtgcccagctaccgtggctcctccttcctcgaccccaagggccgcggcggctccaccggctacgacaacgccgtcgcgctccccgccgggggcagaggtgacgaggaggagctccagaaggagaacatcaagaacgccgcctcctccaccggcaacatcacgttgagcgtcaccaagagcaacccggagaccggcgaggtcatcggcgtcttcgagagcgtgcagccgtccgacaccgacctcggggccaaggcgcccaaggatgtcaagatccagggggtctggtacgctcagctcgagtgattcgagtgtctaactgctaggtgtccgaccgccgtcatggatcttgggaaggtgtatgtataccatggaaaactttggagagcagaggaggaatcgtgtatgtaatgtacttgttaatgcaaattcgggctgtcgctttttt

SEQ ID NO: 25887 - DNA, 1678 bp, Zea mays
  Clone ID: LIB3960-022-H2_FLI
cccgccgcaccctcgctagccacctcctctccgtcgtcgcagcaccgtagctaggccgtggtcgcatcgttacatcctcccaaccgaggcaccacagctactcctcctcttccccccactgttgccataagcaggcgccagaggaggcatgcactgcggcgaggcatggagacggcggttaaaccctagcgagaaagctcggggtgaggcagcggatgctgctgtaggtcctcgagggccggctccgccgcccgcgcaaggcgctcatcgacctcgtcacgcttctcgtataaataaacagcaaccccctctcaatccaaatccaccaagcccactcctctgctgccgcattccaacccattcccatcgtcttcaacaaccaacccagcgccaccagcagcgccatcagcaggagagagatcgccggagccatgacaaggggcggcggaggcgacatgaagtccttctaccgtcagcagaagacgcacgccgccgctgctgccgccgccactaccaagcccactggtggcgtctccaagaaggcggcggcgcaccaccacaagaaggccgcgctcgccaccaacgtccacccagccccagatcacggcgctggcagccgccggaggcggaggcggagcagcgagagagggcgggccgcgagttcgacatggacacgcgctacgggccatgcctcgacgtcacccgcgcccagcggtggcgccgcgccgacgaacagccctgcctctgggagggtcgcgtctaggctactggcgggatggacattccttccccgcgtttcgccgacatgctccatcagtgttcagtactagctctgtgttggagatgcggtgtcgcatccatccgttctgctcccgtctaccgcatttcgtggtagcagtggcacccgtagtagtaccatctgtgcctgtcacaagaaggagaaaccgagtaacatatttgtcctgatcaccgtaaaaaaataggcatgttctgcacaaaaacgctaatgaagacgtaccaatgggatcttggttcatcggattgtacgtcgatgatcgccgtctttgctgcagcaagccaccggattgcgaatggaaagacgcaggcaggaacatgtgtgttgcatccttccactggagttgcagtggcatctgcaaatctgctgattggatcagtaaagtccatcaacgttgcgtgagagtgagaatgcacttttgggctgtgattccattgcaatggcatctgtaactgataagaaagctaagatggagagtttaatatcttctgcggcctttgtggagggtggcattcaggaggcatgtggtgatgcatgcaacatttgccttgaggttttctgtgagagtgacccttctgcagtgagtagccattttgttagttgagctattttatatataaatgttatttctgtaaccaattacttggagttcggagtgtttttcttatgcaggtttggtgtatccttctcagtgacaaagtaccttttaaaatgcactgccctgtacactctgacatgcaagacaatggtatatggattggcttatttatgtatagtgagtcatattttgataggtttttggtacagacttatttagttaaaaacttatagtgacatctgtttgattttttacaatatgtacaagattggaagatcctcttt

SEQ ID NO: 25888 - DNA, 973 bp, Zea mays
  Clone ID: LIB3960-023-B1_FLI
cgtcggcagccgggcaggtaggaaaaggtatcagcgtcgtccccttctccctccgcattgcgcgaaaccccatccgcctccgccttcttccggtctccgctgctcgcttcacccgtctcgccatgtcgaccacgccgccggcggcggctaccatatccgtcgagtatgccaagtccgggcgctcaatctgcaaggggtgcagcggggtcatcgcctccggggcgctccgcctcggcgcctctgcgcgcgacccccgtggcttcggcgccaccaagtggtaccacgtctcctgcttaccctcctcgtcgtacccgctcggccccatcgggagtatcaaggggttcgactccattaaggaccatgatcgtgcggaattgcgagaactagagaagaatcataaaagagacaatactgcagtcagccctccggaggaacaacgtccaaagaaagcaaggattcagatgttttcccctgcggagggggtgccagataatgtaacagtctctgttgagtatgcgaagtctggtcgctctacctgcaagggctgcagtgagaatattgccaaaggtgccctccgccttggtgcctcttttcctgatccccgtggctacgaaaatactaagtggtaccatgttgtgtgcttccctacatcatcatacccattatttccaatgtcaaatctgaaggggtttgattcaattgaggatcatgaccgtgacaagttgcacaaattggtggagaatcacaagagcgatggaaaagcggctgatgtattgaatgagtcaaatctgaagagagaaatggctcacagcatggatgactcgaatgaaggtgctgaaaaggatctggaaggaataaagattcactgcatgggggagtttgaagaaggtgctgaaaagaacctggaagaagcaaagttacctgcagggaacaaaatgattggtccatcgatatccttttcactttctgatat

SEQ ID NO: 25889 - DNA, 1787 bp, Zea mays
  Clone ID: LIB3960-023-B8_FLI
tgaacacggtggcttcgctgcctttggcgccgcgcctgctcattaagccctccctcgcctgcttctccagaaaggacgtcggccgctatggcgggatcaaggtgtacgccgtgctcagggaagacggggccgagttcgcccggaacaacaacctggaggccctgttccaagtggacgaccccgggccgcgggcccccgtcaagaagttcctggacgtgaacgaggctctggaggtggtccgcttcgacatccagtactgcgactggagggcgcgccaggatctcctcaccatcatgcttctccacagcaaggtggtggaggtcctcaaccctctggcgagggagttcaagtccatcgggaccttgaggaaagagctcgccgagctacagcaggagctggaaaaagctcacaatcaggtccatctctcggaagccagagtctcatcggcgctcgacaagctagcgcatatggagaccctggtgagcgcatcatccacagccgagccgcccacttcttcctccctggctgcaactgcaagcagcaccgcccgtgtccgagccaagaacaaacagccacgtcggaggcttgacgtgtccggcccagtgaagccttacaaccccagcctcaagaacttctggtacccagtcgccttctctgctgcctccttcaggatttacggtccacgcagagatagtgatggagctaccagttgaacatggactcctcctggacaatctcctggaccttgctcatgctcctttcacacacacgtccacctttgccaagggctggagtgtgccaagtttggtcaagttcctgacacccgcgtctgggctccaagggtactgggacccgtacccgatcgacatggagttccggccaccgtgcatggtcctatcgaccattggcatctccaagcccgggaagctacaagggaagagcacgaggcagtgctccacgcacctccaccagctccacgtctgcctgccctcctcccggaacaagaccaggctgctgtaccggatgtcgctggacttcgcgccgtggctcaagcacgtgccgctcatgcacctgctgtggtcgcatttcgcagagaaggtgttgaacgaggacctacggctcgttcttggccagcaagagcggatgatcgacggcgccaacgtctggaactggccggtgtcgtacgacaaactcgggatccggtaccggctgtggagggacgccgtcgagaggggcgccgacgaccggttgccgttcagcagcacccaagctgagagtttgtcgtagcgaccggtacgggacgggtacctcttcctcgtcgcatttctccgcaagacgacgaacggacagaaggaaaacgtccactgggccggcgcacacgacagccgcggcccatctccatttcagcctctagcaattccttctccgcatccctgtgctctggcgtcttcagtctcctgacataggcgtacgtgcgtctctctctctctgcgcggttcatcgttcacttcgggctgctgcgcactgaaggattctggaagggtgaaggttgacggccggagacgatgatgggcagcatcgtggtctctctggtgtccacatgcatgtacactactagcgacggcatcgtgggatgcaattgtaatctgagattgatctcttctttttttttcaccctttctgtgtaaagattcagcaaattgttgcgttactcttccaaagcatgtataatcaactacggagacgtgttcatatatataaatattgctacagttcatctgaaaaac

SEQ ID NO: 25890 - DNA, 1878 bp, Zea mays; identical to SEQ ID NO: 25805
  Clone ID: LIB3960-023-C11_FLI

SEQ ID NO: 25891 - DNA, 1912 bp, Zea mays
  Clone ID: LIB3960-023-C12_FLI
ccgcctcctccgttccgtctcatcgctccttcctcgtcagttgttgccaccacccctccctcccatcctctccgcgtcgcccccatcccatcttggcctggacacctgggctgcctcgctccgtttccgcgctcgcggacgcgccgagtcgccggccgaaccagtcgcccgcccgccctccctccctccctcccgccgctaccagcgtcgatctgcgaccgaagagcgattcagaggcagggtgagggggggagacgagttcttgtcggtttcattcttggccgccgacttcacatgccaacaaccccaaggagcagaagccaggctaggaccactaggccttggatcttgtcagggatggactttgctgattcgagacggaagcctaatttcacggggaagattgccgtggctgctgccctcacggtcatgtgcataatcgtgttgaaacagtcccctagtttcagcggcaccagcgtgttctctcgccatgaaactggggtgacccatgtgttagtaacaggcggtgctggttatattggctcacatgctactcttcgtctccttagtgacaagtacagggttaccattgtggataacctatccagagggaacatgggagctgtcagagttcttcaacggctatttccagaacccggaaggcttcagtttatttatgctgacttaggcgatgccaaagctgtgaagaaaatattttcggagaatgcatttgacgctgttatgcactttgctgctgttgcttatgttggtgagagcacaatggagccactcaggtactaccacaacataacatcaaacacattgacagttcttgaggcaatggcagcatataatgtaaatactctgatttactcgagtacgtgtgcaacctatggtgaacctgatacgatgcctattgtagaaacaactcctcagaatcctatcaatccatacggtaaggcaaagaagatggcagaggacatcatcctagattttacaaaatcaaagaagcaatcagacatggctgtaatgatcttaagatacttcaatgtgattggatcggacccagaggggcgactaggagaagctccaaggccagagctacgcgagcatggacggatatccggtgcttgctttgatgcggctttgggaatcattccagggctaaaggttcgtggaactgattactccactgcagatggaacttgtattagggactacatcgatgtcacagaccttgtagatgcccatgtcaaagctcttggtaaagctcagccaggcaaagttggaatctacaacgtcggaacaggccaaggtagatcggtgaccgagtttgtagaagcttgcaagaaggcaaccggagcttccatcaaggtcgaatatcttgcccgtagacctggagattacgccgaggtatacagcgacccgtcgaaaatcctcagggacctcaactggacagcccaatacacggatcttggccaaagccttgcccaggcgtggaaatggcagaaggcgcacccgaacggatatgcgtcagcctgattcagagctcaaaaggttgagagactcatcactcagattcatccaaggggtccgtccatgtgcagtcaatatagccttcagacgattggttcttcaccatagaaaaaacgtagcaacagcaacagaagagtcgtgattcttttattgcagagctggaagaagacaagagtatcgcagggagaatacactacctgttccttgattagtttcatttatatgtataggtcctcttttcgttggtgtcattttagtacaatttggtttaataacacacaaggaaatcgtgttgtagatagggtagatcaaatctcgtgtatcgaccttcgtcttcgtggtggtagaatgaaaggatatataaataagttggtgt

SEQ ID NO: 25892 - DNA, 1737 bp, Zea mays
  Clone ID: LIB3960-023-C7_FLI
gcaaggctctctcgctcacttcttcccagcggagtgcgcagtcgtcatggctaacgctagccgtggtcgtgtcggcggcggcgggcgaagttccgtgctcgcgctgcttctcctgctttccgccggaggagcccgagcgtcctacgacggcgagggcgaggcaggggcaggggcagaggagaaggagaaggctgcggcgtggacgggcgggctgagccggcggagctttcccaaggggttcgtgttcgggacggcggcgtcggcctaccaggtggagggcatggcgcacaaggacggccgcgggccgagcatttgggacgccttcatcaagatccccggcgagatcgcaaacaacgccaccgcggacgtgactgttgacgagtaccatcgctacaaggaggacgtgaatatcatgaagaatatggggttcgacgcttaccggttttcgatctcttggtcaagaatattcccaaatggaaccggagaagtgaactggaaaggagtggcgtactacaacaggctgataaactacatggtgaagaaaggcatcacaccctacgcaaacctgtaccactacgacctaccggaggcgctggaggtccggtacggagggctgttgagcagagaagtggtgagatcgttcgcagactacgccgacttctgcttcggggcgttcggcgacagggtgaagaactggctgacgttcaacgagccgcgggtggtggccgccctagggtacgacgacggcaggttcgcgccggggaggtgcacggggtgcgaggccgggggggactcgggcaccgagccctacgtcgtggcgcaccacctcatcctctcccacgccgccgccgtccagaggtaccgccgcaggcaccagccgacgcagaggggcagggtcgggatcctgctggatttcgtgtggtacgagcccctcacggcggactcagccgccgaccgggccgccgctcaaaggtccagagacttccacgtcggatggttcctgcaccccatcgtctacggcgagtaccccaagtcggtccggagaagcgtcaagggcaggctccccaagttcacggctgaggaggccggtctagtccgaggctccatcgactacgtcggagtcaaccagtacactgcctactacgtgcgtgatcgacggccaaacgctacggcggcgccgcccagctactcgtccgactggcacgctgagttcgtctatgaacgcgacggtgtgccgattggaccaagggcgaactcagactggctctacatcgtgccttggggactgtacaaagccgtcacctacgtcaaggagaagtacggcaaccccacgatgctcctgtcagagaacggtatggacgacccgggcaacgtcacggtgggccagggcgtgcgcgacgcggcgagggtggcctactaccggagctacgtcgccgagctgaaggcggcgatcgacggcggcgccaactgcgtgggatacttcgcctggtcgttgctcgacaacttcgagtggaagctggggtacacgtcccggttcggcctcgtctacgtcgacttcaggacgctccggcgctaccccaagagctcggcgtactggttcagggatgtcatcgccggcaccaactgaccacgtacggtctctcagtccatctgaaaaagggttagagaaggggaaaaaggatggggaaaaaacatgagtgtgtaatccgcgtaccgatatatataagtactcttgtc

SEQ ID NO: 25893 - DNA, 1578 bp, Zea mays
  Clone ID: LIB3960-023-D4_FLI
gcctccactacaccacacagagccgcagcagactcgcaagggaaaggagatggatcgtctgcccgagtcgacccggagcatgaggaagtacgcgtcggaggccggcgggcttcgcgccgctccgccccgtcctcgccaacctgcaggaggtgttcctcggcaccaagctcgccgtgctattccccgccgtgccgctcgccatcgccgcccagtgcgcgcacttcggccaggtgtgggtgtttacgctcagcctactcggcctcatccccctcgccgagcgtgtcagcttcctcaccgagcagatcgcgatatacaccggccccaccgtgggcggcctcctcaacgcgacgtgcggcaacgccacggagctcatcatcgcgctcttcgcgctcatggggggccagatcgaggtcgtcaagtgctccctcctcggctccgtcctctccaacctgctgctcgtgctcggcacgtccctcttctgcggcggcgtcgtcaacctcggctccgaccagccgtacgacaggacgcaagcggacgtcagcacgggcctcctcatcctcggcgtgctgtgccagtcgctgccgctcttgctgcgctacgcggtgggcgccggcgagcactccgtcgccgcgcccaccacggtgctcgacctctcccgcgcctgcagcgtcgtcatgctgctcgcctacgtcgcctacctcttcttccagctcaagacgcacgcgcagctgttcgagccgcaggaggtggacgacggctgcgaggcggaagaggacgagcaggccgtcatcggcttcgccagcggcctcttctggctcgccttcaacaccgtgctcatcgccatcctgtccgagtacgtggtcggcacgatcgagcctacctccaaatcctggggtttgtccgtcagcttcatcagcatcatacttctacccatcgtggggaacgccgcggagcacgccggagcaatcatttttgctctcaagaacaagctggacattaccctcggagtagcgttggggtcggcgacccagatctccatgtttgtggtgccgctgagtgtcattgtagcttggatcgcgggtattcaaatggatcttgacttcaagctcatagagaccggctctctcttcgtctcagtaatagtgacagcattcaccctccaggatggttcgtcacactacctcaaggggatccttctgctgctgtgctacattgtgatcggtgcatgcttctttgttacgaggcaacctgcaagtaacaacaatggcgctgggctgtcgctgccaactggtactttgagtgcacaagctgcatgattgttcaagggtcctgcctgagcctgaacaaatgagcatccaaggcagcaacgcagttgtgagtcagaaacaatgccgtgcaaaggttgatgctttcagaagcggtgaaatctcagccggtggctcagtgctatgggagaaatgaaggctagctgctgttgcaataagggtagcgaatatgcatccggtctatgtatatgatgctgtgttgtttcatttattatacagcttaataagatatatgcagagggtggatttgtat

SEQ ID NO: 25894 - DNA, 824 bp, Zea mays
  Clone ID: LIB3960-023-F9_FLI
gctaggagcagctgctgggcagctatccagcgggccactgagtttaccttactgcttactcttacatactaagatcgctaccagagcatggcgggaacttcgtcgtggtcgtcgtcttcatcctgcgcgtcgtcgttcgggtcgcccgaccacgatgtcgtctgcgtcaccgagccggactctgtgggtgccgcaggcgccgtcgccgacgccgagggaagcgtcaagttcctgtgcagctacggcggcaggatcctgccccgccgcaccgacggcacgctgcgctacgtcggcggcgacaaccgggtcctctccgtcgaccgtcccatccggttttacggtagtacatatatttgtgccggcgaatcgacacgagtccagtgaacaatcctttgatttctctgacttcagttgccgtttatttctgtcggcagtgttgcagcggaagctgagggaattgtgcggcggctgggaagcgcacctgcggtgtcagctaccgacggaggacctggacgcgctcatctccgtcacctgcgacgacgacctcgccaagctgctcgaggagtacgacgaggctagcaaggaccgcctccagtcgctcaagatccgggcgttcctgttcccgactaggacgccggcgccgtccatactacagcgtaggagcccgccgtcgattgctcacctccactggcaaaacacttccccgccggccgcagccggcgtctcgctgacgtgcgcgccgcggtggtgggcagggccccaggcctctcgccaggcgcaggcgccccaggcccagaactacgaccgacacagcctcggtgagg

SEQ ID NO: 25895 - DNA, 906 bp, Zea mays
  Clone ID: LIB3960-023-G7_FLI
atgatgtttatttatcagttgtcttcttgttctttgacgttcccatatgtctatgctgcccgctaggaaccttggtaggcaggatgacagagctgtatgcctgaatgcaaccaggtgcttagtatccttactgaagccacctggaataaccagttcaaataaggttttgttaacaggcaacttacacagttacactgcatgtgaaatccccaagtttctgacctaagaacccgtatgtgggttgagaaatactgtcctccccccctttcttcggaatgaaattacctgaattcttatgtctagcatactgaccattatctcgagatcttgtactttgcagttgtcttgcaggttagtggttcgtggactgcacctcatagcccatgtacagcgatggagattcagcaaggtgcaatcaaacttattcacccgttgctgaatttgtgaatgccatccgctgattcctgttgatcaaatctgcgttgtcaaacaaacagtctttttctgttattgattctcatcaagagattatctccatttctgtctgttctgccaatttacagggctctggagtcacaaactcactgtcatgaagtgcagggtatctggttagcgttgcttaagcatagcttatgatgtttcactgttcccaagtgagtaaactaagaaatttacgaaatagctagattactatagaatttttttgaaattatttgagtgaagattgttcatgccatttatgggcattggcttgggttgattctcttttctcttatacctcacccctcggatattacagattctgacaggagcagaattagaacagcccccccttaacatcacaaatggatatggtttgtgctgtaaatcatcatgtagtcatttgcatagaattcttttttttat

SEQ ID NO: 25896 - DNA, 1375 bp, Zea mays
  Clone ID: LIB3960-024-B6_FLI
caattcacaacaaaaccctagctactgcttcgtctgccgaattccccctccgctcgcttcgcacgccgcccgtcgccgcggcggcgtctgcgattgtccctcccgctgcaaggagcacatgcttctcgccgcgccgttagcccgccgccgccaccaccggttcaccttcagctatgtcttctcaggtcgacaggcgcagccagtccgccgggaagcgcgcccgcaccgacggcagccggcgtgaggacgactgggtttgccccagctgcaagaacgtcaacttcgccttccgcaccacttgcaacatgcgcagctgcaaccagtccaggccagcagatcacacggccatgcaaaccccgcctcactatcccacgtcagggggttacatgggccctgggacgccaccatcgatgtaccttggtgggggcgctcccccatatggatcctcaatgtttaatgggcctgcggtgacacgctatggtattccgcaatttcctgggggttctgcgtattcatatggatatggtggtcccataccaatggggagcccctacgggccaatgcaaattgctgggccaactccatactctggtggaactatgatgacagcaggtggaatgtatggaattcccatggacaggtatgggccaatacctgctggtcctggtccaatgggcacaagggctggctcatattctgatgaaggttctcagaagaagcctgcaggagctggccgtgataatgattgggagtgtccaaattgccataacatcaactttggctttcgcacagtctgtaatatgagaaagtgcaacacacctagacctgcaaaccagggatctaagtctgatggtttaaggggctcaaaagcaaagatgccagagggcagttggaagtgtgagcagtgcaataacataaattatcctttccgaacaaaatgcaatcgtccccaatgtggagcagaaaagccatcacaaacaaacaatgtgaatggttcagcgacagatcaggacaatcagtgagtcctaggacagtaatgagggtcaagaaggtccagcgtcgtcgtcaaggttcagtctgaatgtggggtacatctctgtcagtagtcgctccagttgttacaagtttcttccccttgggaccttagtcgagttggcaatggagtcttgtcttccctaatcactacagataatggtcaagaacatcgttcttgcctttcctggctgagcttggttacttgtctttgttactacttactagtactctgggtaaagtgccatctgttatatgaatgccttttagttatctgtgtcatagaatatcactcatctgttatgaagtatcacaaccgtcatcattttgtcttggttttgtt

SEQ ID NO: 25897 - DNA, 2213 bp, Zea mays
  Clone ID: LIB3960-024-H5_FLI
caatccattattccttcccccttcgcttcgcttattcccccactcacttcccttccacaccgccgcctccggagaagggtccacggcggcgtccttcctcgggaggcgctcggctcggattcgctcctgctcggcggcggcgtcgccggctggtgggctcgcgcgcgcacctggtgctgggctccgcgggcgctcctcgtgcgtgacacgcgcccgatgcgtcaggatcgcgcggccggcgcccggggcctgccgtgattctgcggggaggctggatctcggtgcttccgcgtgcgggaaccagtgagttttctttttgtcttctcttccccggcggctagcggcgggccgcttggtgcacgtcagcgcgggaggccggaggttagccgatctggtgctctcgccgcccggagaggtggtgctgggcccactgccgggttctgcttagtaggaggcggaggaggtaagtccctcgtctcatggggctcgcgccgccggagctgggccagttcgacgggtgggagagctccggggaggaggagcgggagcgggagcgttggggctggtgccgccgcagccgccgcggcagcagcaggcgccgcgcggcccccaagggcaccgacgacgacaccgcggtcgacaccggctgctgcatccgcctctggcccgtcgggacatgccctccgccgccgcagaggtccaaggtcgacacctccaccagcagcgccagcacgcacggggagaagtcaacagaaaatggtagtaggaatcaaccggtggcattggtagtctcaggttctacaactactagtaatgctgaaagcagttcatctgcatctaaagtcggagaagagataaaagttgcctcccagctgcgcaagtttgcattcaatgatctaaaatgtgctacccggaacttcaggcctgaaagtctccttggagaagggggttttggatgtgtttttaaagggtggattgaagaaaatggaactgcacctgtgaaacctggtacaggtctcacagttgctgtcaagacgctgaaccatgacgggcttcaagggcataaagaatgggtggctgaagttgattttcttggaaatcttcaccatcccaatttggtcagattgattggatattgtgttgaagatgaccaaaggttgctggtctatgaattcatgcctcgtggcagtttggataaccatctttttagaaggtctcttcctctcccatgggcaatcagaatgaaggttgcactcggagcagcaaagggtctggctttccttcatgaagaagcagaaagaccagtcatttatcgcgattttaaaacatctaatatactgctggatgcggagtataacgcaaagctctctgattttgggcttgcgaaagacggacctgtaggtgataaaactcatgtttctactcgagtaatgggaacctatggatatgcagcaccagaatatgtcatgactggtcatctgacatcaaagagtgatgtctacagcttcggggtggtgcttcttgagatgatgtcagggcgcaggtcgatggacaagaaccgcccgaacggggagcacaacctggtggaatgggcgcgccccctcctaggcgagaggcagcggttctacaagctaatcgaccctcgcctggagggcaacttctcggtgaagggcgcgcagaaggcggcgcagctagcgcgcgtgtgcctgagccgggaccccaaggcgcggcccctgatgagccaggtggtggaggtcctgaagccgctgcagaacctcaaggacatggcgagcgcctcctacttcttccagacgatgcaggccgagcggatggcgcactcgagcagcatgaacgggaggagcagcatgaacggcggcttcaagacgcagagcccgtttgggcggcatgggcagccgcctcccgtgaggagcctctctgacgggccccgcgcgtctccgttccgctactcgccgaagcctaacgtgaagtgagcggagtggtggaggcgcggttttctgccggctggaaggcacggcccctggatgaaacctggtttgttgggggtgactggttcgggccgtgcatttgcattgcattgcattgatgtgtgtgctgtagattgacatgtgcacaaagtaaaaggatataggcgaaaaagggtggtgtaggtatcggagtttgcttggcggatgtttgctctgaggttttaactg

SEQ ID NO: 25898 - DNA, 1832 bp, Zea mays
  Clone ID: LIB3960-024-H7_FLI
gtttcggtggaggctgccggcgtgaagcactggccaccgggtgctgcacgtcaacggccaacagggggcaccgtgcaggtgggcagaagcagccagcgacaacagtagggcacagggatgtatatggaccttccaaatacactagacttttgcaagcaaccaaagatactctcagataagaagacgcctggaagagggagaagaaaagggtgaattggggttcatccttgatggctttcctcgaaccatgagacaagcggtagaaaatggccgatgccgaggatatccagcccctcgtctgcgacaacggaactggcatggtcaaggctgggttcgctggcgacgacgccccgagggccgtcttccccagcatcgtggggcgcccgcgccacactggtgtcatggtcgggatggggcagaaggacgcctacgtcggtgacgaggcgcagtccaagaggggtatcctgaccctcaagtaccccatcgagcacgggatcgtcagcaactgggacgacatggagaagatctggcatcacaccttctacaacgagctccgcgtggctcccgaggagcaccccgtcctcctcaccgaggcgcccctgaaccccaaggctaacagggagaagatgacccagatcatgttcgagaccttcaacacccccgctatgtacgtcgccatccagaccgtgctctctctgtatgccagtggccgtaccacagattttagagattacctgtatcgcaattttagatattccgtggaaaagacggaaggcctgggtgtgttcagaacacatgtgctcacagggcttgcccgctgcatcttggttcagtgaacgagggtaggatccagtgcccttaccatggttgggagtactctactgatgggaaatgtgaaaaaatgccatcaacaaatatgctcaacgtgcacatccagtcattgccatgctttgagcaggaaggaatgggggtgcatggcctagggggaggatggcgactaggttcatcgatggcggcaagcagctcgtgttcgaccacgcgacacagttcttcaccgcgagcatccgcaccgctgcaggtgctgcatatcatcggcagagaggatcgagttcagatcgatgatgcaaggcggctgcatcgtcgagctgtaacacctgcagcggtgcggatcaatgaggggatttttttgtacagggccagggtattaccccatgacctggtgaaagggaccactgagccgtaatgcaaccattgtaactctgaagataatcagtcatctaacatttgattattcaactagatagatgatgcctccttatgggacaccaccaccatatgcagcaatgtatgcacaaggtacaccataacagcaggcaccaatgccaccgggttcacacccatacagttcttatcctatgcagtcaccaaacggacagttcaaactccaataagaatctcttggctgctcacctgtcgcatcttccccgattcaaaatcgtcctggtcgcatcttccccgattcaaaatcgcccaattttggagacatgtgacaaacgccatgccctgtgcattagagaagatacagaatcgccatgccctgtacaagacagtgagccaaattcttgttcattttgcactatgatacatattgattcattaggccctaggttggaggttgtgactgatgagttgggaagggattacttgattggtggtgtacaattcttggactggatacatgttccagtttttggtccattagttcaggaattgtttcatttacatgtatattcagtacactcgtataatggaaacaggcaaatctctatctc

SEQ ID NO: 25899 - DNA, 1258 bp, Zea mays
  Clone ID: LIB3969-001-A2_FLI
aactgggagtggcaagcgccaaggagtagttagagctcagtagggatacagcagtttctgagtcacttcgtctctgacatccacgagtaccagctataccagttttgattccactctgatttgctcatcaagcgtcaatgctccctccaatcattcttaatctcaggaagttagcagtgagatgctttcagtcacacttgttttagtcttctcctttcagaaggctgatagtcttagccttataccgttggtcttctctatttctctccttcctctgcatgcaatgttgcatttctcgattccagttcagagacttccattcctagagttgcgtggtactcacctcttgtttaaatccacttcattgcatgcaggttgaaagagataggagtgagaggcagttcccttccctactctcacaatgcccatggagcaagcatccaggcactgcgataaagacacgctgaagatggccatgctgaaacacgaagagactttcagacagcaagttcacgagctccatcgcttatacaggatccagaagctcctgatgcgagacctcacacgggagctcaagctcaagagccagaggagcctgcccaccacctcgccgaacggcagctgcgccgagtacagcagaggggctctcggcatgtgcgcctacgagcgcctctacgccgctctcggccgcggcggacacgtagcagcagcagcgacgccgacgccgacgccgcgcaccgctctcggcctcgacgtcgtggcgccagtcgtcgagtacgtgcggagcgcggaggaggaggacgacgacgacagggcggaggaaaccgacgaagacgcggagctggagctcacgctcgcggtgggcggaggcggggccaagaagcggtacgacgagtacccgtccggtggggagagtctgtcttcgtcgtccacggagtccgacgtgctcaccgtctccggccgtgagtggcgtcgggcgcgcggcacgccgtatcacaagatgaggccggcgaccgggctggacgtggtgcaggtggaggacgacgtcggggtgccgccgccgctgctgttccactggctcagcctcaagatggcatgacgcgatgcgaggaagcaagagcacattgcgtgtgtgttcgttgctgcttgctgtgtcagggtgttgacttgctactgttcttcagttgaatgcttttgtgtgttaggttttagtggtggatcaagtctagaaatcaataattggctggctgttcatgat

SEQ ID NO: 25900 - DNA, 934 bp, Zea mays
  Clone ID: LIB3969-001-C6_FLI
ctcatcgccacccaacccgccgagtccccaagcaagttgagcatccatccatccatggcgggaggcaagtccaccggcaatgccgcgcgcagcaggaagcgcgtcgaggcaaccgtcctcaagcgctccagggacgggagcgccttcaccagatgcgaggcctgcaacaaggacgtccccgtcgtcctcatcgacatgcacagctgcagcctcgacgagaagatcaggatgacgctcgaggcgcaggtcgtcgagaagaccgtcgaggtcgccagtgcggaccgcaagaagtcctccgccaagggaggtggtaacaaggacgccaagcgcaagcgctcgcccaccgccttcttcctcttcatggacgacttcaggaaggagttcaaggccacccatcctgacaacaagagtgtcgctaccgttgcaaaggaaggaggggagaggtggaagtccatgacagacgaggagaagaagccttacattgaaaaggccgcggagctcaaggctgaggccgagaatggcgagggcagtggtgagaacaatgttgccactaagaaagccaagacagatgaccaggaggtggatcagccagcaaagaagctcagaaagtgcaaggctcttcacgaggacgaggatgacgatggtgaccaggaagacggggatgagaagaacgagttggatgacgacatgtagatggcagaggccactctcccatctctgtaaatggatggcagatgtgagcgtcttgttagaaatgtcacttgtttcaagctagagggaagagggagagtagtcagtagtgaatatcccccgttatcgttgctacatgaatgaactattctatgatgcagttctgtctgctttcatctccatccaacacatgtactcaatgcctttttcttttctggattttctatattacatccattgctcc

SEQ ID NO: 25901 - DNA, 894 bp, Zea mays
  Clone ID: LIB3969-001-H1_FLI
atcgccgcatcgcggacctcgaccccgccctcactgagctaggagcagacgaggcttgagaacgagcgacggagacctagccgaagcaggagctccccatggcgaccggcaacctggcgagcgtggtggtggctgtagacggcagcgaggagagcatgaacgcgctgcagtgggcgctcgacaacctccgcctgcgccccgacggcgagctcgtcgtgctgcacgtccagccgccgcccaacatcgccgcgggactcaacccggcgcccatccccttcggcggccccagcgggttggaggtgccggcgttcacgcaggccatcgaggcgcaccagcggcgcataacgcaggcgatcctggagcacgccctgaagatttgttccgataagaatgtggaggtgaagacggaggtggtggtcggggaccccaaggagaaaatctgcgagattgcggccaaccgcaaggccgatctgctcgtcatgggctgccgtgccattgggccgctaaagagggtgttcttgggcagtgtgagcaactactgtatcaaccatgtgggctgccctgttgttgtgatcaaggggacatgatattccatcagcccagcattctttggtgtacttccattcaaggtttctgaggcttctgctgtgacatgtgtaatcctgtacgatatattactgcacattactatgcttttgttggtgctgctgagggatgaaagttgctatgtggtccctttcgttataaaggaggaagctttgtcggtcgtgtaatcgtggtaataagttggtcctgtggcggattcttgtgtatattcttgtaatcgttcaaagacatggttctgtctgaagtcccaacagcgcaaaattaccagagtctcggtttgtttgtttg

SEQ ID NO: 25902 - DNA, 1245 bp, Zea mays
  Clone ID: LIB3969-001-H2_FLI
ctcctgcgcgccgccagtccggcttctcctggctcctgcgcgccgccagccgtcagcccgtcaccgattggagatccttggaaacctgcgcgccgccagcccgtcaccgcttggagacccgctcagccgcgcttccctgcgaggcaccccccgtcccgattcctcctcctcctcctctcacctgcgtggctgcgccacaattgccaagctcttctactcctgttcctcccatggagctcgcagcgtctgcttccgcctccgtctgctctgaggtcgcgccgtcagccagcccgtctgccgtcgtgaggtactgagcattgtttcaagtggttattaggcttcatggatatgtctcaagagcaagaacaggattttggcgtactgctgaagcaaggtgcagaagggagggtatttgcttcgacatttgtgggacgaaagtgtgtaatcaaagagcgtttttcaaaaaagtaccgacacccattgttggactcgaagttgactctaaagcgcttaaatgctgaagctcggtgcatgacaaaagcaagaaggcttggtgttcctaccccagtactttatgctgtggatccagttctgcatactttgacctttgagcatgtggatggcttgtctgtcaaggatatacttcttaggtttggttcagatggggtcaatgaggaacgcctgaatgatattgccacacaaataggaaatgccattggcaaactacatgatggaggccttgttcatggtgatttgaccacgtcaaacatgataattaagaacagtaacaatcaattggttcttattgattttgggctgagtttcacttcgacaattcccgaggacaaagcggtggacctatatgtgctagagagagctttgatttccatgcattcgtcctgtggggatgtgatggagaaaatcctggctgcgtacagaaaggcttcgaagcaatggtgctccacccagaacaagctggctcaagtgaggcaacggggcaggaagcgcaccatggtcggatgaatggagaagaagaaaaatatgtggcatgcaatggatgtatgttattagaaagaccgtcgtctaaaacgagagtgatgtaccaccattgctgtattttttttagcggtgagtggctttggctgctgtaacgtttgtgaaatctggaactatgttgcatggctgcaccatttggtcagaactcagaagcagagtgccgtttcatccggaagtgggagaagtttt

SEQ ID NO: 25903 - DNA, 554 bp, Zea mays
  Clone ID: LIB3969-002-B1_FLI
cgagaccgcgagagtgtacgtgccaccaggagcagcagcagcaatggccgccgccgccaccacctcctcatcctcccacttgctcctcctctcccgccagcaggcggcctccctacgatgccgcctctccttcctcggccagcccagaaggcccggcagggtcacggcccaggcgccggccgctaaggacgtgcggtgcatggcggccgtggacactactgcggcgtccacggcggcggcggagacgagccccaagtcgagcagctacgagatcgtgacgctcacgacgtggctgctgcagcaggagcggaccggcgcgatcgacaacgagatgaccatcgtgctggccagcatatccacggcgtgcaagcagatcgcggcgctggtgcagcgcgcgcccatctccaacctcacgggcgttcagggcgccgtcaacgtgcagggcgaggaccagaagaagctcgatgtcgtctccaacgaggtaattaattgagtggctcgcccacgttttgtgttatacacactgacacagcagatacagccgaaccacacac

SEQ ID NO: 25904 - DNA, 1155 bp, Zea mays
  Clone ID: LIB3969-002-B2_FLI
gctactactacacacaaacacagctagccggcgctgccaggttggctttggcgagcaacgacgacgacgacggcgctcaggactcaggtgctttcggttcaggcggaggagggcatggagcgcggcgactgccagttcacggtggtgccgccgcggcagtacgacgaggcccagttcatgcaccagctgatggtggccggcgaccagcaggaccccgcgggcgcggggcggggagctgccgccgccggcggggagaggaagcggcggttcacggaggagcaggtgcggtcgctggagacgacgttccacgcgcggcgcgccaagctggagccccgggagaaggcggagctggcgcgggagcttggcctgcagccgcgccaggtggccatctggttccagaataagcgtgcgcggtggcgctccaagcagctggagcatgactacgccgcgctcagggctcagttcgacgcgatgcacgcccgcgtcgagtcgctcaggcaggagaagatcgcgctcgccgcgcaggtagacgagctgcgggggaggctgaacgagcggcaagaccagagcggcagctgcgaggtcaacgacgcggaggcggcggcggacgacaagaggaacaatagcaccagctccctcgtgcaggacgacggcgccacgccgccgccggctgcagtagacgcctccgaggactcggcggcgaccggcgagtactacgaccacgtcgcgtacgagtacgatggcctgcgcgaccccttcgtctgcgccactccggacctgtgggatacgtggccgctgctggagtggaacgcggtggcctgaaacctcgatcgtgtactcgtcgtcatgtctctgtacctagtgcacgtgtggtggattcatggtgattccttatatagctagctagccccaactagctaccgagccagttgatccggggagggatcgacgggtaacagacgatagagagctgggtaattaggaatcaggagcgaccggcggctgtggagggaaaagagggatcgatcgacaatgtccggccaccgtgcaccttaggatccatgttcgtgagagaggtggttcagacttcagagccgaggcaaatggtgtcgcacgtgggttacgcttacgcatgctgttgctctgcacgtattc

SEQ ID NO: 25905 - DNA, 1115 bp, Zea mays
  Clone ID: LIB3969-002-B5_FLI
atcgcctttggcggtcgagattcacctatagctagctggagtccagcagcagcaacatggtaggaggagcgggaggagaagtcatcgggggcggcggctgcagcggcgaggtcgtggtggtggtcgtcggccgggccgagatcgacaccagggcaccgttccgatcggtcaaggaggccgtggccctcttcggcgagagggtcctcgccggggagctctccgctggacgacgaggaccactctcctccgtcaccgagcctacccgatcatcgattgcacagaatcgaatggcggcaacaagacccaagcaccacgccatgagtcctgccaccggcgcggtcaccacggctgcgctgcgcgccgtgccaccggtagtcgtcacagcgggtcagctggaggaggctaagcagaaactggagaaggagcgggaggagaagcagaagatggccgggtgcatccagaccctgcaagaggagctcagccacgccatggaggaacttaagaggctcaaggcgcgggacgacgaggaggccgccggaaccaaggtcatcgacctggagatcgacgagggcctctactttaccgaggccgccgaaaagcaaatggcgccgccgccacagggcgctgccggcggagcaggcgagctccagaagaagaggtacgtgacgttcgctgacccgccgacggtcgccaccaccgccgccgccgcgtgccgggcgccaccgttgccggacgtggtgatggaggtgcaccgcgcgccaacccaccagctccaccagccgcacccgcattactaccgggagccgcggttccagaggcagatgtcggccgggcacgaggccgccaaggcgatggcggatgagggaaggaagaagaagaagccgctcatcccgctcgtgggcgcgctcttcatgcggaggaagaagagcagcaaaagttgccacgacgacgtggcgttttgatccatcaatacatgcatacgtatatgcatgcatccacggagtgatggaggtgcttttattttaatttttttaatatatatgtctagataatggaatgcgcactgataatgcatggatctttgcaaaataaataaatatatccaatacacaaat

SEQ ID NO: 25906 - DNA, 1339 bp, Zea mays
  Clone ID: LIB3969-002-C12_FLI
aaaaccctaacttcccggccgccgctttcctttccctcgatccacagctcgcgccgttcctgcaagtgcgcacccatcgtcccgcctacgcactgccgcccaacgatctacgagctgccatggctaactcagcggcaccgggaggaatgaggtcgttcctgcaggccgtgtctacggtcaccgaggaggcgccgacgccactccgcgtcgtccagatggagggcctggctgtactgaagatcatcaagcactgtgaggagtttgcgccagctttagttacaggtcaattgcttggtttggatgttggtagtgttctggaagtgaccaactgttttccgttccctatcagggaagcggatgatgaagcagatgcagatggtgccaattatcagcttgagatgatgaggtgtttgagggaagttaatgttgacaacaatactattggatggtatcagtcttgcttgcttggatcttttcaaactgtggaactgattgaaacatttatgaactatcaggagagcatcaggagatgtgtgtgcattgtctatgacccatctagatctagtcaaggcgtgctagctctcaaagccttaaagcttacagactcgtctatggatctttaccgtaacaatggtttaactggggagaagttgagggagaagaaattgtcctgggttgatatttttgaggagataccaataaaagtttccaactcagcgcttgtcagtgcctttatgaaggagctggaacctgagtcacctgttacccagtgtgacctggaccgacttaaattgtcaaccgccccctttatggaaaggaacttggaatttctgattgggtgcatggatgatctttcatcagagcagaacaagttccaatattataaccgcaatctctcaagacaacagtcacagcagcaggcatggcttcaaaagagaaggcaggagaacatggcgaggaaagcagctggtgaggagccactaccagaagaagatccatccaatcctatatttaagcctattcctgagccctcacgattggagggctatctagtaactaatcagatctgcagttactgcaaccatatcaacggggttgctggtcagaatttcgacaggctatacctgatgaaggccttgcatgaggattagaagactgggctgtgatgaatgctgttagaattagcttgtgatactgctcaaaatcgtaattttgtgatgtacctttacatgggcgtgcctgtcctctacttaatatttccatggaccagatggttagctcgtgatacttaatgtacttgcatatgtatgcgttgccgtataaaccaattttctccatt

SEQ ID NO: 25907 - DNA, 1045 bp, Zea mays
  Clone ID: LIB3969-002-E1_FLI
cgaggccgtcgagaaggccaggcgcaagctccgcgccctcatcgccgagaagagctgcgcgcccctcatgctccgcctcgcgtggcactccgcggggacgttcgacgtgtcgtcgaggaccggcggtcccttcggtactatgaagtgcccggcggaactggctcacggcgccaacgcggggctggacatcgcggtgcggctgctcgagcccatcaaggaggagttccccaccctctcctatgccgatttctaccagcttgccggagttgtggccgtcgaggtcaccggtgggcctgagatccccttccaccccggcagggaggacaagcctcagccgccacctgagggccgtcttcctgatgccaccaagggttctgaccacctggggcaagtctttggcaagcagatgggtttgagtgatcaggacattgttgccctctctggtggccacaccttgggaaggtgccacaaagagcggtctggttttgagggggcctggactacgaaccctttggtctttgacaactcttacttcaaggaacttctgagtggcgacaaggagggccttcttcagctcccaagtgacaaagccctgctgagcgaccctgtcttccgccctcttgtggagaaatatgctgcagatgagaaggcattctttgatgactacaaagaggcccacctcaagctctccgaactggggtatgctgatgcttaaatggtccatatcctggagcgggacacaaactgctgcctgtatggactcgtgcgattcagggtgaaccatcagattgtctagtgtcttctttgtaataaatttatctgttcttggtactttgtctatggttgaatcggaacccattttccgtttgcctagattcttaatttctggtgctgtatccagctgaaactagtagatctatgatcttgtggctgcagcatgttcttgtcacttttatctggtctccgttggttcggttcacaggttgtgtgctttaaaaggctgtgcttaagtcctgcaattcgagtccaccaaactgtagggtgc

SEQ ID NO: 25908 - DNA, 1129 bp, Zea mays
  Clone ID: LIB3969-002-G7_FLI
accgccgtacgccccactggtctcccactcatcccgtctcgtttcgtctcggtctcgcacctctcacgacggcaccaccccagcgcggcgcgagtggagacgccgctgctccgtgcttcgccgcgcctacctaacccaagacctgctagacctgagtggctgagtgttcgtgttcggtcaaaacccaccgcgcgagcgcctccagagtccaaacccgctacaaatctcgcgctgcgcattctccccgtacgatacggcggcacggcccacgagccaggcggtggcggcagctagctagctgcggagtagcaccagccaccggagggaagtgggcggcgcgatgggggacgagccggacggggaggcggaggagtacctcttcaaggtggtgatcatcggcgacagcgcggtggggaagagcaacctgctgtcccgctacgcgcgcaacgagttcaacccccactccaaggccaccatcggggtggagttccagacgcagagcatggccatcgaaggcaaggaggtcaaggcccagatctgggacaccgccggccaggagcgcttccgcgccgtcacctccgcctactaccgcggcgccttcggcgcgctcctcgtctatgacattacccgccgctccaccttcgacaacgtcggccgctggctccaggagctcaacacacattcggacacgacggtggccaagatgctggtgggcaacaagtgtgacctgggcgacatccgccaggtgcccgtggaggaaggcaaggcgctggccgaggccgagggcctcttcttcatggagacgtcggccctggacgccaccaacgtgaggacggccttcgagatcgtgatcagggagatctacagcaacgtgagccgcaaggtcctgaactcggactcgtacaaggccgagctgtccctcaacagggtgagcatcgacggcgactcaaaagacgagcagaagcaggggagccggttcgggtgctgctagaagtggtcggggggtagcggtacattattggatcaggttggatttgaaccggagatgatgctttttcattttttttgggtggcgggtgggggcttgcttgtaaactgtaatacaaggtttgactctttgtttgctgtt

SEQ ID NO: 25909 - DNA, 1631 bp, Zea mays
  Clone ID: LIB3969-002-H6_FLI
cgcgtctcctcttcttcctgctcttctccaccaccgcgctctaccgctccagcacctcctcctcctcggccgcggtccttcgcgccaccaccacgacaaccaccaccacgaccaccacgacgacgacgaccaacaccttcacgctctccttcgccgccgccaacactcccccttccacccccgctaaccgcaccgcgctggatgtggccgacaagggggcggcgtccgggaacccacagagtcacgtcgtggtggggaggcacgggattcggatccggccgtggccgcacccggaccccgtcgaggtgatgcgggcgcaccggatcatggagcgcgtgcaggaggaacagcgccgctggtacggcgtcaaggagccgaggcaggtgctcgccgtcaccccgacctactcacgcgcgttccaggcgctccacctcaccggcctcctccactcactccgcaacgtgccgtacccgctcacctggatcgtcgtcgaggcaggcggcaccaccaacgccacggcgtcaatgcttgcgcgctctggcctcactttcgttcacatccccttccctgaccgcatgccccacgactgggccgaccgccacgccactgagaaccggatgcgcctccacgccctacgcgtgatccgcgagaggaagatggatggcgtagttgttttcaccgacgacagcaatgttcatagcatggagctgttcgatgaggtgcagaaggtccagtggatgggtgctgtatccgtcggaatccttgcgcatactggcacggcagaccaactacggctcagcgaggaggacaagcagaatatgcctcttccagtccagggccctgcttgcaactcctcagggcatctgattggatggcacacgttcaactcattgcccttctctgggaagacggccacagttgttggtgaagcagcccctgttctgcccaggggtttggagtgggctggttttgtgttgaactcaaggatgctgtggaaggaggctgacggcaagcctgactgggtgaaggatcttgatgctgtgggcgagaatggcgaggagattgagaacccacttactctgttgaatgatccgtcctctgttgagccactgggcaactgtgggaagaaggtcctactgtggtggcttcgtgttgaagcacgggctgatagcaagtttcctgaagggtgggtaattgagccacctttggaagtcgttgtccctgcaaagcgcactccatggcctgaaacaaccaccgagctgccagccgagttattggatgacaagcaagagcaggaggataggcgcttgtcaagagccaacaaatcatctcggccccgaggcaccacgaagcggaagggcgaccctcaaggacaagataactgatgcagaacgtactagccttgtgatgtatatcttacaccctgcaaaaacacagtagcaagcatatcctgttaatctggcggtgtctgtttaatttttcttttcttttctgatgtttttgctcctgtggcgatggtccacgcttgggtatgttatctgtagagggcacatttttaaagtagtggttgtatcttttgtgttgaaatgtacaatgcattgggagctaaaaaaatggtggatgaatactgg

SEQ ID NO: 25910 - DNA, 1314 bp, Zea mays
  Clone ID: LIB3969-003-B3_FLI
ccggttctgttccagcagccccacaccccacgccaccggaccggaaacgcgaagcagccccacactgcccacgcggacacgctctgcaccaccacctgccggccgttcccggctcgccgctgccgttgcgccctcgcgctcacacctccgccagcccaggtccatcgagcggagaaacccatggccccctcgccgatcctcgtccggccgccggcgctggcgaattcaccccttccgcctccccgatgcgtggccgcggtagcagcggcgccggcggttcggacggctccagcggccccattctctaggctccgtaccaagtgtaggttcgccgcatcggatgtgagagaagactactcttccactccgatagatattgtcgctgatgttaagacggagaagattgtggtgttaggaggaagtggattcgttggttctgcgatttgcagagctgctgtatccaaaggcattgaggttgtgagcttcagcaggtcaggaagaccatcttactctgatccctgggttgatcaagtcaattggctgccaggagatgttttctatgcaagatgggatgaagtattggttggggctactgctgttgtgtctacccttggagggtttggcaatgaagaacaaatgaaaaggataaatggtgaagcaaatgtcatagcagtaaatgctgcaaaagaaaatggagtcccaaaattcattttaatctccgtccatgactacaaccttccatcctttcttcttacatcgggttacttcactggcaagagaaaggcagaatctgaagccctttccaaatacccagcctcgggtgtcgtgttgaggccaggcttcatttacggtaaaaggaaagtaaatggcttcgaggtaccactcgacgctgtcggacaaccattggagaagttgctctcctctgtcgaaaacttcaccaagccgttgagctcgctgcctgcctctgacctaatccttgcaccccctgtgagcgtggatgatgttgcctatgctgtaatcaacggagtcatagacgacagcttctttggggtgttcacgattgaacagatcaaggaagccgcgtccaaggtacgagtgtgaacccggggtcttgttccacaatctctgaacgtgtgttgtaggtggaaagttcataaacttagcagtaactcattgatccttgtgttctttatttctcgctgaattttgaccatagtcaaccgttcaaaagtcagtgcagcattcttttttctgctggaatctcttgagaaaatatagtttccaaactagcccttaatgacttaaagagctagc

SEQ ID NO: 25911 - DNA, 761 bp, Zea mays
  Clone ID: LIB3969-003-C10_FLI
ccttcccgtccttttcctttcataaaccccaagccgcgccgcaatagctcgccccctcgttcgccgcctctcctgctcctaccgcagctctccctcaggtttagtgttcgcgcgggagatccgcaacgcggtggcgttcgaggccgcggaccgcttcgagcggcacgagaccttcgccgggtggcggcagcgcatgcaggaaggcgggttccagaacgccggcatcggcgaccgggaggcgttgcaggggcgcatgatcgcgaggatgttcgcgccgggcaactacagcgtgcaggtgcagggcgacggcgaggggctcacgctccggtggatggaccaggccatgtacaccgtgtccgcgtggacgccggtcagcgacgggggcagcacggtgtctgcgtctgtctccaccacagcatcccattctcagcatagctgaatggggggaagacacaaggtgaaagtgaagaagaaaagaacatggtttttcagtggttcttttgctgttactgaaaacttagttcattatacagtctgacaattcttttatacaatcagaagaacaaaaaaagaagcaaaggagtaagaaagatttgtttgtagctttgtttttataggtgataggataaaatattcaattgttagtagttgtaattctttattctttatgtacacttgtcattctttcaccatgtctgtttagcttgtaatctctgttccgagttagaaggaaatggaataaacaagtatggttttcattc

SEQ ID NO: 25912 - DNA, 638 bp, Zea mays
  Clone ID: LIB3969-003-D10_FLI
acaccactccgcgctagctgaggacggtacagcggcacagaggtgcgacgtacgacgacgacgacgcaggcgccacacatggcatcccagctctccgccgccgtgccccggttccacggcctccggggctacgccgcgcccaggtccgcggtggcagcgctgccgtccgtgagggtgggcaggaagaggtcgtcgtcgcagggcatccgctgcgactacatcggctccgccaccaacctgatcatggtgacgacgacgacgctgatgctgttcgcggggcggttcgggctggcgccgtccgcgaaccgcaaggcgacggcggggctgaagctggaggcgcgcgactccggcctgcagacgggtgaccccgccgggttcaccctcgccgacacgctggcctgcggcgccgtcggccacatcctcggcgtcggcatcgtgctcgggctcaagaacaccggcgccctcgaccagatcatcggctagatccctacgtcgccgttgttaagatcagactcagcagcctcgatcgcgccgccggccggcaggtgcaggtggtgactttgtaacgtgtgtgcgtgcgtacgtgtacattgcatccatcttggttccaatggacatatagctcctgttgctcctct

SEQ ID NO: 25913 - DNA, 1176 bp, Zea mays
  Clone ID: LIB3969-003-E4_FLI
ctgttctccgccagaccaaacctgaccaaccccacccactggaccggcccgcgcccgcttggtccagcgccggccctgcctgcagccagccaccgttgtccgttccctcccgcgatccactcctctcgagctctaggggacggaaggaatccggcgggggtggggtgcgagcagggggagggagaagagcagccgcccgccccgcgagggggcaacagctgcccaagaacctgaccggaagagttgtgggagcggcggcggaaagatggggcaggccctgcgcaggctcttcgactccttcttctccaccagggagatgagggttgtgatgcttggtctggatgcagctggtaaaacaacaatactgtacaggcttcacatgggagaggttctttcaacagtccctacagtcggttttaatgtcgagaaggttcagtataagaatgtggcattcactgtgtgggatgtgggtgggcaagaaaaactcaggtcactgtggaagatgtacctgagtaattctgatgcactgatctatgtcgttgattctctggacagagaaaggatcagagacgcgaggcaagagttccagaccattatcaaggaccctttgatggcaaacagcataatcttggtatttgcaaacaaacaggacctgagaggcacgatgagcacggacgaggtcagcgaagggctggggctgcacgacctcaggaacaggatctggcacatacaggggacctgcgcgctccgcggcgagggcctctacgacgggctcgactggcttgcgtccaccctgaagcagctgcaagaatcgggccacgcgacttcggtcgctggcccttccatctgatccagcgcaagtgagctcagtgcctcagccaactgacagcaagcccacaagaatatgctccagcgcgagcgcattcctttggtgggtgtggctgcccgctggtggtggtggagttccttcggtcggtgttgccgtgtaggtatcatatgagccagttgttcatccggcagggactcgcgtacttttttttctctcctgagattgtttgtaaattgttgaacggatgcaatgccggcgatgttgatcttgtgtgctggtggtgcacgtggttgttttgtctacttttttttacaataaaaaagagatcgtctgcggttctggtgatt

SEQ ID NO: 25914 - DNA, 1142 bp, Zea mays
  Clone ID: LIB3969-003-E8_FLI
cctccgtcccaccaaccatgccggcggccatggcggctgcggcggcgcagaggctcctcgcggcgagcacgaaaatcatcggcgttgggcgcaactacatagcccacgccaaggagctcggcaatccggtccccaaggagcccgtcctgttcctgaagccgacctcgtcgtttctccacgctggtgtggccaccgccgccgtcgagatcccggagccgctcgagtcgctacaccacgaggtcgagctcgccgtcgtcatctcccggcgtgggcgcgacgttcccgaggcgtccgccatggactttgttggaggttatgcacttgctttggacatgacagcaagggaccttcagtctgttgctaagtctgcaggccttccatggactttggctaaaggacaagacaccttcaccccaattagtgcagtagttccaaaatcagctgtcactaatcccgatgatctcgagctctggctgaaggtctctcaaatgtgtactgaatttgtttaatgttacctgaattgctagagcatatggtgtacaattgactaccaactgcatccaggtagatgatgaactaaggcagaaaggaccgacaagcgacatgctattcaagattccttttctgataagctatatcagttccatcatgacattaatggagggtgatgtgatactaacaggtactcctgagggtgtgggtcctgtccgagtaggtcagaagattacagctggtataactgacctaattgatgttgagttcgatgttcagaggcgcaatcggtcattttccacgtgacgcaataagcaagaaagtaatggtgaatacaaagtgcagtactcgtcctcgaccttgaatcgcattactggacctggagccattgcagatagctcttgagccttaccttgatttaatttacctgggttttgagagactatctatgaatatgctaactcgttcgtaaagtatctttttgtcccaattttgattgatggagctttaagcttgcttttctgtatgcaataaaaaaacttatcacatttttctttctttctttctttccagcagcgacttgaaacagcttccgagtggggtgcacggccgatctatgtaacgtacgcgcataagaaatggtgtcctac

SEQ ID NO: 25915 - DNA, 1101 bp, Zea mays
  Clone ID: LIB3969-003-F1_FLI
caagtcccaccaagctgtcccccgaccactccgccgcccgctccaatggcggcgccggccagctcctcatgcttccacccacgcgcgaccgccagcccgccgtcttctctcagcgtcggcaccaaggtcttcgtcgggctcagggcgcagaccaagctcggttcgtcggagtcgtcatgcccgaatgtcagcgctgggttccacactgcggtcaaccggagaatctctctcaggttgtccaaaaagaaggcgaccagagcccgcatctcgatgatgcctattggtactccacgtgtgccttaccgaacacctggtgaaggaacctggcaatggcttgacatatggaacgctctgtaccgtgagcggattatcttcattggggacaatatagatgaagaattcagcaaccaagtgttggcaagcatgctctatcttgacagcattgataattccaaaaagataatgctatacattaatggaccaggaggagatcttactccgtgtatggcactatatgataccatgctaagtctaaaaagtcctattggcactcactgcttgggctttgcattcaacctggcaggattcatccttgcagccggtgaaaagggttcacgcactggtatgcctctatgccggatttcactccaatcacctgccggagcagctcgaggacaggctgacgatatagaaaacgaagcaaacgagcttatccgcatcaagaactatctctatggcaagctcgcggggcacacaggccattctgtcgagaagatccatgaggacctgtctagggtgaagcgcttcgacgccgaaggggctctcgagtacgggatcatcgaccgtattgtcaggccgtctaggatcaagaaagagggctccactgctcaaaggagggacatgcggaatctgggacttggctaataatagacgatcgaaatcctgttgtatcagaattttttgtgcaagggatgcgcttattatgggagagcgagcgatgcactgttccaggctctacgccggcgtaggtgttttgttgtgtcagctgtgcttttgctaactgtcagcactactattataatatatttgctgggattgttg

SEQ ID NO: 25916 - DNA, 622 bp, Zea mays
  Clone ID: LIB3969-003-F12_FLI
cttcaatctccccagcaatccctagcagaagccttccatcctcactcgctcgatggcccgcacgaagcagacggcgaggaagtccaccggcggcaaggcgccgaggaagcagctggcgactaaggcggcccgcaagtctgcccctgcgaccggcggagttaagaagccccaccgcttccgccccggcaccgtcgcgctccgggagatccgcaagtaccagaagagcacggagctgctgatccgcaagctgccgttccagcgcctggtgcgggagatcgcgcaggacttcaagaccgacctacgcttccagagctccgctgtctccgcgctgcaggaggcggctgaggcctaccttgtcgggctcttcgaggacaccaacctctgcgccatccacgccaagcgcgtcaccatcatgcccaaggacatccagcttgcccgccgcatccgcggggagagggcctaagcgtcatattctctgtcatcagtgcccgatcagaagatgtagagatgtgctgggttctgtagtttgggttactgtcgaatcatcgagtagttggttgttcactgctgtaacttagttatcatgatgcatatgaaatggcaatgagctctgttatcactt

SEQ ID NO: 25917 - DNA, 999 bp, Zea mays
  Clone ID: LIB3969-003-G4_FLI
aatggatccgcaccagttcgccccctcccagcagtcggcgctgaccatggaatcggcggagagcacggccgccgccgccgcgcgggcgtccaacggcgctgcccgagctgtcgtcgaggacgacgacgaggacgacgacgtccccgaggtggccgcctgcatatcgacgatgctcgaccgcgggggtagcgtggagagccaccgcctcttcctggcgcgccgcaccgcgctggagatgctccgcgaccgcgggtacgccgttccggaggaagagctcgcccgcaccctcccggagttccgcgcctggtgggaatacaggccggagctcgaacgcctcgccttctccactaccctcacctccgacccgtccagcaaggtgaaagttgtgttctgtccacctggacctgtcaaaatcgcagctatccggctgatatataccgaagtcaaagatgagaacttgtccagactgattctgatactgcagggcaaaataatgtctacaaccagagaatccatcaaggagatctttcgatttaaagttgacacattccagatcacggaattactggtgaacatcactaagcatgtcctcaagcccaagcatgaagtgttgactgcagaggggaaagctaagctcctgaaggagtacaatgtggtggattcacagttgcctcgcatgctggagaatgatgctgttgctcgctattatgggctaggcaagggaactgttgttaaggttatatacgacagcgagcttaccgggaaccacgtgacgtaccgatgcattacctgaggggcccatgtgtttcggtggatgaagtctcgtaagcagtctgtaaaaaattacctctaagaggggcaggtgacactgttctgctaggcttttgtaagcacccaattgtgcaggatgaagcttgctgtaagctattggtaaaatcatcttgcgccattgccgtaccttaagtgcttggtgttaatcttggaaacagtgagacaact

SEQ ID NO: 25918 - DNA, 787 bp, Zea mays
  Clone ID: LIB3969-003-G6_FLI
tccactcccactccaccggccccacctccgcgaggggcgacccgagaacaccaccacgcccgccatgtggcgccgcctccaaaccctagccccctcgctccgccgcgccgccgcatcgtcgtccccggcctccgcccgcgccgtgcccttgtccacggtgccggtggccgcgttccggcgcacttcgaccctcctctcctcccggcgacaagccggcgcccagcaaggtcgaggatgtcatgccgatcgccacggggctggagcgcgaggagctcgaggcggagctccaggggaagaagcggtttgacatggatcctgccgtcggccccttcggtactaagccgtgattgaatcctactataacaagagaatagttggctgccctggtgccgaaggagaggatgaacacgatgtcgtctggttttggttggaaaaggataaaccgcatgagtgcctagtctgctcacggtactttgtgctcaaggtcattggtgatgggggtgatccagatggccacgatgacgaggatgatcatcactgaggccttgtgtcgataatgataataagaactttgtgaaacatggttttgtcctatctttgcagcatcagactgccctatagagtattgtaattgataagtgtttgaccatgaaccaggtcgggtggtgttttacacctacgaattttgttcagatcttttcgaccatacggttgcttctgtttggaatatagatttttttttctggagtgcaacatcaaataaaggatgagtgcatcggtttcactc

SEQ ID NO: 25919 - DNA, 1277 bp, Zea mays
  Clone ID: LIB3969-003-H6_FLI
aaagcagagcaggcaacggcacagcccagcacaggcagagagagagagagagagaagcgcggagccaagaagcggagcaacaacagcaggccgaggaagagaagagaaggccaggaggcagcagccaggaggcagcagccaggagcaagatgctgcgcgggggctcgagcgtgctggggatcatcaacttcatcaccttcctgatctcgatcccgatcctgggcggcggcatctggctggcgtcgcgggccaactccaccgactgcatccgcttcctgcagtggcccatcatcatcgtggggctcgtcctcatggtcatctccctcatgggcttcgccggcgcctgctaccgccagacctggctgctccgcctctacctcttcgccatgttcttcgtcgtcctcgcgcttctcttcttcatcgtcttcgccttcgccgtcaccgaccgcggcgacggccaggtcgtcatgaaccgccgcttccccgagtaccagctctccgactacggaggctggctccgcgaccgcgtcgccgacccacagtactggaccaccatcagcgcctgcctccgcgacggccacgcctgcgccggcatgaggcgcctcgcgcgggaccccaacactggcatgctcgtgccggagacgcccaccatgttctacggccgcaacctctccccgatccagtctggatgctgcaagccaccgacgtcatgtgcgttcagctacatgaacgagacgtactggacacaaaaccccagcgtcccgacggtgaccaacgacccagactgcaaaaggtggagcaacgaccagcagacgctgtgcttccagtgcgactcgtgcaaggctggcgtcctcgcgggcatcaagaagagctggcgcaaggtggccgtcctgaacatcgtggtgctgattatccttgtgatcgtctacgtcgcgggctgcgctgcgttccgcaacgcgaagaggatcgacaacggcgaggcgatcggcatggcgcggatgaccaagtcccatccgagcaggttccagttctaggccgctgctctgctgccactgcgggttcgaaagctcttgccttgtacaaatggccagtggtgtggtcctaaggcttgggcttcgctatgtcttgctgaattgcggattctactgcatttggtggtggaaatggaaagtccagtgtagttcggggttgtgtttgtttgagtgtttagaataggcctattatgtggttggctggggtataatatgagatctgcaagaaacaagagaagttgaatc

SEQ ID NO: 25920 - DNA, 1041 bp, Zea mays
  Clone ID: LIB3969-004-A7_FLI
tcccatcgtgtgtgagcgcgtctgctggtctgccaagaggaggaaaggaaggaggagcaagtagagatggctcgccctgcgcggtccatgctctccgccagcggctgcatcttcctgaggagcaagcctcaggcggcatcccaagtgcgagggggcatcatcggcggtggccgcagcagcaggccgttcctgctcacctgcaacgcttcctcttctccgtccccttcctcgccggcgccggcgcaggaagaccccgactgcaacgaggaggagtgcgccccggagaaggaggtaccgctctcctcctcttcccttcgccagctgtcttggaactctgcgtgcctcgttgcggcagcagtagtagatagatgcttacgccggcacagcagagagcggaattgaagcagcaacgagaacgagatgccattgccatttctgtggtgcgcatgcatgcaggtcgggagcctgagcgccgagtggctggccgaggagaggacccaggtcgtcggcactttccctcccaagaagaaagggtggaccggcttagtggagaaggacaccgccggccagaccaacatctactccgtcgagccgatggtgtacgtggccgagagtgccatcagctccggcacggcgggtacgtcggcggagggcgccgagaacacggccgccatcgccgcggggctcgtcctcatcaccgtagccgcggcctcgtccatcctcatccaggtgaacaagagccaggtgccgcaggtgccggaagccgcctacagcggcccgccgctcagctattacgtcaccaagttccagccggcggtggctgcgccggcgcagaccctcgaggcccccgcccccgacgaggcacaagacggcgccgccgccaccgtcgaggctccggaggtaccggcaccgcagctgtcgtcgtgagctgattcggttttgtggcatgcagctttatactacggatgagccagtagcgcatgatgatggaagatatgaatccatgatacaagcatttcggaattgtattaaagtttgtat

SEQ ID NO: 25921 - DNA, 1442 bp, Zea mays
  Clone ID: LIB3969-004-B11_FLI
ttgccccaaaagtaaatgtcataataggagaaaacaactgtcttgcatcaccacgagcgtgggctctctcctttctcgacgacgactgggccaccgtcgctgccgcctgccgcctgccgccctgcgccaggtgccaagcagccaggtgttcttggggcccttcgccggcgacgagcaccaccagctgaaagatggcgaggataccgtctctgaagagcctcaatgcgtttccacatgcggaagagcacttgttgaagaagacttactctggcgctgttgtgacaatttttgggctacttataatgattacactgtttgtgcatgagctgcagttttatcttaccacctacacggtgcatcagatgtctgtagatctgaaacgaggagaaactctgccaatccatatcaatatgtcatttccttctttgccatgtgaagtattgagtgtggatgcaattgacatgtctgggaaacatgaagttgatttgcatacaaatatttggaagcttcgcttggataagtatggccatatcatcggtacagagtacttgtctgacctagttgaaaaggggcatgggacacatcatgatcatgaccatgatcatgaccatcacgatgaacaaaagaagcatgaacaaaccttcaacgaagaagcagaaaaaatgatcaagagtgtgaaacaagcactcggaaatggtgaaggctgccgggtctatgggatgttggatgtgcagagggtggctggtaacttccatatctcagtgcatggtttgaacatttttgttgctgaaaagatttttgaagggtcaaaccatgtgaacgtcagtcatgttatccacgagctgtcatttggcccaaagtatccaggaattcataacccactggatgaaacttcaaggatacttcatgacacaagtggaaccttcaaatactatattaaggttgttccgactgagtacaaatatctgtcaaagaaagtattgccaacaaatcagttttctgtcactgagtattttcttcccatccgtccaactgacagggcctggccagcggtttacttcctgtatgatctgtcaccaattacagtcaccatcaaagaggaaagaaggaacttccttcattttgtaactcgtctatgtgcagttcttggtggcacatttgccatgacaggaatgcttgaccggtggatgtaccagcttatcaagacagtcaccaactcaaagaccagaagtgtactgcggtaattgcacaagtcatgatggatggaaaaccgttggtagtgtggtaccgtggctaatgaagcctttgcccgaagctaactgatcaagccatgttgatttttgcatgttttattttcttcttacatggttaacttataatacgtcgttgtttttttttccatcaactatgttagattaacacagtccacggactacatggtt

SEQ ID NO: 25922 - DNA, 1097 bp, Zea mays
  Clone ID: LIB3969-004-F1_FLI
accgggcacaccccccgagctcagcttagctccactccagctccaatcacagtcgtgaccagagcgcgagagctagctagagggccgtgaaaatgccgatcaataggatcgccctggggagccaccaggaggtgtaccacccgggcgccctcaaggcggcgttcgctgagttcatctccaccctcatcttcgtcttcgccggccagggctccggcatggccttcagcaagctgaccggcggcggcccgacgaccccggcgggcctgatcgcggcggcggtggcgcacgcgttcgcgctgttcgtggcggtgtcggtgggcgcgaacatctccggcgggcacgtgaacccggccgtgaccttcagcgccttcgtgggcggcaacatcaccctgttccgagggctcctgtactgggtggcgcagctgctggggtccaccgtggcgtgcttcctgctccgcttctcgacgggcgggcaggccacgggcaccttcgggctgacgggcgtgtcggtgtgggaggcgctggtgctggagatcgtgatgaccttcgggctggtgtacacggtgtacgcgacggcggtggacccgaagaagggcagcctgggcaccatcgcccccattgccatcggcttcatcgtgggggccaacatcctggtgggcggcgccttcgacggcgcgtccatgaaccccgccgtgtccttcggccccgccctcgtcagctgggagtggggctaccagtgggtgtactgggtcggccccctcatcggcggcggcctcgccggcgtcatctacgagctgctcttcatctcccacacccacgagcagctcccctccaccgactactaaaagccgaagccgaccgacccaggggtgcgcagcgcagcgcagctagcatccagcgctctctccccgctcgccgccgtttagtttctctcgtgcacgtgcatgcatcgtagactgtctcaggccgccgctgcgccggcgccgctcgcatcgtttgcttccttggaccagcagtcgtcgccgtcaggctgaactgcttgtaaccgtgaattccggacccgtttgcttctgtaagatttgtgcatttgcctgagt

SEQ ID NO: 25923 - DNA, 901 bp, Zea mays
  Clone ID: LIB3969-004-G11_FLI
catgcgtcccctccccgccgcggccatggccaccgcgacgctgcccctccgcctcctcccctccaaaacgctgactctctccactctcccctccctgcgccgctccctctccgtcgccgctttggagccccggcgctggcgcctccgagccgccgccgaggaggcgcctggggccgtggaggttgagttcgtggagcccgagacggaggctgaggagaaacccgcggtaccggagcccatcgaggctcagctggccgccgcgggggccgggaaggacgcggacatcttcgctgttgtcatgattggttcaagacagtacatagtgatgccgggcaggtatatatacacacagagactgaaaggtgccaatgtcaatgatcagatcatattaaacaaggtgctactggtgtcaactagagaaaaagcttacattgggatgccagtggtgaccaatgctgctgttcacgcagtggttgaagaacagggacgggatgataaagttatagtgttcaagtacaagaagaagaagaagtaccagaggaaacttggtcacagacagccaaacacaaggttaagaatcacaggcataagtggatacgaagagtaccctgctgacccaatacttgaccctgctgcagctttaaattaaactgtaagttatgtagttacaaaacggctggtagtagagtagcatgctagttttcttgtttctttctttttttacttctctgtcttgaaaaaggaacacttttcatcacaattttccttgtttctgcgtgttccaaatgctgccagtcaaccaactgtaccatgagctatcttgttcttgttcttttttcacatcgtgtatgctactagccagttgtattgcacgaccggtcctaaagaagaggtttctttc

SEQ ID NO: 25924 - DNA, 1880 bp, Zea mays
  Clone ID: LIB3969-004-H7_FLI
cacaacccccacgacgcaggagcgctggctccgggcgttcgggtactcggagacggcgttgggagaggagaaccgcaccgcggcgcagacatgggcgagttctgcccctccccgcagggggactccgcgctggcggcgccgcccttgacgctctcctccccgtccccagcaacggcggttaggccgagctacgggagctgcgaccgccgctacgtgaagctggtcttcgacaacctccacgggagcatctccgtagacccgttggccctgcagtttgttgataccgaggagtttcagaggttgcgggacttgaaacaacttggtcttacatatctcgtctatcctggagcggttcacacacgcttcgaacactcattaggtgtatattcgttggctggaaaggctataaataatcttaagacatatcagggagaagaacttggaattgatcatgttgacatgcagactgtaaagcttgcaggtctcttgcatgatatcggacatggacccttcagtcatttgtttgagcatgagtttcttcctcgagttgatcctggctcatcctggtctcatgaagatatgtcagtgctccttttggacagtattgttgacaaacatgcaatagatattgaaaatggttatctcaaaatggtcaaggagatgataactgccagcgctaagcctaccagcacagaaagtgcaaacgagaagcattttctttatgacattgttgctaatggtcgtaatggtatagatgttgacaagtttgactacgttggccgtgactgcagagcatgtggtcttggctgtaatttccagtattggaggttgttggaaggcatgcgagtgatgggtgatgaaatttgctaccctgccaaagactacttgagcatccataaattgttttcaacacgtgctgatctgcaccgcacagtctacacccatgcgaaagtaaaggctgctgagctcatgcttgtcgatgcactcattgaggctaatgactacttggggatatcattgcatgcacacgacccagaagaattttggaagttggatgacacaatcatcaaaaccattgagactgctcccaacaatgaactgaaaaaagcaaaagaaatcattcaacgtattcgccgaagagaactttacaagttttgcaaccagtattctgttccaaaggacaaactggggcatttcaaaagtattactgcacaggacatagtttgttcgcagaaatcttctgaggtgctgctgaaggaagaggatgttgcagtaagcaatgttaagatagatcttactcgtggaaaagataacccccttgaaagcatcaagttctttaaggattttgggtgcgacgagaagttccccatcacagatgatagggttagccacttgctacctgcatacaacgaggatagaattgtgagggtctatgccaagaagcctgagttggttgatgtggtgtcagaagcctttgagaatctccagatgagaatgtatggtgagaaaactcaagtgcatgagacgcccaagagaaagaggattagatccaactaggcagttagattttgtctaatcgcactttagataacatacaaatacaacacatgaaaatagcttcacaaacaagaagctatatagataacaggtttcaaatggtagtctgaactggtaaggtgtaggtattttgtgtacaggagaaaatacaaacaacattgcatgaagtctaaaaactcacgttgacgtacgagatgctgcatgtgcgtagattggatagctagtcaaatactttatgatgtggatggattttaattactttatgatgtgtctggatttgtaagtacttctcattttaatcttaatttatatggatctaagag

SEQ ID NO: 25925 - DNA, 1416 bp, Zea mays
  Clone ID: LIB3969-005-A11_FLI
ccctcgtggtcgttgaaacctattcgcaggaaaaaaaaagaaaaaaacattcgtgtcctccccggctccaggctgcaagtctgcaaccccccatccagccgcgaagtctcccaccaccgcgccgatccgggggcggggggcgggggcctcgtgctctgctctctactccacccactcgcggcctcacccgtggatctacgcggtggccggcgggcgcgatggcggaggcggagcgggagcagcgtccgcttccggaggtggagcaatctgtcacgtccataccggaagatcatgaagcaacatgttggggctgtgggcttcggcttgtatttgcgagctactcacctatctacaagtgtggctggtgtggagccgtcacgcagagcaacagtcagactgcaaggaaacctgatagtatatggttttcccactggaggcgcctacgggacagactctttgtggctgtgctcgtcctcttcatgctcttcgttatatgtggtggggtccgggcagtatatcctgttgttttctcagtaagcaagttctgtggcgtatttcactgcacggtagcagctgtgttggctgtgtgcaccgtcacaagctattgcttggcctctttgaaatgtgcaggcgcgccaacagacataaggtggggcagctatcccgtggttgggaaaggggatcttgagaactataccttttgtacatactgtaacaaaccaaagccccccagagcacatcactgccggtcgtgtaaaatgtgcgtggtggacatggatcatcattgcccatttattggcaactgcgtgggagcatcaaaccatcaagtgtttgtggtttttctcatttctgtggttatcagttgctcttatgtcgctgggatgaccatatacgcgagctaccagatatggccctccattgaattcccagacctagcatcatcatctcgtcactcgatgagttcttggaaaacggtgctggagatgatcactacggttgcaggctccgccttcttcttgtcagccaggggtctagtcctggtgtatctggcgtttgctagctcgtcagtgaatgctggtatagctgtgttgctgtgccagcagctgagctatatctaccaagggaacacgtacctcaaccgtctgagctcagcaccgaatgccttgcagcatggagagaggggtttgcagaacatcgttcggtttttcgggtgcccgtatccagtctccagagttgtgttgcgactgcggtactccaacgctgccaagttgcaggatgattcagggtcgaaacttctttagagaggtatggatcaatagagagtcaaatcctctgtttttttatttatgttccttcttataaccagtcatgatgtaacagataatttcgtttacattacatgtcggtttcagtgct

SEQ ID NO: 25926 - DNA, 1665 bp, Zea mays
  Clone ID: LIB3969-005-B2_FLI
ccggccctgccgcgctgttcggcccgtcctcctcggtccttccatccactcacgcgaagcttccagcagaggcgaccgccgcatcgagtctcggctgccgaggagtcgagtcatggaagtggtggcgtcggcgccggggaaggtgctcatcgcgggaggatacctcgtgctggagcgccccaacgccggcctagttctcagcaccaccgcccgcttctacgccgtcgtccgccccctccgcgacagcctcccagccgactcctggacctgggcatggacggacgtcaaagtgacttcccctcaactctcgcgggtggccacatataaattgtccctaaataaaacgacgctgcaattgacgtcttcaagggaatcgacaaacccttttgtggagcaggccatacaattctccgtagcagctgctaaagcgaccattattgataaggagaggaaggatgtagtagataagttactgctgcaagattggagcacgtggtctccctcttactccggaggacaatcttctggcgacaatgcaagtgaacgagaacttgacttggttcacgctattgcccaaagtgcacattgtttagcacaagggaaaattggcagtggttttgatgttagtgctgctgtctatgggagtcaacgctatgtaaggttttctccagaaatactctcctcggctcaggctataggtgggactgtcttgccagatgtagtatcagatgttctaacacaaaggtgggatcatgagaataaacagttttcattacctcctctgatgacccttctccttggggaacctgggaccggaggatcatctactccatcaatggttggatctgtgaaacggtggctgaagtctgaccctgagaaatccagagatacatggagtaaactggccattgccaattcaacgctggagaaccaactgaggatcttaaaaggactttctgaaaatcaccatgaagcatatgagtccatggtgaggtcctgtagtcgtctcacatatgggaagtgggcagaggtggctactaaccaacatcaagaattaattataagatcattgttggctgcaaggaatgcttgccttgagataaggcttcacatgcgagagatgggcatagcagctggtgttccaattgagccagattcacaaacacggctactagatgccactatgaatatggagggtgttttactggctggagttccgggagctggtggcttcgatgcagtgttctcagtggttttgggggatgcaagtaatgctgtagcacatgcttggagctctgctggcgttctgccacttcttgttcgagaagactgccgtggtgtttcattggaagacgctgacccgagaacaagagaggtgtcagcagctgtatggtccatccaaattaactgattctactgttaatagttctgtgtttatgcatggtgtaccaataccattattcacgctgttcggattgctgcaatccatagagacaacatggtataaacagtagaagcgaacagtctcataagtacaaaattgtgccgaatgctaggaaatgctaggaagtacgaggtacgtggttaaataagtgctgcacttgcagcaagatagcacatgagcaaattagtgcagaaaataagaaattatatggatttccatgg

SEQ ID NO: 25927 - DNA, 827 bp, Zea mays
  Clone ID: LIB3969-005-B7_FLI
tgagcagtcgaacatcgtgaccgcctctgctcagcccagatctccgatggccaccgcacccgccgccccgccgccggcctccgcggacgacgagatcatctacgagtccatgccctgcatccgcgtctacaaggaccgcgtggagcgctacctcggaaccgagttcgtcgccgcctcgacgaacgactccaccggcgttgcctccagggacgtcgtcatctcccccaacgtctccgcgcgcctctacctcccgcgcctggacgacgggaacgccaagctccccatcttcgtctactaccacggcggcggcttctgcatcggctccgccttcaaccccatcttccacgactacttcaactgcctcgtggccctcgccgacatcctcgtcgtctccgtcgagtaccgcctcgccccggagcaccccgtccccgccgcctacgctgactcctgggaagcgctcgcctgggtcgtctcccacctcggccccgctggcgacggcgacggcggccgggacccgtggatcgcgggccacgccgacttctcccgcctcttcctgggcggcgagagcgcgggctccaacatcgcgcaccacatggcgatgcgcgctgccgcggaggggctggcccacggcgctcggatccggggactcgtcatgatccacccctacttcctgggcacggacaaggtgccctccgacgacctcagcccggaggtgcgcgagagcctggggtccctgtggcgcttcatgtgcccgaccaccacgggggaggacgacccgctcatcaaccctttcgttgacggcgccccgccgctggcgtccctgccgt

SEQ ID NO: 25928 - DNA, 996 bp, Zea mays
  Clone ID: LIB3969-005-D8_FLI
aaaagaaacagaaatccggctcgcacctcgcacgcaccgacgcacgagaccgaccaccttccggaccccaccactcccccgcgcgcgccgtgcgatcaccgccggcccccgccctcaccctggccgccttgaggaaaagcaaggccaacgccttctcctcctcctcctctccaccgaggtcgcgccgcgcgcttgccgtcacgatggccgcgtcgctgctcgtgctcgccgtggcgttcctggttggcgctggccacggcggcatcgatgggggtgcagcagctcacgtggaggtagagggctctgaggtgacctacgggagtgtgattaagctgttgcacgagaagacaaagcaccgtctgcactcacatgatgtgccgtacggctcaggcagcggtcagcagtctgtcaccggctttcctgaaggcgatgactcaaatagctactggatcataaagcctactccagattcatcgtctaagcaaggtgattccattgaaactggtggcatcatcaagttgcaacacatgaagactcggaggtggttgcacagtcacctgcacgcttcaccgttatctggtaaccttgaggttagctgttttggtggggatgaattgtcagatactggtgactattggaggctagaaattgaaggaagtggaaaagtatggaaaagagaccaaaaggtacgacttagacatgttgacacgggaggttatctgcatagtcacagcaagaagtacaaccgccttggtggtggtcagcaagaggtctgcggtgtccgagagaagcgagctgagaacatttggttggcagcagagggtgtttatctcccggttaacggaagcaagtgaaaaagcactttcagtatttaccagttttaatgttaattagcataggatcagatattttactcgctttcattcgttcttgtttttcttaagataaatgaacatgggacatgacccctagtgatatgaaatttgaatgttgggc

SEQ ID NO: 25929 - DNA, 1911 bp, Zea mays
  Clone ID: LIB3969-005-E7_FLI
tctggggctgcagggcggacaagtccagcacgggcggctgggcgtcggcggcgctcgccgttgggatcgagctgtgcgagcgcctctccaccatgggcatcgccgtcaacctggtcacgtacctcactgccaccatgcacctgcctagcgccgcagctgccaacgtggtcaccgacttcatgggcacctctttcctcctctgcctacttggtggattccttgccgactccttcctcggacgatacctcaccatcgccatcttcgccgccgtccaagccagcggcacggggctcctcgcagtgtctacagaggtgagccagctgaggccgccgccgtgcggtcccggcgcggctgagccgtgcgagcaggccacggggctccagatgggcgtgctgtacgtgtgcctctacctcatcgcgctcggcactggcgggctcaagtccagcgtctcgggcttcggcaccgaccagttcgacgagcgcgacgcacgcgagcgcgccgccatgggccttttcttcgaccgcttcttcttcttcgtcaccttcggcacgctcctcgccgtcaccgtcctcgtctacgtccaggaccacgtcggccggagctgtgcctatggcatctgcgccggcgccatgctcgtcgcggtcgccgtcttcctatcaggcaccaggcggtaccgctacaagcgcagctccgggagccccatcgtgcacatcctccaggtcctagttgccgccacccgaaaacggaacatcgtcatgcagccactcaccgccgccgcgctctacgaggaccaccctgagcacgcgcgtatcccccacaccgcccagttcccgtgcctggacggggcggcggtgatggctggcgacgacgacaacgaggtgggccacgacgggcggccgacgatgaacccgtggaagctgcgctccgtgtcccgcgtggaggaggtcaagatggtagcccggctgatgccggtgtgggcgacgaccatcctgttctggaccatgtacgcgcagatgatcaccttctccgtggagcaggcgacgaccatggaccggcgcatggccgggttcgagatcccagccgcctcgcttaccgtcttcttcgttggcgctatcatgctcactctcgccttctacgaccgcgtctttgtcccgctctgccggagcctcatgaccggccggcagggattgactaacctggagaagatcggcatcggcctggtcctctccacattcggcatggctgctgcggccatctgcgagaaaaagcgcctcgccgtcgctgccacgagtgtcgccgtagggcatgggtcgctgcccatcagcgtgttcatgctgacgccgcagttcctgctggtgggctccggcgaggctttcatctacacggggcagctggacttcttcatcatgcggtcgcccaagagcataaagaccatgagcacgggcctcttcctcaccacgctctcgctcggcttcttcctcagcagtgcgctcgtctcgctcgtcaagagctgcacgcggtggctcggcgacaccatcaaccacagccgcctcgactacttctactggctgctggccgtgctcggcgttgtcaatctcgtcgcctacatcgtctgtgccatgtgggccgcagcaccggccagcagtcaggcggagcagccgcagcacgcgatggccgcggacgagaaatgctagcaagatctatcaactaccgatcgacctcagctgctgtgctgcacccatcgcttaataactatcagaggcacacctatacgcttaccaatttagaggattttatagttctgatgcgtggatgcagtgacgacatgatatccctacatactaaaacaagttctcctctggttattgaaaaagatgaaaaaaagttaatatgtatttttcttgtctaatc

SEQ ID NO: 25930 - DNA, 613 bp, Zea mays
  Clone ID: LIB3969-005-H4_FLI
cggatatgtttcttatctagcctgcaggtccataccattgtcctcctctctctctcactcaagtcgttgcacgccacaccatacacaaactgcagagggaggagcatggcagggctgcagagatcgtcacagacattcaggaggtccggctcatcaggcttggtctgggacgagaggctcacgtcccaggacgacgaccagagcgggccagaggacgcggacgcagccacggatttaaaggagctgaggcactcccgcagcgttggctccgttgggctgcagccgcagccgcagccgcagccgcagcgccggcgcagcgacgacagcggccagggcttccgtactcggcgtgtggccccagccctggacccgccttcgcccaaggttcctggctgcatcttctgcggaattttcaggaaggcgggagcatcagagccaaaatctaaacccagaaggtactaactaagttgttttaccgtgtattggggagctaggatcagagaccgtcagttttccttgagcccgcagaagttcgtgtttttcgtgtatggaatggtagatgagatgtatatgtattgttgtaagtttggagtggacaaagcttttgtgtttc

SEQ ID NO: 25931 - DNA, 1715 bp, Zea mays
  Clone ID: LIB3969-005-H7_FLI
aaaaatcggaatctctgaaaaatcctccgtaccatgaagctccggttgcgatctatgcaggcgcgcggcggctccgccgccgtggagacccaccgcgtggacctgccgcccacggccactctggccgacgtgaagaccctcctcgcgtcgaagctctctgcggcgcaacccgtccccgccgagtccgtccgcctctccctcaaccgtagcgaggagctcgtctcgccggaccctgccgctacgctcccgtccctcggcctcgcgtccggtgatctcgtatttttcaccctatcccccctcacggccctagcgccgccggctcaggccctgccacggaaccctagcccgagctctggcgctgcagcgtcgatcgctgaggctgccgaccgcgggaagggttcgaagcaatctggtactggagatttctcttcctcgtcactggcgcaggctgtggttgtgagccctagctttccggtcgcttccggtacgcgggatgtggtgatggaggaggaggccgtcgatgccacaaagggctggtcgagttttgtgcttagggatctcaagagggagatggacaacgtcggggccgcggagggaaccgccgcaggtcgcctggttgcggccttgcatgcagctctgcttgatgccggttttctcaccgctaaactgacgggctctcacctttcgctgcctcagggctggccgtcaggtgctttgaagccattgaccatcaagtatactataccagagctttcatcaatggtatctgtgactgaggaagggaaggtggtggtgctgaactactccttgatggccaatttcgtgatggtttatgggtatgttcctggggcacagtctgaggtttgccggttgtgcttggagttgccggggctggagcctctactttatctggatggcgatcagctgaatggagtgcatgagaagggagttcatgatctgtggagagtgctgaaggatgagatttgcctgccactgatgatatcattgtgccaactgaacggtctgcgcttgccgccttgcttgatggctttgcctgctgatctcaagactaaggtattggggtttttacctggggttgatcttgcaaaggttgagtgcacatgcaaggaaatgatgaatcttgcatcagatgatagtatctggaagaagcttgtatccaagtttgaaaattatggcgagggctctaggctggcaggcaagaatgcaaaggccatatttgtagaagcttggcaggccaataagagacggcagaagaggcccaatccaaccttttggaactatggctggggaaacagtccttatagccgcccacttaggctgccattgattggtggggactcggacagacttccttttattgggaatcatggttctgttgggcgccactttggaaatcaacgaaggaatatctcaccgaactgcattcttgatggtcaccgtcataacttcctttgaagccatgtcaatgagttttactcgtatgttaagagtgttttataaggacttcaatggtgcatatacggttagaccgccttgttcatatcgtcaagtcgcacacttatgcttgtgcacagcactcttatgatcttatcctaatatatccccttagtatcttagatcgtatctttactatctttttttggtaccaaatgtaatccagtgtcctagtaataaagtacccttgttctattctc

SEQ ID NO: 25932 - DNA, 651 bp, Zea mays
  Clone ID: LIB3969-006-B9_FLI
cctctctcccctcgactgttgggtgtggtggatttcctccgctcccgccgaacggtcgatcttttgcatggcagcagcggcggctagctccaaggggcgggcgatcgctgggagcttcgtcagccgcgtcctggccggcaaggccgcctccccgaggagggccgtgcacgcctcgtcgtacgacaagaacccggaggagcaggtgcgcccggcgttcgtgccggacgatgtgatcggccgcggcgcggggagccccgacaagtactggagcccccaccccaagaccggcgtgttcggcccggcggcggtggaccccaaccagctgggcgtcgccgctgacgctgcagcagcaggaggcacggttctggaccagaaggtgtggttccgcccgctcgaggacgtcgagaagccgccccccgtcgcctgaaccgcgccacgcccacgcgacgcgacgctgccagcccacactgctgatacaagggcggcggccgggagggagagtcctggcaacgtcatgctcgtgcctgtaataagaacaagcaggagatgtgtgtgcctgtgatgtaccggtgtcgttatcagcgttatacaagtacttgcggttcatatgatcgataaccactagaacatgagtgtgcagtacgttcaaac

SEQ ID NO: 25933 - DNA, 900 bp, Zea mays
  Clone ID: LIB3969-006-F8_FLI
aaaaacaaacacactcgaaggcagcgaagcccgagccttcccttccctccaatcgatcacccgcttcgatccgctagctagctagcagcgcgatggcttccctcaccgtgtccacgaagaccgcggcggccggcggcaacaagcagcgcgagggcgcggaggtcatcacgggcgcggaggcctgcttcgcgcactccaagcagatgctccaggcgctgggcttcccgggcggcgtgatgccgctgcgggggctggaggagtgcggctgggtgcgcgagaccgggttcgtgtggatgcggcagaaggccccctacgagcactacttccgcggcacgggcacgcgggtgcgctacgacgccgaggtcaccgcgtacgtggaggacggccggatgaagcgcatgaccggggtgcgcagcaagcaggtcatgctctgggtgcccatcgtcgagatgagcctcgacggggagaagcgcgacaagatctacttcaagtccaacgtcgggatcggccactcgttccccgcctccgccttcgctgacgaggacgagcaagcggaggaggaggagaagaagaagaagaatgagaacaaggaggaggagaacggcgacaagccagccgccgccgccgatgccgccggcaagtgagacggtgacgcgagcgcgcgcgtgttgtcgtcgtgccgggtactgtgcgcggttgcacagggcaccgttgcgcgacgcatctcgcgcgtaaccatgcgtgaagatgcacgtatctatcgtctttcattgtgacttttgtgttgcttgtcctttttcctatttttttttctttcaaaaaaaatgtattattgcctgtatctatggatcgttgcatatttaccgcgtttgatacacacgtgaataatgtttgccatgc

SEQ ID NO: 25934 - DNA, 1217 bp, Zea mays
  Clone ID: LIB3969-007-B8_FLI
cccagatccggcaccgcccgctgctcgaacccgcaccccacgcccgcaggccgggaccggtgggcgcgcgccgggcagtaggagggagaggaagggcggcatggcagcgccgccggcgagggcccgggccgactacgactaccttatcaagcttcttctcattggggatagcggtgttggcaagagttgcctcctgttgcggttctctgatggttccttcactacaagctttattaccacaattggtattgactttaagatacggacaatagaattggatggtaagcgtataaagctacagatttgggatacagcgggccaagaacgcttccgtactattaccactgcgtactaccgtggagctatgggtatcttgctggtttatgatgtcaccgatgaatcttctttcaacaacatccgaaactggattcggaacattgagcaacatgcctctgataatgtcaacaaaattttggtgggcaacaaggccgatatggacgaaagcaagagggccgtacctactgcgaaaggacaagcacttgctgatgagtatgggatcaagttttttgaaacgagtgccaagacaaacctgaacgtggagcaagtgttcttctccatcgcacgtgacatcaagcagaggcttgcagagactgattcaaagccagaggacaaggcaatcaaaattaacaagccagaccagggttccgaggcaccagctgcccagcgatctgcatgctgcggttcataagcagacgcacgatagccataatcattggttatttgacactatttatttcctgcttggcttttataggaagaatttgaggaagccacttatgatatactgatgatgtggttgtactcttgtttgcttccactcttcgaagcaaacacctcttgctgttgacgtagctattgcactctggacatccgttggaacaacctctctcctccctacagactacagtgtgtaatggacgaattccatgtcgttgggtttgcattatcgatcaatgcatggattaacgtatcgcccttgtgtgaattgttgtgtttttttttcatgttgctgttcctttagattgaatttgttgggaaggaaaatatattttccttttcttatgtatatcaggtgtatttttatcttttgtacctggaatgtatgtatccacggaaagcgttaatcttcaatttagaaaagaagaaaacttatctgg

SEQ ID NO: 25935 - DNA, 1474 bp, Zea mays
  Clone ID: LIB3969-007-D7_FLI
ctcgcctctcctctcctctcctctcctctcctcttcttccggccctccctctccgcgtgccattccaacgcattaccggtatttttagccgccggaggagacgggtagcgtagccacactagcgagagagagagagagagagagagagggagggggagggggaggggggaaaccatagctcctggccgttccgcgctcctcacgggcggcctccgtccgttctgcctgcccatccaccgcggcgccggccggccgtccgtctcccgtccacatccctcctcctctcctgcaaggttcctgtgccgtatgaggggtcggagtcggagtcggagaagatgatgggcgggttcctctccagggtcctcctgttggcttttggctatgcctatcctgcctacgaatgctacaagactgttgaactgaacaaaccagagattgcgcagctcatattttggtgtcagtattggattttagttgccttgttgacagttttggagagattcggagatttcacaatatcatggttaccgttttactcggaagcaaagctgatgttctttgtatacttgtggtaccctaagacaaagggaactacgtatgtttatggaactttctttaaaccatatatttctcagcatgagaatgaaatcgaccggaatctccttgagctgagagctcgagccaccgacacggttgtcctttattttcagaaggctgcttcggcaggacaaagtactttctttgacgttttaaaatatgttgctgcccagtcaccttctcagaaatccaggcaacgccttcatcgggaatcacagcagccgccacaacaacagcaaccacaagtgcaggtgcagcaggcgcaaccacaaaaacaagcggcacctgttatgcgcagagcatcatctattgctgctcggcaagcagcaatggcacaacaatctcaggagactaaacccatttcatcttcgcccaagatcaagcgtcaaacatcagcgagatctggttcagtggcatccacaaagcctccggtagctgcatccgcgctaaaacctggtggtagcccaaagaaaggcgaggtcaaacctgctgccgacccagttcaaactccaaccacaggtgccgattcaccgaaacccgagcctagcgccccatcactccctggagccgaaggggtggataagatggccatcgacgaggccagtggtgacgccctagagggtgcagaagagcttgaccctgcgctcgaagaggagacgccgatggaggagacgatacgtgtgacgcgcgccaagctaaggaggcgcacggccaccgaagatcctgctgggaattagctgcaggccattgtttttcctttccctgcacattgtgttgatcttttttttgggttttaggttgtcatgttgtttggtggaatggagatatgatgttgaattggttctttgtgacacaattgattatcttgtttatgtgc

SEQ ID NO: 25936 - DNA, 1601 bp, Zea mays
  Clone ID: LIB3969-008-A1_FLI
cgccctgatggctcccgcgctcacctccaacccgccctccttccgtcccctcacgtccccactccgccgtcgtgccgccaccgtcccatgccgcgtcggtaagcccggcaaggactcctccgctgcggatgacgctaccggccccaacaagaggcccaacctcttcgcggacttcgggaatgccaagtcgctcatacaggcgttcccgtcgcagtcgctgttcgcgggcggtggcaggggcaggaaggacccgcagacggtgttcgtcgcaggcgccacagggcaggccggggtccgcatcgcgcagaccctgctgcggcaggggtttgccgtgcgcgctggtgtcccggacctagcgtcggcgcaggagctagcgcggctggcggcggcataccggctcatctcccccgcggaagcgcggcggctgaacgcggtagaggcgggcttcggtgaccccgacgcgatagcctagtccatcggccccgccgcgaaggtggtggtcaccgtcggctcggccgagaaagggccagaaggcggaggcgtcaccaccgacgacgcgctccgagtggtgcgggccgcagatctcgccagcgtggcgcacgtggttgtcgtgtatgacgagggggcggccagcggcggccttggcggcgggggctccacttacaatgtgctcgacggcttcacgtccttcttctccaacctcttctcgcgagagcagcaggcgctgacgctgagccagttcttggccaaggtggcggagaccgatgtcaggtatacactggtgaaggcttcactcaccgacgactatacccctgagagctactacgcccagctggtactcacgaaggagggagtatcgcctagcgacacaggcaaagtgtcaaggtcacagattgcagcccttgtagctgatgtcttctccaatgtggcagtcgctgagaacaaagtcgtcgaagtttcaacttcctcgtcagcaacagcaaagaacatagccgaggctttcacagctatccctgaagacggaagaagaacagagtacctagaagctgctgcgaaagcacaagccgaagaggaaacgttggcctcagaacgagctaataaaaaagccgaagcggctgccagtaaatctgaagccgacacgaagacgacaccttcagaggaggcagctgctactcctagcgcggtgaacggggctcaggcctctctagagaacctcttgagtagagccaaagtgatcagtgcggatttctcgtgggagaagttcagcacacagtttgccgacgtgacgacccccctaacctcatcactagagaaggaacccaacaaggcacagatagccactgtgcgaggccaggaaaaagcgaagaagctggcaccgcggattgctgttgtgaagccagcagcgcagaaggcgaagcagccggatcccaaaccagaagtgagagcactgtttggtggcctcttcaaacaagaaacggtgtatgtggatgatgactaaaacgaggagcgccaatttatcctctacgtgattttctttcttttgttttttttgtttgtccagtgccttggtgtactcttgaaataggaacgcttaaagttgt

SEQ ID NO: 25937 - DNA, 1133 bp, Zea mays
  Clone ID: LIB3969-008-A8_FLI
attaactagcttcttctagctctagctaggctcgtctgctgcaagaaggtaacagcgcaggcatggaggggaaggaggaggacgtccgcctgggcgccaacaagttctcggagcgccagcccatcggcacggcggcgcagggcacggacgacaaggactacaaggagcccccgccggcgccgctcttcgagcccggggagctcaagtcctggtccttctaccgcgccggcatcgccgagttcgtcgccaccttcctcttcctctacatctccatcctcaccgtcatgggcgtctccaagtccacctccaagtgcgccaccgtcggcatccagggcatcgcctggtccttcggcggcacgatcttcgccctcgtctactgcaccgccggcatctccggcgggcacatcaacccggcggtgaccttcgggctgttcctggcgaggaagttgtccctcaccagggcggtgttttacatcatcatgcagtgcctgggcgccatctgcggcgcgggcgtcgtcaaggggttccagcaggggctgtacatgggcaacggcggcggcgccaacgtcgtcgcgcccggctacaccaagggcgacggcctcggcgccgagatcgtcggcaccttcatcctcgtctacaccgtcttctccgccaccgacgccaagaggaacgccagggactcccatgtgccgatcctcgcccctcttccaatcgggtttgccgtgttcctcgtccacctggccaccatccctatcaccggcaccgacatcaaccccgcgcggagccttggcgccgccgtaatttacaaccagcaccatgcgtgggctgaccactggatcttctgggtcggccccttcatcggcgctgcgctggctgccatctaccaccaggtgatcatcagggcgatcccgttcaagagtaggtcttaaaggagccgatgctgctgcttcgagatgctgccggtcttgaaaggatggattcgtggctgtttcaaatgatcccctactatgttacgtggagttccattcctctttcaaagttcggagctgcttttatccgaacccagacttgtaattcatctgtaccaattgtgtaatatgccgcgcctctgttatgtgcaattcaaaattatg

SEQ ID NO: 25938 - DNA, 748 bp, Zea mays
  Clone ID: LIB3969-008-B7_FLI
ccggcgccgcaacttcgctgaggaagcccgcacccctgcccggatccgatggccaacagcaacctcccgcggcggatcatcaaggagactcagcggctgctcagcgagccagcaccggggatcagcgcgtcgccctcggaggagaacatgcgctacttcaacgttatgatccttgggccggcgcagtcgccctatgaaggtggagtttttaagcttgaactctttttacctgaggaatatccaatggctgccccaaaggttaggtttctgacaaagatttatcatcccaacatcgacaagcttggtaggatatgcctcgacattctcaaggacaaatggagcccagcacttcagattcgaacagttcttttgagtatacaggctctactgagtgcgccaaatccagacgaccctctttcggataacattgcaaagcactggaaagccaatgaagtagaagctgtcgaaacagctaaggagtggactcgcctgtatgcgagcggtgcatgagaacgcagtgatgttcttgatgtaataacccatcatacttcagtcctcatctattgccatttgcttgataaaaaataggctggagatatttgccatggaatgaagtctctacatgactatcactctgaattgtttggttgtacacctgtggtcggttccctttaccttggggcacctttgacaaatcagtatctgtggtagaacttgctgatactgtaatatatttgttacttcatgt

SEQ ID NO: 25939 - DNA, 850 bp, Zea mays
  Clone ID: LIB3969-008-C2_FLI
caggaacagacagctctgaaagactgaaactcacggccatggccatcctgggtgccctcaggctcgcgccgtctccacccgccctcgccggcgccgcgccgccggcgacgtcgccgtatacggctgtacgctcctccgtgcacttccgcctcgccaatgccggcgccgccgcgctcgtcgccgcctcgctcctcgccgccgaccccgccgtgactttcattggaggaggaccgtacgggaagcaggtgacgcgggggcaggacctcaccggcaaggacttcagtggccagacgctcatcaagcaggacttcaagacgtctatactgaggcaggcgaacttcaaaggcgcgaacctgctcggcgcgagcttcttcgatgcagacctcacaagcgctgatctctctgacgctgatcttagaggcgctgatttgtcgctggcgaatttaacgaaggcaaacttatcaaatgccaacttagaaggggcacttgccactgggaacacttctttcaaagatgccgacataactggggcagattttaccgatgtgccgctgcgagatgatcaacgggagtacctctgcaaaatcgctgacggagtaaattcaaccactggaaacccaacaaaggagactctgttctgcagctgatcgacggaaggacctgggacttgtgacttattcaacgtcttgataaacttgcatctgcagatccgctgctgtaagcacgtgaggaatgtaaattgagttatagagggttcctagaaataataactggtaattacgtgtaaatcaaccaacaatataagtgtgtgctgccctttgaatgtgcaaacgattttttattacaactc

SEQ ID NO: 25940 - DNA, 1110 bp, Zea mays
  Clone ID: LIB3969-008-C5_FLI
cttctacttcttcatgtaggccgcgggatcccgaatcccaatccgtagtcgccaccgtcgccggctacagggttcggtccccgtgatggagccctcgtcaacctcctcctcgccggctgtggagcgccggttgtcgccggaggtaaggagggtgcggaagcgggagctgaaggaggcgctggagcaggtccagcgggcggttgagatgctgcgcgatgccgacgccgatctcggcatctctctctcggaggagaccacagcagctccgccggagggcgaggaccgcgaggccgatgtcggtgccaatggagatggcgcggagacgtcgtcggttgcgagtgactccgattacgagatggcccagatgtgtgatcttcttaaatctaaggttggatcgctcgagttccttcaaaagctcaatggtattcagaagtcagtaggtcagaatggtgcagttgaacctgatatatcatgggatataataacgtcagtggatttgtgggaagatggtggttcagatgatggatatgtacttgttaagcaggaggatgtggttgatgggatgacttcctttatggctgcatgcttggtgtcaattaaaaagaccaaggatctgccccctgatcaacttcagaaagcgcttaggaagacgttttcagctgaaaagaagaaaggtaaaatccggaaggcatgggatggaactaaagtcatttataatgttgcttcatggggcgccactgccgttggggtctacaataatccagcattacttacggtcgcaactacagcgtttcagacttcttgtcgtgtgatatccaagttcctttgaatatcgtgtcaactactagggtgtgttagaattgcttgcgtgtgtgcttttccattgttcaggcagcataagcttgagaccatttatttagtctatgctgatgagttcgactgctaattatcagcacctcagtccaaagcagcatttgtattgtacaactgtaaatattgccttggtttgaacaaactgtcttttgtgccagaactttattttggtcatccgaaatgatgattagtctgtactagtttccgtatcaaacaaaacgaaaacccttgatattc

SEQ ID NO: 25941 - DNA, 1136 bp, Zea mays
  Clone ID: LIB3969-008-G6_FLI
agttaagccaccatgtggacgagggctttagcgacggtgctgttcgtggcaggcgccgcgctgctcggcgtcggcgtcggcggcgccagcgcgcagcagggcgtgtggagcatcatcactcgtcccatgttccagagcatgctgagccaccgcggcgacagcgggtgccagggcgccttctacacctacgacgccttcatcgaggccgccagcaagttccccggcttcggcaccaccggcgacgagcagacgcgcaggcgggagctcgccgccttcttcggccagacgtcccacgaaaccaccggtggatgggcgactgctccgggtggaccgtttgcctggggatactgccgggtgaaggaacagaacccgacggacccaccctactatggacgaggacccatacagctaactcatgagtacaactacaggctcgccgggcaagcgctgaacctgaacctggtgggcaacccggacctggtggcgagcgaccccgtggtagccttcaagacggccatctggttctggatgacgccgcagtcgcccaagccgtcgtgccacgccgtgatgaccggcgcctggacgccgtccgccaccgaccgcgccgccgggaggctccccggatatggcctcacctcgaacatcatcaacggcgggctagagtgcggcaagggccagtccaccgacggcgccaaggaccgggtcggctactacaggaggtactgcgatatgctccgggtggggtacggggacaacgtgccctgcaaggaccagaagccttacggaggatgaggacgtacgtggacaacaataattatatggttgctgcaagccttcacgtgtttttgttgcctctacctactaagaataaatcaagtagcagcaaacaggggcaacctgctaccttcggcgtgtgttttacttatcatatagtgtgtctatgtatgacacagtatgagggatgatgtactgtctcatctctggatgcatcataacgaactaatcaacggttagcagcattcacctttacgtttccagtggttccacttggcatttaatttatgacaccagtgaacaaatgaaaggaactatatatacatgactaaaaaaaaaaaaaaaggcggcgcacccgtgag

SEQ ID NO: 25942 - DNA, 940 bp, Zea mays
  Clone ID: LIB3969-008-G8_FLI
cgcggggaagggagggcgtggacggcggaacggagccgacgggccgccggccgcacgcgcatataaaaatcccggtaaaattcccccccgacgcgacgcctcaaatcgctccctgcctctgccctctggtcacctcgcttccgctcccggctcccctccggccacccagacatcgtccgttcgctcgccaagagacaggaccggagaccatggcggaccagctcaccgacgaccagatcgccgagttcaaggaggccttcagcctcttcgacaaggacggcgacggttgcatcacaaccaaggagctcggaactgtcatgcgatcactgggtcagaacccaaccgaggctgagctccaggacatgatcaacgaggtcgatgcggacggcaacggcaccatcgacttcccggagttcctcaacctcatggcccgcaagatgaaggacaccgactccgaggaggagctcaaggaggcgttcagggtgttcgacaaggaccagaacggcttcatctctgcggcggagctccgccacgtgatgaccaacctcggcgagaagctgaccgacgaggaggtcgatgaggtgatccgcgaggccgacgtcgatggcgatggtcagatcaactacgaggagttcgtcaaggtcatgatggccaagtgagtaaagcctgcggtaacggtatactaccccgcgggaattgaaggaggaaaccaaaccgtgcatcgcatattagaaaggcaatgcaggtcttgtttccttcgtcttccccatgaagaaaccgtactagctgtagctgctgaacgtttgagtccccctgctgccacccttatctccatttgtgtcatcgaaactccttgcttcccctgctgtgtgaatctgtacggctttgcgtgttctggacactgattgcagttgaatccagtttgtagttctatttgttc

SEQ ID NO: 25943 - DNA, 1311 bp, Zea mays
  Clone ID: LIB3969-009-B1_FLI
cgcgctcctacaacccatcgctcaccaccacctgctcctccagcggcggcgtccagggtgaacccgaatccccaacaccatggcggggggcaagatccagaagaagcgccacggcgcggcgggaggcgcccggctgcagggcggtatcccgttcgagaagtccgaggggcagcacatcctgcggaacccggcgctggtggactccatcgtcgccaaggccggcctcaagcccaccgacaccgtcctggagatcgggccgggcacaggaaacctcaccaagcgcctcctcgaggctggtgtcaaggccgtcgtcgccgtcgagctcgacccgcgcatggtgctcgagctcaaccggcggttccaggggcacccgctctcctcgcgcctcaaggttatccaaggagatgtcctcaaatgtgatctcccatactttgatatttgtgtggcaaacatcccgtaccagatctcatctccccttactttcaagcttctgtcacaccgtccaatctttaggtgtgctgtgattatgtttcaacgtgaatttgccatgagacttgtggcacaaccgggagatagcctctactgtcgtctctccgtgaatgtgcagctcctgtcacgagtgtcgcatctcctgaaggtggggaggaacaactttaggcctccacccaaagttgattcatcagttgtgcgaatagagcccaggaagcccctccctcctgtcagcttcaaggagtgggatgggcttgtgaggatttgtttcaaccggaagaacaagaccctgggctccctctttaaacagaaacgtgttctggaattgctagagaagaactacaagactatgcagtctctccaaactgtgcaagatgcagaaatgggtgaggagaagatgtccgcagacgatgtcgcgttgctggctaatatggttgaagatatgagcatggagactggctatgataaggaagatgatgaaatggaaatggatgatgcagacatggctggagatggtgctgcaagctttaaagaaaagattatgggtatattgcagcagggcgattttgcagaaaagagaggttccaagctgagccaagttgatttcttatacctgctgtccctcttcaacaaagctggtatacatttctcgtgattggtggtccagcttctcttcagtagtagtctgtttctttctgttttatttgtcgtgctgttaatgtacttattagttactgaaaaaacctctaagcttgtgctcgtagaaattttttacaggctccgtcctagtttgagctgcaacgaaagaaaattctacttgtt

SEQ ID NO: 25944 - DNA, 964 bp, Zea mays
  Clone ID: LIB3969-009-E3_FLI
cccgcactccggtcgtcccattaccctctggcattggttgtcgatttcttcgttcgtgcttgcttgcgtaaaatatttaaataaatgaaggcaaatatgggcacaaaagctcgtccaccatctgctgatgcagaaaaaggggagattggcgaaatagatacaagggctccaattcaatctgttaaagctgcagtgagtttatttggtgaggtccgcttttcatctgacaaatcagctgaaagaaagcccaaggctcctcaaacagagagggttttagccaaggagacagagttgcacatggcccagaaagagttgaataaatacaaggaacagctcagtaatgctgagacaacgagagtacaggctctctctgagctagagaaagctaaaaaaactgttgaggagctaacagccaagctggatctgattaacaagtccaaacagttggccatccaggcaacagaggatgcaaagactcaaatcaagcagcttgaaggtggcagcacaagtgaaggtctaggaacagatggtgctctgaagcaggaactggaaagtgcaagggagcagtatgctgttgctttggcagaccttgatgcagcaaaacaagagcttagaaagctcaagaaggattttgaaacatctttggatatgaggttgtctgctgcccagcaggaagaggaatcactgcatacaactgaagccaacatagaaaaagctaaccaacttcgtagtgagattgccgaaattcaagaatcccttatgcatgttaaggcagctaccgtgcaagcacacgaagaagaggcacaaatccttgctgagaaggatgttgctaggaccacgtataaacaagctttggaagaaacacagaagaaacttttgtctttgaggaatgattttgaccctgctgcctacgatagtctgaaacaaaaactagaacaaaccaattctgagatcgcatctatgc

SEQ ID NO: 25945 - DNA, 1920 bp, Zea mays
  Clone ID: LIB3969-010-D2_FLI
aagagcggaaaagcccatcgccaccttcctcctcggatccacaacccggacgccccacccgggtcctttcttcctccctcccagtcccactcccaacaccgaccgcccctcctcatcacacctcgcaactattttagtctaaccgagtccaaccagtggcaagcgagcgagaggtggtggacggaaccgtcgcctgctgcgggctgccctacgagatctaggcgagcgagcgagcgcggccatgggtgctcgctgctccaagctctccgtctgctggtggcctccccgcttcaaatcgccgatgctcgagaacggcgccgccgaagatgacggcagcggcgtgccggtgttcgccgagtacagcctcgccgagctccgggtggccaccgacggcttcgccaccgaccgcatcgtgtcggagcacggcgagaaggcgcccaacgtggtctaccgcggcacgctcttcagctccggccgcaccgtcgccatcaagcgcttcggccgctccgcctggccggactcacgacagttcctggaggaggcgagggctgttgggcagctgcgcagtcgccggctggccaatctgatcggttgctgctacgagagcggcgagcgtctcctcgtcgccgagttcatgccgcacgagaccttggcaaagcatcttttccactgggagacaaatccgttgagttgggcaatgaggacgagggctgcgttttatgtggcacaggcgttggaatactgcagtagcaaagggagggcactctatcatgacctgcatgcatacagggtcgtcttcgatgcggaaggtaacccaagactatcatgttttggtctgatgaagaacagccgtgatggaaagagctacagtactaatttggccttcacgcctcctgagtatcttaagacaggcagagtaagtcctgagagtgtggtttacagttttggcactgtcttgcttgatctcctgagtggaaagcacattccaccaagtcatgcactcgaccttataagagggaagaactttctagtgctgatggattcttgcttggaaggtcatgtatccagctccgatggaactgacttgatgcgattagcatcccgctgcttgcaatatgaagcacgtgaccggccaaatttgaaaacggtggtatccggtctggaatgtctccagaaagatgtttctactccttcacacactttgctggggatccaacatgataataaaaactcaggtcgaatttctttatccgctattgggaaagcttttgccagagcagacctgaatgaggtgcacgaaatattactgcatgatggatatgatgaggatgacactgctaatgctgagctatctctccagtcatggaatgatgatgtatctgagagctttgttgttaagaggcatgcagacaacgcctttaggtctaaggattactcgaccgcaattgagtgttactcaaggttcatcgactcaggtgcaggggtggctccaaccatgctggggcggagatgcttcgcatatgtggtggctggcaacccacaggaaggccttgaggatgcaaagagagccgaggttattgcatcggactggccgatgggacactacctgcaggccttggcacttcacaacctgggaagggaggctgaaagccaagaagcactgaagaatggcactgccttggaagctgcaatgaatagtagggctagaactgtatagccctgaatttgtgataccctgtcctgcttgtacctagatcgcctccctccaatgcttcgtcaccagtaggggctgtttttggtattccctaacttgtatcggtatttcccctagtttcacaagtcgaaaaaactcctaggctggctgttgttacacctccaatatatttatgaatacaggaatgggcaactagcattctgttg

SEQ ID NO: 25946 - DNA, 1366 bp, Zea mays
  Clone ID: LIB3969-010-E2_FLI
cgccgcccgaaaccctagccccactgattctctccagcccagcccagccaaggggaggggatgtcggcggcgccagcggcgggagggcagggtggcgggggcattgacgccgcgctcctcgacgacatcatccgccgcctgctcgaggtgcggaccgcgcgcccagggaagcaggtgcagctctctgagtcggagatccgccagctgtgcaccgtctcccgcgccatcttcctcagccagcccaacctcctcgagctcgaggcgcccatcaagatctgcggtgacatccatggtcaatacagtgatcttctaaggctttttgaatatggaggttttcctcctgaagccaattatctattcttaggtgattatgttgatcgaggcaaacaaagtttggagactatatgccttcttcttgcttacaaaatcaagtaccctgagaacttttttcttctgaggggcaatcatgaatgtgcctcaataaacagaatatatggattttatgatgaatgcaagcgtcgatttaatgtgcggctatggaaggtcttcacagaatgttttaacactctacctgtggctgctcttatcgatgataaaatattatgtatgcacggtggactttctcccgatctagcacacttggatgagataaagaacttgcaacgtccaaccgatgtaccagatcaaggtctactgtgtgacttactttggtcagatccaggaaaagatgttcaagggtggggcatgaatgatagaggggtctcatatacctttggtgctgacaaggtttcagaattcctgcaaaggcatgatcttgatcttatttgtcgtgctcatcaggttgtcgaggatgggtatgaattctttgctgacagacagcttgtcaccatattctcggctcccaattattgtggtgaatttgataatgctggcgcaatgatgagcgttgacgaaactttgatgtgttccttccaaattctgaaacctgctgagagaaaacaaatttatggggccaaacaaaatgtgagatagtgaacccattttgcttccagcagctctgaggctctcctgtggatgcatcaagacaacagcatgatggcgccaaacttgaggtcagcattgggcaagggcaactaccagagcagagaaaccaaataatataccatacctaactgttcgcctggaagttactcttcatggcaagtgtttgaattttctcttgttactgcgtgtcgaacaatcatgtagctgtagatatagtgattgtggaaggatgaagttgccaaattgacccgtggcgatttccttctccagacaggaaaaattctgaacatcaaggagtttctgtttgcaagtttcactattt

SEQ ID NO: 25947 - DNA, 885 bp, Zea mays
  Clone ID: LIB3969-010-E6_FLI
cctcggcggaaaccaagaccctagctctcgtcgtcgtcggcgtcggcggcggcgaccgtggcggatccgacagccagccctcgtcgcagccgggccgccattgccgtcgtccagctcccaagacggcgtacctccttatgttctccagatccggaaccgtgcggatggtgttcggggttcggcgaccggaatgaaaaacgttttggcccggtctcagctacgtacttcccttattctttgaccaagcctactgaggagaggaaagagcatgatcgcaagagcccggtgacagcattggaggtctatcccagcaaaaaaacagaccaccgatctttttgataagaaacctcatcgctgatttacggccagcgtgtctgcatcggctcgatgaaaagtgcgcgtgaagtttctatcatcattggaagaccatcatcggtgttgaggtcaactgcaagcgtgccaatcaatctcaccatgccacacgagccgaggccaccaaccacgagccctgctgttgcggcatggattgctgtgtggattgcaacgtctttggtgaggtcattcgttgtgatgtgcctggcggcatgaacatctcagaggtggatctatggaaagaggagattggaaggctacgcttgaaagagagacgaaaggttgcgctgtgggatagacgaaaggttgtgcctgcgctacatttgggaactggaggaaaagtgaaaagaatgatgcattttctttgtgtaatcggtggtcatggtgggtaattatcccctaaatttatgagggtattggaaagtagtgtttgtgaagcaccatttttattgctttataaaaaacgtgaagtcaaccctaacttcacatttttttagtgaagctaatttattg

SEQ ID NO: 25948 - DNA, 876 bp, Zea mays
  Clone ID: LIB3969-011-D1_FLI
ataaaaagcccaacgctgggctccgctcccggtctctggagtctggactcgcctccggcgcgcctccaccatgtatcccaaggcggcagacgaaggtgcgcagccgctggccacgggcatccccttcagcggcggcggcggctactaccaggcgggcggcgcgatggcggcggcgttcgcggtgcaggcgcaggcgcccgtcgccgcctggtccaccgggctctgcaactgcttcgacgactgccacaactgctgcgtgacgtgcgtgtgcccgtgcatcacgttcgggcagaccgcggagatcatcgaccggggctccacgtcctgcggcaccagcggggcgctgtacgcgctcgtcatgctgctcaccggctgccagtgcgtctactcctgcttctaccgcgccaagatgcgcgcgcagtacggcctccaggtgagcccctgctccgactgctgcgtgcactgctgctgccagtgctgcgcgctctgccaggagtaccgcgagctcaagaagcgaggcttcgacatgagcataggatggcatgcgaacatggagaggcaggggcgcgccgccgccgccgtgccgccgcacatgcaccctgggatgacccgctgacgctctgccgctcgcctcacttctgctgaggaaatcaagtgatttggtattggtccgctcccagcaggcagtatcaactactgtaaccaatccatgatctgtatgcggtatcgggctgaactgatactttatggacttgttgcttcaacttggtccgtaaaacgctcaagaccacatgaaaatatggtccataaaacttgttcaaagatagacattttgcactacattttaattctatgagataaaccatgattatgttt

SEQ ID NO: 25949 - DNA, 1515 bp, Zea mays
  Clone ID: LIB3969-011-E1_FLI
ccttccatctcctagccgccgccgccgccgccgccgccgctgcccaaaaccctacctaccctcttctccccctcactctcctttcatctccattctaatggcggcccaacccgtccggcgaagctgctagtgcttgtatctactatcttcatcaggtacttcgcgatcctactgaagtattccccgccgccgctgccatggccaccctcaaccctttcgaactcctcggcgccgacgacaacgacgacccgacgcagctgattgcggcggcggcggctgctgctcagaaagccgaggcgaagaagtccgccgtggcgcctgctgggaaggctgcccagcctgcggcgaccaccaagttcccgaccaagcccgctcctccctcgcagacggttcgggatgcacgcggcggtggctcatcagctcgtggaggctttggccgtggtgaacgtggccgtggcagaggtggacggggatatggccagaaccgtggcttcagtggtgacaatggcagtgacttccagggaggttatggtggcggaggctatggggatggtgctgtaactggtggatctgaaggagaaagggagagagacactcgtcccccgtaccgtggcggaggcagacgtggtggttacaggaatgttgagtttgctgatgactctgagaggccaccacggagaaactatgagcgccacagcgggactggccatggctatgagatgaagcgtgatggcgcagggcgtgggaactggggcactgccactgatgaacttattgcccaggatgcagaggactccccgaagatggaggaggctgctcctgttgctgagaaacaaggtgagcagaatgatgccccagcagcagatgagaacaaagataacaaggatgctactgcaaatgaggaggaagaaaaggaagaggacaaggagatgactctggaggaatttgagaaaataagagaggagaagaggaaagcactacttgcattgaaggctgaggagaggaaagttgaagttgacaaggatttgcagtctctgcagccactttcaaacaagaaagaaaatgatgaagttttcattaagctgggttctgacaaggataagaagaaggaaaatgctgagcgtgatgagcgtgccaagaagtcggtgagcatcaacgagttcctgaaacctgctgaaggagaaaggtactacggcggccgtggccgtggaaggggccgtggggatcgtggtggttttagaggcggatacggagggggatacagtcgtggcccagctgctgctgctccatccattgaagatcaagctcagttcccaagcctcggtgggaagtgaagggcgcccagctgctgctgtcaccgagcgttgtgttgtctgctgttgtcatatttaaattttgtccgacgttaaatttctgtgccacggtttaaacggaacaaataatgatgttgcatgtggctatctttagttatgtggtacttgacgttgaataccggagttgttgtttatcagaatt

SEQ ID NO: 25950 - DNA, 803 bp, Zea mays
  Clone ID: LIB3969-011-F11_FLI
ccaaagtccaaagtcgcgtctcccagcctccctccactgtcccacaccccaacactgttccagtccagcggctagcactagcagacagagcccctcctccccctagctcttgctcttccacaggcacagcgcaacgcttccagctagtctcgagacgaccggcagagatgatgaggcgttgcagcatcgccgccctcgccatcttcctcctcctcctcgtgtgctcctcatcctcctccaactgcgcggcagccgctcgcctcctgcctggcgccggacatctccggcctctccgccatgccgccgtgggcgccagtggcgacgagctttccgcgggctccgagacgatggaggcgtgcgaggaggggaacggcaaggacgagtgcgtgcagaggcggctgctcctcgacgcgcacctcgactacatctacacgcagcacaagggcaagccgtgaccgcgagggaggatgccatgccgcagctgcagtggagcgaggagctcgcagatgcaggccaccgtctcggctcggctgctagtgctacggccccccctacggaaaaagttggtttgtggagtgaatattttataatcacttgctagaatgctacgtagatgaacgctgctagctgcggctaattaattaacatccggacggacgttgtcatccgtctactagtactagtagtctagtactagctagtatatatatggctgtgtacgtctccaagtcttatctaatatatgcatgcacatggtggtgggcaaattaaataataacatgtataaccaaacctctcttctt

SEQ ID NO: 25951 - DNA, 1537 bp, Zea mays
  Clone ID: LIB3969-011-H1_FLI
gtccgccttattggaagggcagctaataaggtaataaggggcgacgaaaatggctccaacgaccgccaccaaggacgacagtggctacggcgacgagcgccggcgcgagctgcaggcgttcgacgacacgaagctgggggtgaaaggcctggtggactccggcgtcaagtccatcccgtccatcttccaccacccgccggaagccctgagcgacataatttctccggcgcctctgccgccgtcgtcgtcgccctccgccgccgccatcccggtggtggacctctcggtgacgcgccgcgaggacctagtcgagcaggtgaggcacgcggccgggacggtgggcttcttctggctggtgaaccacggcgtggcggaggagctgatgggcggcatgctccgcggggtgcgccagttcaacgagggccccgtggaggcgaagcaggcgctctactcgagggacctcgctcgcaacctgcgcttcgcctccaacttcgacctcttcaaggctgctgcggccgactggcgcgacacgctcttctgcgaggtggctccgaacccgccgccgcgggaggagctgccggagccactcaggaacgtgatgctggagtacggcgcggcggtgacgaagctggcgcggttcgtgttcgagctgctgtccgagtccctcggcatgcccagcgaccacctgtacgagatggagtgcacgcagaacctgaacgtggtgtgccagtactacccgccgtgcccggagccgcaccgcaccgtgggcgtcaagaggcacacggaccctggcttcttcaccatcctcctgcaggacggcatgggcggcctgcaggtgcgcctcggcgacgggcagaacggcggctgctgggtggacatcgctccccggcctggggcgctcatggtcaacatcggtgaccttctgcagctcgtgaccaatgaccggttcaggagcgtggagcaccgggtgccggccaacaagagcagcgacacggcgagggtctccgtggcgtccttcttcaacacggacgtgaggaggtccgagaggctgtacggccccattccagaccccagcaagcccccgctgtacaggagcgtcagggcccgagacttcatcgcaaagttcaacaccataggactcgatggccgcgcgctcgaccacttcaggctctagctacctggctacgtttcagattcgtcctttcatttgctttggtctctaattaataattccaaataataagcccgcggatggacctctgtctgtctgtctgtaatttagtttccaagtttaggtagtgtttggttactagggactaatttttagtccctctattttattccactttagtttataaattgcaaaatatggaaactataactctattttagtttccatatttgacaatttagttactaaagtggaataaattggagggactaaaaattagtctctaaaaccaaacacccccttagtttgttgtggtaataattcctgtatcaattatgtcataaataaaagctagggaaccttgat

SEQ ID NO: 25952 - DNA, 1091 bp, Zea mays
  Clone ID: LIB3969-011-H4_FLI
cagagacgcaggagcgcggaggaaaaggaggcccagaccaccgacggggaaaaaaacatcacgaacaccgttctccatagcgggagtagtgaggaacgaaagagagggggcggcctagggcttcgattccgcagccatggacgccgctgacgtgtggggccgctcatcgtcctcgtcttcttcgtccgccgccgccgcgaggcgcctgcaggcgcgctacgatctgtacatggggatcgacgacgcggacgccggcttggacgaggtgacggagccgcgcggcggggcggagtcctacaactgccccttctgcggcgaggacttcgactttgtcggcctctgctgtcacatcgacgacgagcatgccgttgaggctaagagcggggcatgccccatctgtgctacaagggtcggaatggacttgataggacatttgactatgcaacatggaagttatttcaagatgcaacgcaggcgcagagtccgaaaagtatcttctgggtcccattctttattatctttgttgagaaaggacttgagaaatggcagtttgcagtcatttctcggtggatcatcctatgtatccaatcctcctgctgcagcaccagatccatttgtgtcatctttaatttgtactttgcctgtggctgaaccatccaaagatttacattccgactcatctgacaataactttttgctaaataaattcccagatgaaaagcctgtagagagggctgaaccatcattgtcggagaaagatcagaaggaaagggttcaaaggagcaaattcgtccgagggcttgtgctctcgacaatatttgatgatgataacttgtaaagggggtcatcaaacttgataacagcatcacaatagttaaggaacacgaagagaatcatcagactctgctgctgttgtcgtgatcacacaagaggcccatctaagttcgtatatgtacggatggaatatttatgcatgtatgtatttatgtttatctccctgcatttacccttagtgcaacagggtggtaggggacggctgtagtattccaaatttatgtatcaaataaatgaggacactgtccttggggtgc

SEQ ID NO: 25953 - DNA, 778 bp, Zea mays
  Clone ID: LIB3969-012-A11_FLI
ctcgatccaacaaccaggccgttcagccgcagattagcaggccgcctgcgctcctcctttcccctcagcctcccctcctctccggtgtacgtctccgccgagatggccgccccgctccggcggagcctcccctcccttggtcgcgcgcttctcacgccggcgccggcgcggatgctctccgcggaggcctctgatgccctcgttgagatcaagcccggggagatcgggatggtctccggcatccctgaggagcatctccgccgtaaggttctaatttattcaccagctaggactgcatcccagcaaggttcaggcaaagtcgggaggtggaaaattaattttttgtcaacccaaaagtgggagaacccgttgatgggatggacatctactgggggtccatatgctaatgtcggtgaagcaggacttacgtttgacagtgcagagtcagcaaaggcgtttgccgaaaaacatggatggaattatgtggttcggaaacgccatgcacctcttctgaggcctaaggcctacgctgaaaacttcaagtggagaggccctccgaaagcggagcaagcatgagctcgagacatctgtgatgctgacattggcacgatgtcgttttcctcctggctcgattttattttgctttcaaccgtgcccattgttaaagtacgaactagagtatgcatctatcaaacttgtaataagcatgatgtgcaatcaaacaaaatggtgtacttgtacttccaaaacgttaattcgtggatgacattgcttttgc

SEQ ID NO: 25954 - DNA, 847 bp, Zea mays
  Clone ID: LIB3969-012-A12_FLI
cacagagagagagagaaccccagcgggcaaacgcctccctccccctgcctccaggccccagatccggccatccgggtagctccagaccttctccaatggcggtcaaggtctacgtcgtgttttactccacctacgggcacgttgccaagcttgctgaggagatgaagaaaggcgccgcttcagttgaaggcgtggaggtcaaagtatggcaggtcccggagattctgtccgaggaggtgctcggcaagatgggcgcgccacccaagaccgacgcgccggtcatcaccccgcaggagctggcggaggccgacggcgtcctcttcgggttccccacgcggttcggcatgatggcggcgcagatgaaggccttcttcgacgcgaccggcgggctgtggcgcgagcagagcctggccggcaagcccgccggcctcttcttcagcaccggctcccagggtggcggccaggagaccacgccgctgacggcggtgacgcagctgacgcaccacgggatggtgttcgtgcctgtggggtacacgttcggcgccaagatattcgacatggagagcgtgcacggcggcagcccgtacggcgcgggcacgttcgccggggacgggtcgcggtggccgacggaactggagctggagcacgccttccaccagggcaagtacttcgccggcatcgccaagaggctcaagggcggctccgcctgatatcgctcgcaccctcctatacgtatacataattattatagggaacatatctggtgcatatataaatttagtgtacatggtgcatatattaaatcagcatcactcattttagatataatgtctctagttgttggtat

SEQ ID NO: 25955 - DNA, 1044 bp, Zea mays
  Clone ID: LIB3969-012-C3_FLI
cctcctctctcagccttatccccaaatcgcttcttctctgttgattccatggtgcatcagccgagctcctctccctggccgatccatggtgctcgtctctagctcatgtcttgccgccggccgagcccctccccagcgcccttggagccggcgtcctctgccctcatctcattccccgacgccgccctctcccctcggtgctctgctggtcggcgtcttctccctgcccgacgtttctggcgccatggccgccgcgccttgggtcgcctgctccactgcgccgatccgcccatctccctgctgccgctctcccatggcgcgtccctgcatcttgcttcagctcgctctgccatctcccttggcgccctagccccaacgccgagctccctacccggtcgcgcccccggtggttgaactcgccgagcttccttttctatcgctcgtcctcgcccattcggcgccctcatctcaagccagtccagcctctctactcgccactctcctctatccccttgctgttagaacatggcgagctaaccccatgtgccagtagagttcgtcattccctgagcagcacctccctccatggatgccacgttgccgacttgtgcagttcatatttatcggggaaatcccaggatctggtggagaagaagcacagttcaatttgacgcccgccaggtgttcgacgaaatgttcaaattgggtttcgtcattgatattgtggatttgagtcgcgttttgtattgaaaaacaagaatcgtgagtgcaatggcaaatggaaggaaggcccttttgattgacaacttaggaaaagatggaatggaactcaaattttggtggtcggtcaagtgtgtagagttgaaatcatatatacttagttaggctcaaatttagcgcaaactgttggtgaccatgtttttcggttagtattttagtttttaaattggatttaaagtacacttatgtatgagttatttagcaatgcttatttatgagatattgaatgatacttatctacattatattaactatagtgttatt

SEQ ID NO: 25956 - DNA, 1369 bp, Zea mays
  Clone ID: LIB3969-012-E5_FLI
cgcacgctagtgtcagtggcacgcaggcagccgcgcgcaccgaggggagaccagagctagcggcgaggccaagggcaagggcaagggcgcggacggcaatggcgagagctggaggcggcggtccgttcttcccggtccgcggcgcggcgctggtggtcgtgctgctaggcatcgtcgcgggcgcggcgagggcgcagctgcggctgaactactacggcagctcgtgccccagcgcggagtccacggtgcgctccgtcatctcgcagcgcctccagcagagcttcgccgtggggcccggcacgctccgcctcttcttccacgactgcttcgtcaggggatgcgacgcgtcggtgatgctgatggcgccgaacggggacgacgagagccacagcggcgcggacgccacgctgtcgccggacgccgtggacgccatcaacaaggcgaaggcggccgtggaggcgctccccgggtgcgccggcaaggtctcgtgcgcggacatcctcgccatggccgcacgtgacgtcgtctccctgctgggcgggccgagctacggcgtggagctggggcggctggacggcaagacgttcaacagggccatcgtgaagcacgtcctcccgggccccggcttcaacctggaccagctcgacgccctcttcgcgcagaacggcctcacgcagacggacatgatcgcgctctcaggcgcgcacacgatcggggtgacgcactgcgacaagttcgtgcggcggatctacacgttcaagcagcggctggcgtggaacccgccgatgaacctggacttcctgcgctcgctgcggcgggtgtgccccctcagctacagccccacggcgttcgccatgctggacgtcaccacgcccagggtcttcgacaacgcctacttcaacaacctccgctacaacaagggcctgctcgcctccgaccaggtgctcttcaccgaccgccgctcccgacccaccgtcaacctcttcgccgccaacgccaccgccttccacgaggcattcgtcgccgccatggccaagctcggcaggatcggcctcaagaccggcgccgacggcgagatacgccgcgtctgcaccgccgtcaactaagcctgcattggctgcttgctgcttgcgtgcgtgggtttcacttcttctttctcttgtttatatacgtacgtttgtcggatggattttgttggtagccatgagatgacatccttgctctgagctagcggacctgccccgactggatgatagagattgatccagatgttcttctagtagattctaattctttatggatgtttcccattgacacgcggttacgcgctcttcaaccgtaacgcagctcaagaacttcctctacctct

SEQ ID NO: 25957 - DNA, 986 bp, Zea mays
  Clone ID: LIB3969-012-F3_FLI
cttgtgtcgcgctcgcgcatctgaagcaagggggggaagggccaagggggatcggtcttgttctcggagagggttgagctgcttgacggttttgactcggatcatggtgtgcagctctatcagatagagagctgacgtgaggtgtgagacgcggatcgtggagtactactcagtaggagatcaagaggaaggaggtggggagggggaagaaggcgatagccggggaggatggtgcttgtgcttgcgctgggggatctgcacatcccgcaccgggcgcccgacctccccgccaaattcaagtccatgctcgtgcccggcaagatccaacacatcatctgcactggcaatctctgcatcaaggaagtccatgactacctgaaaagcctttgccctgatctccatattaccagaggtgaacatgatgaggatgctcgatacccagagactaagacacttacaattggtcagtttaagcttgggctgtgccatggccatcaggttgttccatggggcgagctggactccctggcgatgctccagcggcagctggacgtggacatcctggtgaccgggcacacgcaccagttcaaggcatataagcacgagggaggcgtggtgatcaaccctggctctgccacgggcgcctacagcagcatcacttacgacgtgaacccaagctttgtgctgatggacatcgacgggctccgtgtggtggtgtacgtctacgagctgattgacggcgaggtgaaggtggacaaaatcgacttcaagaagactgcgacgatgcacggctagccctatccttccactccgtgattgagtgcaagacatgtctagcttctgtttcttttctttcagcttcttgattcagagcctcctgaacacgctttctacctgttcatgcgcaaagaactttttaggtctggttgttaacaatgtttctcggagccatgaatttaaatactatactttttaattgtcatgat

SEQ ID NO: 25958 - DNA, 1174 bp, Zea mays
  Clone ID: LIB3969-012-G2_FLI
ctataacagaatcgacggcgcggacagcgacaacatggacgacgacgaggaggactatgacgacgacgacgacgacgaagatatcgacggcaacaaaatgcagtacgagatccagttccagcgccagcaaccgcaccatcaccagcagcatccgaatgccgtcaggccgaacgccggcgccggcggtggaaacccgcccggcaccgccgccgctcccagcacggctgcggccccgacaacaacagccggatcgtctttcctgggcatggtccagtgatcgatccgtctgcgcgcacccaggcattatcccccggtgactctcatcctcctccacttctccatggcttcttttctttctctcgctcgcatgtgacatttgtgtctacccacctgtcgcctccatgcatgctcgtccatatctctagttctctacacctctaaaccaaaaatcacaagaactatctccctcagctcctccatgctccggcaattctccattcctcatatatgcacctagcaacacctcgatccatgtcgtgtcgtcgtcgctgctgcatgcctacccccctttttttgattcgttgctgtgttaattatagtggtcgcctctttagatgttacagtaaaaaaatattggcggtgatgcggttatttattgatttgttctggtaattaataagaaccctcaagctttggggtgttcacggagaggttgggttgatgcggtgaaaacagcacgtgaaagggtaatgagagatcgatcgcgcggttaaggagacaaggtgacaagaaaggcagatgacgcagtgggtgtttgcactgttactgcggtaaattttgtgcatgcggctactactctacagtgggctagtttgttgcaagggagctgcggaaaaaaatggaaaagaagagcttgctcgtcatgtgccatgaagaacagtcagtttgatgcatgcgggatttttatatttatccttgttttcccctctttttcatttttcaccatttcttttatgttctgcaacaagtaaactgtccattaagtattacctaagttttttctttctttctttctttctcaaactgctgttaccgaaatttacagtgtatacttgagaaatgttatatgttaaaattcttgctgttaattatatatagtattgcaattgctttc

SEQ ID NO: 25959 - DNA, 2352 bp, Zea mays
  Clone ID: LIB3991-016-G9_FLI
cgaataacctagaaaccgcagaagtatggcgaatgtatttcgatggctcgttaaagctgcagggagcaggcgcagggatcctctttactgcacctggagacgaacacctcagatatgcccttcagttgttatttccagcctctaacaatgcagcagaatacgaagctctgattcatggactaaacattgccatatcactgggcatcaagagactgatggtatatggagattctctggtggtcataagtcagataaataaagaatgggattgttcgaacgattccatgggaaaatactgcactgctgtccagaaactagaagacaaatttaaaggtctggaatttcaccatgtagagagagatcgaaacacggtgtaacgtccaaaatactattttggggattagaaaaactctccataaaagattttaaattaaaatgttttgtaataaagattttcctttaattaagtagatcggttattacataagactattcctattagtttagatatataaatagaagcatatatatacatggataaaatgataaataataaaactaaacctttcatatcattctagggtttttgtttgtgcatttggattgaagttaaacctccaactcagattaaaagggatttaacttttgagttcaaatatgaaaatagaattagcaaatagaatagaaatgagaaaaagaaaaaaatctccatccgttgggccatctccttggctcaaaccagcccacacgtccttgccatacatgattttcccctttctttattcccttgccaaaaatgacatcaccatatcatcatgggtgacataagcaagctaattcctatcagcacctgcgtaacaagccgagccggatttgaggttgaatcgctcgtaactgccacgcgagacccacgttccagccgtatctccttcgtcgaaccggttgctaaataacactggcaccgaaacaaaccgcagaccgagtctaccgccgagattacctcctagtggttgtaacaaattctgttggagctctcggtgttgagcatatatacgagcccctgagcctcccccccccctcatctgcccgtcttggcaagtcctgctgcttgttctgaagacaccttatccgagcaacaaccacaccgcagagagagctccatgtcgtcgcctagcgttccacgcccgcatgtcattcggagattgtgatgcggtaggaaaaaaagggtggaaagcgccagcaagcagaacggcggaagtcatggcgaggtgccagtaccgtcccgtggtgggcctccgcaccgcagtccgcattccatcgcgaccagggagctcttgctacgaattctggtaagtcactaccatatatggttcgcctcgtcgtcctcatcgtgtagcaccattttatgtggggttttggcctttggtatggttggaggggggcctcgccggtgatgccccgtcgggtagggcgatgcggcatcagccgtggagtctggggaagaagatacaccccccaccgttgatctctctgcgaatgactaggattagatctaggtgtgagtgtgctgctgccgtcgatttggtagcgaacgggcaagatcatgccatcggatacctcttcggaatattaaatcaggatccttgatccatctttggacgatcgtgatcgactcggggttgctttagatctaggccataggtttgtgattgggcagtcctgcgctgtccacggattcataatgcactagatctaatctgaaccatcgggcgccgatccaacggctccgatcctagcgtaccccttcggcctggctattttgctaaagaacccttattgtttacagaaaataacccgccgtccgcgttggctgtgttatgagtcttggtgtcttttgcgcagaaccccctgggtttctgataaatagtggccgcagtccaagtaactcagaaatctactaaattaaatacagaaattctttttaatacaaaataatgtcccaaacttaggaaattcataacttgatgaatttagctccaaattgattcattctagtggcaataattttgtattaatattttctatcaaccaataacactgtttagccatgaaacttgaattaaaattgttcatttggattaatctattctaagcgctaaataatttcggaaattcataacttaataacagtaactccgaatttagtggttcttgtttctacgatctcgttgcgcagcgtagaatattattatgcaatttgatcttatgtttggtgtgatgttaattttgcctataccatgtttgtctgtattgctacgtttagcagtgaggacacgtgtcacctgcaagttg

SEQ ID NO: 25960 - DNA, 145 bp, Zea mays
  Clone ID: LIB3992-001-G9_FLI
cgcccgttctgctacgcgctcggagctgagggaacaacgacggattaggtttccgtaaatgtatatgatgccgccggtgtgtactgaataataagggggaacaagctgtgctcttgttattttctttaatttgaaagtgacccat

SEQ ID NO: 25961 - DNA, 154 bp, Zea mays
  Clone ID: LIB3992-012-D7_FLI
tgtaataatgtaatggagccgctggctagctacctagctcgctagtttactcatttagcggcgatgagtaacgtagtgtcacccatcaccatgggtggcagtgtgagcaatgacctgaatgaaccattgaaatggaaaggaataatatataagg

SEQ ID NO: 25962 - DNA, 255 bp, Zea mays
  Clone ID: LIB3992-013-E4_FLI
cgatgtgcggtctgcagcagcagccaggtccctgcccttgcagcgcagctgccggcggtgtctattactgaggaaactatgggtactgtaataatgtaatggagccgctggctagctacctagctcgctagtttactcatttagcggcgatgagtaacatagtgtcacccatcaccatgggtggcagtgtgagcaatgacctgaatgaaccattgaaatggaaaggaataatatataaggaaaaaagatgattgg

SEQ ID NO: 25963 - DNA, 338 bp, Zea mays
  Clone ID: LIB3993-011-H6_FLI
atcaagtgagtcgctgctgtcctcttttgtccatggcgctgctgctttcgcaggagggttgaaatcaagtctggtcgtgacatggcagctgcatggaaaggtttatggtagctagtgataggcaaagcttgtaagtcggtgttaatcctagatatgtgatgtggggtctactttctcttctgattgtttcttggggtggtctaaacggttcaaaaaaaaaatgcgacttcttcgggtcagctagaagttatgtaatcccgttacatgaagcagcgcattgttcgccagctgctttggtgtggtggacttctgtcggtaatggtgagcttgcggtttct

SEQ ID NO: 25964 - DNA, 721 bp, Zea mays
  Clone ID: LIB3994-005-G5_FLI
ctcaaggatgtggcgcatcaggtgcgcagccgcaagcggatctacagccatggcaacgcggcccatgtgagccaggactcgcagattcagcaagtggtgggtgaagtcgcggcgctggtgtatgccgccgaagccagtgcgctgaaggccgcagttccggcgcagcgggcttatgtggcaaggttcggtggggatgatgcggtggagcgcgaagccaacgtcgccgctgaaatcgaatcagccacggcgcaggtggtggtctcggaactgatccagcgtaccaccactgaactgttcaacgcgctgggggcgtcggatgtgcgccagggcaaagccctcgatcggcactggcgcaatgcacgcacggtgtcgtcccacaatccggtgatctacaaggcgcggattgtcggcgactgggtgatcaatggcaccgagccgccgtttgtatggcagatcggcaatgggtcggcgcgttaaagtgccagcttgaagccaatcatcaccagcatgaacgccaggcaaggccgcaatatcccgtccgggaccttgccagccatgtggctgccgacataaatccccggcagcgagcccagcaacaggaaacccagcagggtccagtccatgttgcccatgctcgcgtggccgaggcctgccaccagggtcaatggcacggcatgggcgatttccgtgcccaccaggcgcttggtggccaggaacgggt

SEQ ID NO: 25965 - DNA, 1589 bp, Homo sapiens
  Clone ID: LIB4014-016-G2_FLI
cccaccccagcccagagaggcgacccagctccctggaggcccaggcacctcatgtctgccctcaacccagagtggagcagaccttccctggagcttctcaggagccacttcaaaagttcgtgccctcgtgaggctggcatgcaggatggcaggacagcccggccacatgccccatggagggagttccaacaacctctgccacaccctggggcctgtgcatcctcctgacccacagaggcatcccaacacgctgtcttttcgctgctcgctggcggacttccagatcgaaaagaagataggccgaggacagttcagcgaggtgtacaaggccacctgcctgctggacaggaagacagtggctctgaagaaggtgcagatctttgagatgatggacgccaaggcgaggcaggactgtgtcaaggagatcggcctcttgaagcaactgaaccacccaaatatcatcaagtatttggactcgtttatcgaagacaacgagctgaacattgtgctggagttggctgacgcaggggacctctcgcagatgatcaagtactttaagaagcagaagcggctcatcccggagaggacagtatggaagtactttgtgcagctgtgcagcgccgtggagcacatgcattcacgccgggtgatgcaccgagacatcaagcctgccaacgtgttcatcacagccacgggcgtcgtgaagctcggtgaccttggtctgggccgcttcttcagctctgagaccaccgcagcccactccctagtggggacgccctactacatgtcaccggagaggatccatgagaacggctacaacttcaagtccgacatctggtccttgggctgtctgctgtacgagatggcagccctccagagccccttctatggagataagatgaatctcttctccctgtgccagaagatcgagcagtgtgactaccccccactccccggggagcactactccgagaagttacgagaactggtcagcatgtgcatctgccctgacccccaccagagacctgacatcggatacgtgcaccaggtggccaagcagatgcacatctggatgtccagcacctgagcgtggatgcaccgtgccttatcaaagccagcaccactttgccttacttgagtcgtcttctcttcgagtggccacctggtagcctagaacagctaagaccacagggttcagcaggttccccaaaaggctgcccagccttacagcagatgctgaaggcagagcagctgagggaggggcgctggccacatgtcactgatggtcagattccaaagtcctttctttatactgttgtggacaatctcagctgggtcaataagggcaggtggttcagcgagccacggcagccccctgtatctggattgtaatgtgaatctttagggtaattcctccagtgacctgtcaaggcttatgctaacaggagacttgcaggagaccgtgtgatttgtgtagtgagcctttgaaaatggttagtaccgggttcagtttagttcttggtatcttttcaatcaagctgtgtgcttaatttactctgttgtaaagggataaagtggaaatcattttt

SEQ ID NO: 25966 - DNA, 1292 bp, Zea mays
  Clone ID: LIB4071-003-C6_FLI
gcgtccgtcccaccgtcgcaagccagccacctccctgagaggcctgaccgtgatttcggcgtggcatccaaaggcggtcaagattcgagaggccggaggaaccaagcgtagggcctccgaccccacgtcgtcgtccgcgcgcgccgcccgccgtcgcagggagatgggggccgattactacaaggtcctcggcgtcgaccgcggcgccagcgacgacgacctcaagaaggcctatcggaagctcgccatgcgatggcaccccgacaagaactccaccaataagaaggaggcagaaaccaagttcaaggagatctctgtggcatacgaggtccttagtgatcccaagaaacgtgcaatctatgatcagctaggggaagaagggctcaaggggcagccgcccccaggagcaggaggtcctggcacatctcccttcttccctggcggggttcattccaccgctcaccattttaatccgaggagcgcggacgatatatttaaagagttctttggatcccctggcatgggtggcatgagaacggaaccaggatttcaaaggtcagtgtttggcaacgatatcttctcttcgcgcttccgcgctgagggttccaccagtatgcagcagccattgcgcaaggcagctgcaattgagaatccacttccagtcggccttgcagatctctacaagggtgtgacaaaaaagatgaaaatctcaagagagactattgatgccagcgggagaatctcaaacacagaggatattctgacaatacaagtaaaggctggttggaagaagggaacaaggattacatttcctgacaagggaaatgaagctccaaatatgaaacctgctgatattgttttcatcattgatgagaagccccatgatgttttcactcgggaggggaatgatcttgtcgtgactgagaagatctcactggtggaagcactgactggctataccgcacgtgtcactacgcttgacgggcggagcctatcactgcacatcaactcaataatccatccaaagtacgaagaggtgatgcctggagagggcatgccaatgcccaaggaccccacaaagaagggaaatctgcggattaagttcaacataatgttcccctctaggctgacttctgatcagaaggccgggatcaagaggctattgggttcttaggccgccgcctcaaatgacatcttctttatgatgaaagttgtttgtaaatattgccagtgatttgtttgtaacgggatggtcacaatttagtttttttttaaggtggtgcccttggttt

SEQ ID NO: 25967 - DNA, 931 bp, Zea mays
  Clone ID: LIB4071-003-H5_FLI
ggaagcggaaagggcggcggcggcgctcgtggtcagtcaaagatccaacctccggactcgcgatggggcggcagatcctcaacgatgctctgcgcacgatggtcaacgcagaccggcgggggaacgcgtcggcgcttctccgacccatctccggcgtcatggtctccttcctcaacatcatgaagtaccgagggtatatcaaaaactttgaggtcattgatgagaatagagttgggaaaattagagtggagcttgatggacgtcttaaagattgcaaagctctcacctacaggcaagacctcaaagctaaggagatagaacgatacagagttaggatgctcccaacacgccagtggggctatgttgtgattactactccgaatggtgttttggatcatgaggaagcaatcaggcagaacgtgggtggtcaggtccttggttatttccattgactgacaagtagcgtcgctctcctagtcctgaatgaggcaacgggttatgcccatttggtattactgtactgttgttattaccgaacccattctgtttgcatcttgggagctgttttgttgtcgttcatggccatgcaagaaatgaaataacatgccaaatttacggctgaggtttgacaacactaggaatattgttaaacaggaacactgagtttcttgtgaggatgtcatgatagcttttctgagacctttccctgcagggagggttgagcacacattggtattttggtcagtgtctgaggctctgagatgtgtttcggatcttgtttgcagcactgcttgtaggactcctttgtttaggacaataatgttgatgggtctgtttgatgaatgacagatgtctgagcgaaaccaatgtcgctggttttgtagagtgttcaatttattggctgggaatgccatgtgaatgtgttgtctgg

SEQ ID NO: 25968 - DNA, 1217 bp, Zea mays
  Clone ID: LIB4071-004-D7_FLI
atggaactgagatctcgcgcggggtttcgttcatgggatcggggaattcccctgcttgatccgctgctcgagctgagtggttgtggctctcttctgacggccctaattagtaattctgcgtagcaaccagtgccactggggagttctgctccgctctgctcagaccttgtttcttcaccttgattttggatttgtctcggcgttttttttttacccaacgtcagatcatgctgagccgagtttggcgggctcagcctgcttggcttattcgttactgagggactacgctgattttagcttctgatgcaacaaccatgctgatcagtttttttttattcttttggcaggaaccagaagacattccgccccaagaagagcgctccatcaggcagcaagggagcacagctccgtaagcacatagatgccactctcggcagtggaaaccttagggaagctgtgaggttgcctcctggagaggatatcaatgaatggcttgctgtcaataccgtggatttctttaaccaagttaatatgctgtatggcacgctcacagaattctgcacacctgagagctgcccgacaatgacagctggcccaaagtatgagtacagatgggctgatggtgtgcagataaagaaacccatagaggtatcagcaccaaaatatatggagtatctgatggattggattgaaggccagcttgacgatgaatccatatttcctcaaaaacttggcacaccattcccaccaaacttcaaggaagtagtgaagacaatattcaagcgcttgtttcgtgtttatgcccacatctaccactctcatttccagaagattgttagccttaaagaggaggcccatctcaatacctgtttcaagcacttcattctgtttacaaatgagtttggcctgattgacaagaaggagctggctccactccaggagctcattgaatccatcatcgttccttactgagactacggtgtagtaaacgtggatatagagctctcagtgcagatggctgtgaagtgtccatccgtgacagaacttcactgcatagagctatatgtgcatgtacctgtgtgtttctaaatgatcatgtattggccatgtaagtgtgcctgttatcagttatagaagggtgatgatgatcatgtactgcaaaaagagaaagcacaagaatgtgttggattgatgtatgcagtgtttattttcctcct

SEQ ID NO: 25969 - DNA, 1039 bp, Zea mays
  Clone ID: LIB4071-004-F10_FLI
acaaaccacaaccagctcactcaagaacaaagaacccaacccatggcttctcccaagccgctcctcctgctcgccacctcgttcctgagctgcggcctcctggtggccgccgactacgccccaatgaccctgaccgtggtgaacaactgcccctacccggtgtggccgggcatccaggccaactccgggcacgacgtcctggagggcggcggcttcttcctcccgccgctctcccacaagtccttcccggcgccggcccacccctggtccggccgcatctgggcgcgcacgggctgcgcgggcgccggcgcgcagctccactgcgccacgggcgactgcggcgggcggctccagtgcggcgggctcggcggcgcggcgcccgcgacgctggcgcaggtgaacctccaccacggcaacgaccagacctcgtacggcgtgagcgtggtggacggcttcaacgtgggcctgtccgtgaccccgcacgagggccgcggcaactgccccgtcctcgcctgccgcaagaacctcaccgagacctgccccggcgagctgcagctgcgctccccggccggcagcgtcctcgcgtgcaagagcggctgcgaggccttccgcaccgacgagctgtgctgccgcaacatgtacaacagcccgcacacctgccgcgcctccaagtactcggagttcttcaagcgagagtgcccgcaggccttcacctacgcgcacgacagcccctcgctcacccacgagtgcgccgcgccgcgcgagctcaaggtcatcttctgccactagagctcggagctcggagggcgccgccgccgtcaacaagtgtcgctagtagaggtagtaggatttgcggtgcgtgtgttgtctagtgtgtgctggaatagctgtggctgtgttcccgtcgtgtctgtggcctgtgtaggctgtctgtagtatactgggttgttggatgtatgcgttctggccgcaagactgatgtcatgctgttgctgcttactacagtttgcagtctgaaataaaaacttgtttgatgagc

SEQ ID NO: 25970 - DNA, 956 bp, Zea mays
  Clone ID: LIB4071-005-A2_FLI
ccacgacctctccgtccgatccctaggcggcggatccttcctccaccaaacccgcacctgccgcaactgaatcgggtcagatcgggccatcggggaggcgagggagctcacgcggcgccatggacgaggaggagcacgaggtttacggccaggaaatcccggaggacggcgacatggacggcgctgacgttgatatggctgcctccggggatgacgcggcgaagctgcaggagctcgacgagatgaagcgcaggctgaaggagatggaggaggaagccgccgccctccgcgatatgcaggccaaggtcgccaaggagatgcaaggaggtgaccctagtgcatctacagctgaggcaaaggagcaggtggatgcccgttctgtgtatgttggaaatgtggattatgcttgcaccccagaagaagtgcaacagcatttccaagcttgtggaactgtcaacagggtgacaatcttgactgacaagtttggacagccaaaaggttttgcttatgttgaatttctggaacaggaaggtgttcaggaagctcttaacttgaatgaatctgaattgcatggtcgccagattaaggtcgccccaaagaggactaatgttcctgggatgaagcagcgtccaccacgtgggtataatccataccatggctacccttatagatcatacggggcaccgtatttccccccatatggttatgggagggctcctagattccgccgccctatgcgctacagaccttacttctgaagtacggggtagggtaatgaagttcaatgcaaaaccagcccatggtcactggtcagtcccgggaataatcaactgtatcgtttgcactgttgcggctcaatgctcctgtatcagctgccttttctgacctttgtttcaagtgccgccataagcgacggacatgttgtattggcttgtaatacaggacgtagtaagtgc

SEQ ID NO: 25971 - DNA, 1232 bp, Zea mays
  Clone ID: LIB4071-005-C8_FLI
cttcaactcccactcccactctccctttccactctcaggctcccactccccccctaccggctaccctacccatcacacacaaacagccactcctcacctcccccgtcctccggttcatgtcctgctgctccccatgtcgcccccactcgacctcgactacataggcctctcgccggcggcggctgccgccgctgcccacgacgacctgaagggtaccgagctccgccttggtctgccggggtccggttcgccggaccgccgtgttgtggctgccaccgcaaccaccctggacctgctcccggctaagggcgccaagcgcgggttttctgacgaggcgccgacgccatcgcccggtgcagcttccgggaagggaaagaaggtagcggaagaggaggacgacaagaaggttgcagcgacgccgcagccggtcgcaaaagctcaggtggtgggatggccaccaatccgaagctaccgcaagaacacgatgtctaccacccagctgaagggcagcaaggaggatgctgaggccaagcaggaccaggggttcctgtacgtcaaggtcagcatggatggcgcgccgtacctcaggaagattgacctcaagacttacaagaactacaaggacctgtcgactgcgcttgagaagatgttcagtggcttcagtactggcaaggatggcttatctgagtaccgcaaggatggtgaatatgttctgacttacgaggacaaggatggagattggatgcttgttggcgatgtaccatgggagatgttcgctgactcttgccgcaggctcaggatcatgaaaggatcagatgcaattggacttgctccaagggcagctgataagtccaagaatcgcaactagaatggttgcttcttacagtccagagcaagagggagatatccagtgactgtagggatctttgtggaagccggaaaacgtctaacagtttcaagaagaattctgccttatggtctgtaccacatgtttttgctgctacgcaagtaaagaactccacgtctgtcaatgttagttttacaacatcgtctacggacaaaaaaaaaacccccgctatttgattgttgctaagccttcgtacgacgtgtaaatggtttggtacaatgagtgctgcgactacgattgagcacccctctacctagtttgcaaaaaaacagtgtcccatggactgtctgttgtccctctatataaatgtccaatgaagcttgct

SEQ ID NO: 25972 - DNA, 959 bp, Zea mays
  Clone ID: LIB4071-005-F6_FLI
gctgcagcaaaaccatcagatctagcagaactctctcgacctcatcggcgttggcggagcgcgtgttgaccggagatggcgccgagcgggtggaggaggagcgcggcggcgcgggtcgcctggcgcccggccacggtttgcctgtggctcgcgctcgccgccgccgcactgacgctcgcccaggctaagaaggacctgacggaggttacccacaaggtctacttcgacatcgagatcgacggcaagcccgcaggccggattgtcatggggctttttgggaagactgttcctaagacggcagagaacttccgagctctttgcacaggagagaaaggggtcggcaagagtggcaaagccctccactacaagggaagtaagttccacagaatcatccccagcttcatgctccaaggaggtgacttcactctcggggacgggaggggtggtgaatctatctacggcttgaagtttgcggatgagaacttcaagatcaagcacactggtccaggccttctgtccatggccaatgccgggagagatacaaacggatcccagtttttcatcaccacagtgacaacaagttggttggacgggaagcatgtggtgtttggcaaggtgttgtctggaatggatgttgtgtacaaggtcgaagctgaaggccggcagagtggggagccgaagagcaaggttgtgatagcagatagcggcgagctgccgatgtgacggcgagctgaacttatgttccatcccgaagcatgatgataagaatttgctggtggccgtctgtcgttctagaactgttaggccctgtttggaatcttagggggtgtttgggagtgaagtttttccaaagttttggaagaataatgcagtattctcaaaaactgtagtattatataccaaaagttgtttgacaaactagctaaaatctctgttttcaaaactaaaatattacaaat

SEQ ID NO: 25973 - DNA, 782 bp, Zea mays
  Clone ID: LIB4071-005-F8_FLI
tcagcggcaggagctctgggcagcgtgcgcacgtggggtacctagctcgctctgctagcctaccatggctgatcaccaccggggcgcgacgggaggtggcgggggctacggcgacctccagcgcgggggcggcatgcacggcgaggcgcagcagcagcagaagcagggcgccatgatgacggcgctcaaggccgcgacggccgcgaccttcggcgggtcgatgctggtgctgtccgggctgatcctggccggcaccgtgatcgcgctcacggtggccacccccgtgctggtgatcttcagcccggtgctggtgccggccgccatcgcgctggcgctcatggcggccgggttcgtcacctccggcggcctcggcgtcgctgcgctgtccgtgttctcctggatgtacaaggcccgcgacatcaaggatgcagcacagcaccgcatcgaccaggcgcaggggtcttgagagaagaaccacactcgagcggaccgcgcgcgcgacctccttgaaccactgccggcgcggcggcatatggcccttaaaggcggtggctgctgctacgtacgctgccgtagagtctcggtcgccgcgatagctctagctagtcgtttatgtgttgtgctttgtgtgtgcatgcttgtgtctgggggcatgcagtgcagtgcagtactatatgctgtatgcgtctctctttgatcggagaggcggatgtacagcatgctcgatatgtctagtttggatgtcatgtttatgatgaggaataaaatgcagtgttcaggtg

SEQ ID NO: 25974 - DNA, 673 bp, Zea mays
  Clone ID: LIB4071-006-E7_FLI
gtgctgaccggatcaacccgagaccttgcaggattatcgatctgattgcggcatgatccgcttcatcctgctgcagaaccggcaggggaagactcgactggccaagtattacgtcccgctcgaggactcggaaaagcacaaggttgaatacgaggtacaccggctcgtggtcaatcgggaccctaagttcaccaacttcgtcgagtttcgcacacacaaagttatctacaggagatatgctggactgtttttttcaatatgtgtggacataactgataatgaattggcatacttggaatgcattcacttgtttgtcgagatattggaccatttctttagcaatgtttgtgagctcgatttagtgtttaattttcacaaggtttacctgatactagatgaatttattcttgctggggagctgcaagaaacaagcaaaaaggcaataattgagcgaatgggtgaactggagaagctggaatgacgaagaccaggaagatgctgccgcgtgtgttgtattccaatttgtattattcgtttcaggtgttttacatttgctctcctggttcgttccggctgacagcgtgatgcccatgctgtcactcgaaagaatggtagtagtagctagcatgagtacattataaacgtaccttcgaaaacataataatttcccagc

SEQ ID NO: 25975 - DNA, 1214 bp, Zea mays
  Clone ID: LIB4071-007-A8_FLI
tcagtaactaataattactttagattagaaagcaagaatcgagtcgagaagatggtgcagttcggcaagtggctgaggaggcagatcgagcggagcctcccggagtggcaggaccagttcctgcgctacaaggagctgaagcggtgcgtcaaggcccgctccggcggctgcccgccgttgcccgcggaggaggccgagttcgtggccgagatcgacgcggagaccgagaagatcaacgccttcttcctcgaccaggaggaggagttcatcatccgccaccgggagctgcagaaccacatcgagcgcgcgctgggccgcggcaggcccaggccggcgccggcgctgcacgaggccgaggtcgccgccatccgcagggagatcgtcaacttccacggcgtcatggtgctgctcctcaactacagcagcatcaactacataggtaggaggagttctagctctagctagctgtacggagttgaattgaaagcctgcaggtctgtccttttgcccatgcatgtctcctctccatgcatgatgattctaaccaatcccgttccatcctccatgtctggctgctggctgctggctgcttgcaggcctggccaagatcctcaagaagtacgacaagcgcaccggcgcgatgctgcggcttgccgtgatggagtcggtgctgcagcagcccttcttcaagacggagacggtgtcgcatctggtgcgggagtgcgagtccttgatggaggccgtgttcccggaggcgcgcgatcggggccaggccgccgccgcggcgctcgccgtcgcggaggcggagcagggcatcttccgcaacaccgtggccgcgctcctcaccatgcaggacgtccgcgcggggagctccaccagaggaagccactcgctgccgccgctcaacctgccggactccgactggctccggtccttcgacccgccgtttccgatcccgacccgatgacacatgttggcttgttgctcgctcctagttggcttgcgccagcctcctcgatctcccttccttttcgtcttcttggcccggtacatgctgtgcttgccttggttttccatttttcccgctttctaagctctaattaactaatgtatgtagagtgcagtagtgagactacagtaaataaatgtaatttactggaatgacagccgagagaacgtacaagctcatactcaatttggttccaattttgtgg

SEQ ID NO: 25976 - DNA, 1651 bp, Zea mays
  Clone ID: LIB4071-007-B3_FLI
tcctcagatcaacaaaccgtgtcctgctgctgcctctggaaaccaccgggggatcgccccgccctttccttcccgcacctcagatcctccgtccgaaaacggcagcttccggaggtgtcccgtctccctgctccttccggcgcgacgggtggcacggctcgcggatccggcggtcttcggtcgacggcgaggcggcgctcgtcttggatcgggagtggttgctgaggcgcggagatggtggccgaggcggaagtcatgcatcagtcccccgttccggtgctggaggtgcagtaccaccggcgcgcgacgaccaagggggttgacgacgtcgtcgggatgtccgcgcccgcccccgcggaggttggggttggggttggggttgaggtcgaggtcgaggtcgaggtcgccgtggaggtgcctcgcatggggttggagcagcctgatgtcgcaccaagtttatccacggacatgatacagcagtttgtgcccaacatccgttctggtagcttcgccgacattgggcctcggaggtatatggaggacgagcacatccgaatagatgatctttccgcccatctcggctcgatgttggtctgccctctgcctagcgccttctacggggtctttgacggccatggcggcccggacgccgcagcctacatgaagaggcatgcgatgaggttcttgtttgaggaaagcgagttcccacaggcgtcgcaggtggatgaggtgtacctcgagtccgtggagagctgtgtccgcagagccttcctgcaggcggaccttgccctggctgatgatctggacatcagccggtcctctggaaccacggcgctcactgcattagtgtttggaaggcaactggtggtcgcgaacacgggggactgccgcgcggtgttgtgccggaaaggagtggcgatggagatgtcccgcgaccaccgcgcgaaccacgtggaggagcgcgagagggtggccgcgtcgggcgggtacatcgaggacgggtacctgaacggggtgctgtcggtgacgcgggcgctgggcgactgggacatgaaggcgcccggcgcgtcggcgtcggcggcgctgatcgcggagcccgagttccggcgggcgacgctgggtgaggacgacgagttcctcgtcatggggtgcgacgggatctgggacgtgatgacgagccagcacgcggtgagcctggtgcggcgcggcctgcggcagcacgacgaccccgcgcgctgcgcccgggagctggtgatggaggccaagcggctggagacggccgacaacctgacggtcgtcgtggtgtgcttcgcgccggagatggggtcgccgtttacaccgcagcaacagcaggaggaggagctgcccgcgaggcccaggagctgcaagaagggcctgtcgacggaggcgctgtgcagcctgaggagctggctggatacggaccaccggtagagggaggaagagctggggggtgtgtaaatactggagtattatgctgacagcaacactggttgattatgagcgctgggccatctgttgaggattttacgtaggctggttcagcagccagcagttttgtaggtttcgttcttccttttcacccttgttatctagtcgtttgttgtacatacatgtatggatgctgctgatg

SEQ ID NO: 25977 - DNA, 547 bp, Zea mays
  Clone ID: LIB4071-007-C5_FLI
gccgacatggacatgttccaggaggacacgctgtcgtcggccacgtcgtctccggcgtcgtcgctgtgcacgccgtcgccgcacccgcacgggtcgtcgtgggtgcaggagctgagccacgaccagcagggcctgcgcctcatcagcctgctgtaccagtgcgcggcggaggtggcggcgggcgccttcgaccgcgccaacttgtacctggagcagatcacgcagctggcgtcgctggacgcgccgcacacgctgcagcgcctcgccgccgtcttcgccgacgcgctggcgcggaagctgctcaacctggtgcccggcctgtcgcgggcgctgctgcccacggggcccggcagccccgcggaggcgcacctggtgcccgccgcgcggcgccacctcttcgacgtgctgcccttcatgaagctggcgtacctcaccaccaaccacgccgtcctggaggccatggagggggagaggttcgtgcacgtcgtcgacctctccggccccgccgccaacccggtgcagtggatcgcgctgttccacgccttcc

SEQ ID NO: 25978 - DNA, 1018 bp, Zea mays
  Clone ID: LIB4071-008-C4_FLI
tggcaagccgaggtttgtcctgcgtggtgcggcttgtctctgggccggctgctcccacaagctatctgagccgctgctccatttgatcggacagtcgacaccgtccgagcggcgatcaaaaccaccttcgacgactacgccgaaaccctagcctctatctcattccactccgacattcacgtgcagctgtcgggagcaggcaatggcgccggatctaagcgaactcgccgccgccgctccagcccgtggcgcctacctcgccggcgtcggtgtcgcggtcctcctcgctgcctccttcctcccagtagccgagtcgtcctgcgtgcgagataactcattggtgagagacataagccaaatgccgcaaagcagctatgggattgaaggattgtcacatataacagttgctggtgcgctcaatcatgggatgaaggaggtggaagtgtggcttcagacaataagtccaggtcaaaggacgccaatccacaggcattcctgtgaagaagttttcactgtcctcaaagggaagggtacgctcttgatgggatcaagctcactaaagtacccagggcagccacaggaaattcctttctttcagaataccacattttcaatccctgtaaatgatccacaccaggtttggaattctgacgagcacgaagatttgcaagttcttgtgatcatatcgagaccgcctgctaagatatttttatatgatgattggagcatgcctcatacagccgcggtactgaaattccccttcgtctgggatgaggactgcttcgaagcagcaaaagacgaactctaggtcacaagtgtttcctgcaatttatctgcttcatccatgatcctgctggtgctggactactacaattctcagcactagttgtaataaagccagtgcgcttttcatgtataattctgtattgtggctcgcgaaaataaaatttggcaacggtttatgaacttatgcgcttgtggagttgatccaatgttcaccgtttcaagatttttgcat

SEQ ID NO: 25979 - DNA, 804 bp, Zea mays
  Clone ID: LIB4071-008-H2_FLI
gcagtcgaaatgtcaaatttatacacactaacacaagttagaactgaattgatatataaaacagagtcttatacttaaaattcagaatttaaaataataaaatgggccattctgggcccttgaaaacagccaaggcggcctaccaggcgggccaggcagcggcctggtggccagcacgccggcccagcctggctggccagcctaaacggcccaactgaggccacgaagcccattagaaataggggcgattaggttttccaaaccctaaccgctccagccgtcgtcttccagggagcgccccagccgccgccagggtgttcggccgccgccggacctgcgccttcaccgcaccgccgccgagcgcgctcgcgtcgaggagcgctcacgcccaatccacgtcggctgggccgtggccgagccgccaggagcgctccagccgaggagtcgcgcccgaggaggaccgccgtggtccgccggggcttgccgaggccggccgaccgggcacgcgccgcgctgggatgcatgggtgctggtgctggggtcggaccgcgcccgcccctgcgctaggtccgaggccgaggccgaggccggctgtgcccttgcccggaggcagagcatctcgctgctcgtgcccacgtggaggccgagcaggcctgcttgcgcgtgtgggggccgtgggggcccgcctgccctctgccagagtcgatgccgcgccgcccgggtagcgttcgtccgccgtctcccgagggctagctgcacccgcgccggggccaaccgctgccgcgcccgagcgtcttcgggggc

SEQ ID NO: 25980 - DNA, 661 bp, Zea mays
  Clone ID: LIB4071-009-B6_FLI
cgcaaattgcaccaagaaatccatcgagaggccgtcgacaggggaattaatggcgtcgtcgtctagcagcagccaccgccgcctcatcctcgcagccgccgtcctgctctccgtgctcgcggctgccagcgccagcgccgggacctcctgcgtgccggggtgggccatcccgcacaacccgctcccgagctgccgctggtacgtgaccagccggacctgcggcatcgggccgcgcctcccgtggccggagctgaagaggagatgctgccgggagctggcggacatcccggcgtactgccggtgcacggcgctgagcatcctcatggacggcgcgatcccgccgggcccggacgcgcagctggagggccgcctagaggacctgccgggctgcccgcgggaggtgcagaggggattcgccgccaccctcgtcacggaggccgagtgcaacctggccaccatcagcggcgtcgccgaatgcccctggattctcggcggcggaacgatgccctccaagtaactgcgaagagcatagtgcatgaggaatgagcttgtagctagctcatatgtctgaataataagcacagcaagaagatgaatgcatttctcggatcgttcatccggaacaataattaaaggggatccggatttgttcttgtgatat

SEQ ID NO: 25981 - DNA, 615 bp, Zea mays
  Clone ID: LIB4071-009-G8_FLI
gatcttttcaacaggcttacacagacctgtactccatctccttctccgccatccaaaaccctagcttggcgagtgggggtggaggcgcggctgctcgtcacgacatcgagtttcagcgccgcccgcgagatccccggatttcgttctctacccctgagagctgcggcaatggctgggaaaggcgggtcgaccaacttagaaaaggagcagatgtttgggatggcggagaaggagatggagtacagggttgatcttttcaacaggcttacacagacctgttttaacaagtgcattgaaaaaaggtataaagaagctgagctcaatatgggcgagaacagttgcattgatcgatgtgtttcaaagtattggcaggtgactaatttagttggtcagatgcttggaaaccggcctcaaatgtgaactgagaagcactcgttccattttgtagcagaattctattgctctgtttcttctttttggttggttgtagaatgccgcacctgttctaagtacaccaatacagcaacagacatgctactgcgtggaccgctttctctctgaatcatgaactgtaataatttgatacagctctagggcaattctgtttcgaaagct

SEQ ID NO: 25982 - DNA, 724 bp, Zea mays
  Clone ID: LIB4071-009-H10_FLI
aattattgctcatgaaaaatcacggtcctcactgtccaaggtgattaggtcaatacctgtaacaatctcaatgatagaaaggtcgagctgagattacttggagaaaaagcagtcaagaggaaggactacaatggtgcgttggagctctactctgaggcgattgggctagactccttcgatgcaaccttgtattcaaataggagcctttgctatctaaaaattggtgaagcccagaaggctttgttagatgctgagacttgcataaacaaccgacctgattgggtcaaaggttactaccggaaaggagctgctcttatgttgctcaaggagcacaagagagcgttggatgcgtttttggatggactgaaagtggatcctaccagtgctgaaatggagaaagcaatgcgggaggcgcttgaggccgtgaaaatggagagtgttgctgttcaacgtcagtagatgatcctgcctcctgctgagtttggatgggatgatcctttacgtacagctttactccttttgctcaaaatgtcaccaccactctacttaatttggttgtatcccgtggcatgtttttttttaaaaaaattcgttgtttctgcctactttcatgacggtgtgtcctccttgcacaactcggaggatcacatcagacggtcggactagtcggttttccaaaccaaatatagcagaatacaaagtttggcacggcaagcttcagatc

SEQ ID NO: 25983 - DNA, 653 bp, Zea mays
  Clone ID: LIB4071-010-B6_FLI
cgcaaattgcaccaagaaatccatcgagaggccgtcgacaggggaattaatggcgtcgtcgtctagcagcagccaccgccgcctcatcctcgcagccgccgtcctgctctccgtgctcgcggctgccagcgccagcgccgggacctcctgcgtgccggggtgggccatcccgcacaacccgctcccgagctgccgctggtacgtgaccagccggacctgcggcatcgggccgcgcctcccgtggccggagctgaagaggagatgctgccgggagctggcggacatcccggcgtactgccggtgcacggcgctgagcatcctcatggacggcgcgatcccgccgggcccggacgcgcagctggagggccgcctagaggacctgccgggctgcccgcgggaggtgcagaggggattcgccgccaccctcgtcacggaggccgagtgcaacctggccaccatcagcggcgtcgccgaatgcccctggattctcggcggcggaacgatgccctccaagtaactgcgaagagcatagtgcatgaggaatgagcttgtagctagctcatatgtctgaataataagcacagcaagaagatgaatgcatttctcggatcgttcatccggaacaataattaaaggggatccggatttgttct

SEQ ID NO: 25984 - DNA, 1206 bp, Zea mays
  Clone ID: LIB4071-010-D7_FLI
cccatctgccatctcggctcctcccaacccaaacgacaaaaccctagcctcctcttccgtgttatgggatgccgtctaaaccctatccccactccctgacctcctctacttcctccgccgccgtggcccccgcgacctggatgtccgcatctgcatggacggcgcccgagtcctgatcgccgctagtgccaccgccgtctgctgcctcgcctgcgctgtctggatcttccgctcctcttcctcctcgttccccgcatcctcaaataagcaccaaccccctcccgccaacttctgcggctgcgcttcctgcggctgccgtgacgccaagtccgccaacggcgagatggccgtgggcggggagaacaagaagaaggcgccggagcctgctccgccggaggcgccctccatgatggagcagctcgtgcccgagatcaccacccacgcgctcagctacctcgactacaccagcctctgccgtctctccatgaccaactccgccatgcgccgcgcagccgacgacgatggcgcctggaaggcactgtatcacaaggtgattttacggtggagcagggtactataaatcctcctaatggatggaaggcatactatgcggctacaaaagccattattaaccttaatgcagagttctacaatattatcagggaagggtccttaccagcaatgagtcgtttttggcttaatgcggactatgtcaagtgtattcatgcgactggggagttctgcactggatacaacgcagtgatggagagttggggcatgctgttcaactggggccaagacggaggagggcagggcattgccttccagataagggacgtccgtgtgcgtgtgctcggtgaggtggcatgggtgaacatgaaggcgaacgtgctgttccatgtgaccaacgtctacgagctgtgtaacggcaggtggtatatggtccatcaccacagctcgctcatggctgaccctcctccgcacaatatgtttgcttgatgtgctgctattcttgagcggagattagataatcggacgaagatttcctccctcctccccacaacccttttattcgttgtggatctgctgtttgttggtattgctctggatctccgttccgcagttttgtacagatttgttttaggtggtaaggcttattataaattggtgaatgggcgccctggtggccgcggctgactttgattt

SEQ ID NO: 25985 - DNA, 792 bp, Zea mays
  Clone ID: LIB4071-010-E4_FLI
aagcccaaaccccaggcgtcgctctgtatttttctctcctcactcaacgcggcgatgccccctagatcggatcacgccgccggcagcggcgccgcggcggcggccacgcaggcccacttcgactccatcgatccactcttccatgtgctccgcgtgctacccttctccttcctcctgccgccgcgcacccgcctgaggctgccgtcgaacctggcgcttccctctcccatgaccgtcttctccctcatcctgctcacctactttgcggtcgtctccggactcgtgtacgacgtcatcgttgagccccctggcatcggcagcgcccaggaccccggcactggcgccgtccgccccgtcgtcttccttccagggcgcgtcaacggccagtacatcatcgagggactctcctccgggttcatgttcctccttggcggcattggcatcatcctcctcgacctcgccgtcgaccgcacgaggccccggagcctccgcgtctcgtttggaagcgccggcgcagtcgccgttgtcatcgcctacgccatggccatgctcttcctccgcatcaagatccccggctacctctggtgaggttgataaatcttgcctgttaactagaccagatccgtcgcgagatctcgctgcatctaaatagacctgcgtgctgtgcagtgtggactgtgctctttcaattttgtcaattaatgttccatcacacaatttgtatggtatcaactcggaactactgggtgaggattatcattttgcaatgataccaaacaaggctttacttgg

SEQ ID NO: 25986 - DNA, 370 bp, Zea mays
  Clone ID: LIB4071-011-B10_FLI
gcctatagcggcgatctgctcggagtagaccccgtaaggcgagtcggcggtggcacgggccttgggagcgaccggtgggtagggcgcggcgcgagcggggtgcgcgcggcgggcaggccccgacgaggacgcggggttggccttgggtcgggacttagactgcttgatgaggtcgtccagggacatgtctagaccgctcgacatggtctccggcagctcgagcgaaaatggccctacggcggggagcggccgagacgacgccgacgccgctgcgatgtcacggcggcggcggcgcgtttcgtgggcgctgcggacgagggcgagtgagtcgcagcttgcggatgcgtctagggtttttgttgtaaaaccc

SEQ ID NO: 25987 - DNA, 980 bp, Zea mays
  Clone ID: LIB4071-011-D5_FLI
tagggtttttgattttagccgccgccgctgctcatctcacatccctcgagaagacgcctgctcctcgccgatcgatacgatggccgtcttctccgacctccacaccgccgacggcctcaagtccctcgaggctcacctcgccggcaaaacctatgtgtctggtgactccattactaaggatgacattaaggtcttcgccgcggtgccgtcgaagcctggcgctgagtttcctaatgccgcccgctggtacgagaccgtctctgcggctgtagcctcaagattccctggtaaggctgttggtgtaaatctgcctgcgggatcagctcctgcggcagctgctcctgcggatgaggctgaggatgatgatgaccttgatctttttggtgatgaaactgaggaggacaagaaggcagctgatgagcgtgctgccgctgccaaggcctcttctaaaaagaaagaaagtggtaaatcctccgtccttatggatgtaaaaccatgggacgatgagactgatatgaagaagctggaggaggctgtccgcagtgtccagatggagggtctgacttggggagcatcaaagcttgtgcctgttggatacggcatcaagaagatgactatcatgttgacaattgtcgacgatcttgtgtccatcgacactctaattgaggaccaccttacgcaagagcccatcaatgagtacgtccagagttgcgacattgtggctttcaacaagatctagagttcagtttctgagtttgggcaacggcagcggctcagctcgtcaagtttgtgctgggatgccagtttatcccttctagtctattacagaaacgttgttcggagctgagtctattataaacatcttggtctgagtttattgttgagtggtgccagtttttttcaatatacatttatcttaaaaacagcggtactgatgtttttttgtctaaagttaatgagtttgcaatggttctgagtct

SEQ ID NO: 25988 - DNA, 1744 bp, Zea mays
  Clone ID: LIB4071-018-A4_FLI
cgctgctgctcctctcctcccatctcaccacacaccgcagccccagcaagatcgcgcggaggccatggcgaagcccaagccttcctccgccggcgccaagccgaccgcgcctgcgccgccggttacagtgcactcggcgctggtcacctacacctccatgctcgcgctcctgtccctctgcccgcccttcgtcatcctcctgtggtacacgatggtgcacgcggacggatcggtggtgcggacttacgagcacctcagggatcacggcgtgctcgaggggctaaaggccatctggcccatgcccaccctcgtcgcgtggaagatcatcttcggcttcggcctcttcgaggccgtcctacagctgctgctccctgggaagcgcttcgaagggcccatctcgcctgccgggaacgtgccggtctacaaggcaaatggcttacaagcatatgcagtgaccttgataacttaccttggtttgtggtggttcggtatatttaaccctgcaatagtgtatgatcacttgggggagatatactctgctcttgtttttggaagctttgtattctgtatttttctctacataaagggccatgtatttccatcttcatctgactctggatcctctgggaatgtgataattgacttctactggggtatggagctgtaccctcggattggcaagtactttgatatcaaagtcttcaccaactgtcgtttcggtatgatgtcctgggctgttcttgccgtaacctattgcataaagcagtatgaaatgaatggcagagttgctgattctatgcttgtgaatactgcacttatgttgatctatatcactaagttcttttggtgggaatctggatattggtgtactatggacattgctcatgatagagctggtttctatatctgctggggatgcttggtatgggttccatccatatatacttcccctggaatgtaccttgtaaaccaccctttgaatttgggcccccagctagcactctcaattcttctagctggaatgttgtgcatatacataaactatgattgtgaccgtcagcgccaagaatttcgacggacgaatgggaaatgctcggtctggggcaaggctccatctaagattgttgcctcttatcagactacaaagggagaaactaaaaccagtcttctcttgacttctggatggtggggcttgtcacgtcacttccactatgtcccagagatactatctgcatttttctggactgttccagctcttttcaatcacttcctaccatacttctacgtgatctttctgactatattattgtttgaccgagcaaagagggatgatgaccggtgctcatcaaagtacgggaagtactggaagatttactgcaacaaagtaccatacagagtcattcctggcatttactgagcatctcgagttctggacgactcttgatattaagctcaacagatgccacgatatccagtcttcataccgatctgctactgattgtgtaatgtcgttggtaggcttgggctgtacgcagtattaggtgtaggcaacttggcttttggcatctaccttgtatgtgtcgtgtatctagggctggggcttgctccttcagttgttagacagtagggggtaatctcaggggtgcaatgtactccctccgtcctaaaataaaagcatatctagtatttaaattttgttccaaataaaaatgcacaatgaactataatatcgtgtaacgatgtc

SEQ ID NO: 25989 - DNA, 715 bp, Zea mays
  Clone ID: LIB4071-018-A8_FLI
gtcctcacgagtgaccgataatccgccggcgctaagatgttggtttatcaagatctcctatctggcgacgagctcctgtcggattcattcacctacaaggagctcgagaacggcgtcctgtgggaggtcgagggaaagtgggtcacccaaggtcctgttgatgtagacattggtgccaatccatccgccgagggtggtgaggacgaaagcgttgatgacacagccgtgaaggtggttgatattgttgacacattccgtctacaggagcaacctccttttgacaagaaatcatttgtctcttacattaaaaaatacatcaagaatctcactgctgtgttggagccagagaaagcggatgagttcaaaaagggtgtcgagggtgcaaccaagtttctccttagcaagctgaaggaccttcaattttttgttggtgagagcatgaaggatgatgcgtccgtggtattcgcctattacaaggatggtgccactaatccgacattcctctatttctctcatggtcttaaggagatcaagtgctaggcttgcggcgagattagttacccatgttgggtactatctatgtactattgttatatccacaactatagttgtcctggttgaattgaactcaaaagggtttgtttgagaaaaaactgtccaagattggattgcttgttaaagctctattgttattgaagtgttattgcttagttgt

SEQ ID NO: 25990 - DNA, 664 bp, Zea mays
  Clone ID: LIB4071-018-B10_FLI
gcgaccgagagattcatggagtactcagaccttgaaaaggttctgaacagtgaggctgctcagcctgaacaaggtaggaaaagaaagaataaaagaacctcacaacctaatttgtcttcggtcttccgtgctcacctttgagtgatcaagttgctgctgcggtagtccccaaccgtcatcatgcagaacgaggagggtaatacggtggacctctacatccctaggaagtgctcggccacgaacatgatcatcactgccaaggatcatgcctctgtccagatcaacattggccacttggatgcgaatggcctggtgatgctgacagctcgttggacaggccgtggcagaagaagaaggctgagatcaagcagtaggtcttgcacgtagttccaccaggaatggactcttgagggatactgttttagctatgttttatctcatgtatccgtactgtccagatgcaagtgttgtgctttcacttggcaccttaattctgaagactcaatattgttactaggtatatgcccgtgcgttgcaacggagacatataatacataagtccccgttgcaacgcatgggcactcacctagttatatatatatatatatatatatatatatatatatatatatatatatccaaaaacagatcatgcgaaccttcc

SEQ ID NO: 25991 - DNA, 660 bp, Zea mays
  Clone ID: LIB4071-018-F1_FLI
ccctggacctgctcaagttcttcatccgcttcgtgctcagcggcagggcatgggacaacctcctcgagaacaagaccgccttcaccaccaagaaggactacgggcgggaagagagggaggcgcagtgggccaccgcgcagaggacactgcacgggctccagccgccggaggcttcctccaacacgctgttcaacgacaagagcagctaccgcgagctgtccgagatcgccgagcaggccaagagacgagctgagatcgcgaggctgagggagctcaacaccctcaagggccacgtggagtcggtggtcaagctcaagggcctggacatcgacaccatccagcagaactacacggtgtgagagcccctctgctgcgatgtcgacgacaacacctttgctgcccgacgggagccatctgattacagataaaaattttcctagctgtaaagctctataccaccagatactgccatatgatggtatggttgggtacccgtctttctagggagtttcttttctctctctctcttttcttattgttatgtttttcaatagtggagtgtgcgcgtgttgtaatcgtttttacctgcgttttcctctaactagccggtgatctcgcgggaagcgaggtgaagaaataatgcaactaaaattctctgcc

SEQ ID NO: 25992 - DNA, 604 bp, Zea mays
  Clone ID: LIB4071-022-B4_FLI
ccggttcctgggaccgcaccgtcaaggtctggaaccttacgaactgcaagctgcgctgcactctcgatggtcatggcggatatgttaacgccgtcgccgtgagccccgatggatcgctctgcgcctccggcgggaaggacggtgttactctgctgtgggatttggctgaggggaagaggctgtactcgctggatgcgggctccatcatccactccctctgcttctcgcccaaccgctactggctctgcgctgcgacccaggactctgttaagatctgggaccttgagtcgaagcacgtcgtgcaggacctcaagcctgacatccagatctccaagaaccagatcctgtactgcacaagcttgagctggagcgccgatggaagcaccctctacactggctacaccgatgggtctatcagggtctggaagatctctggatatggctacgcaggctagatgtcgaaatccagtcgagggtctaggaggtcttgttctgcgaaacattgcaatgcggaacatagttttttttatgtgagttacatcgtctgcttggtactttatggtcgcccaactatctaagcttagctttgttaatgaagtttatt

SEQ ID NO: 25993 - DNA, 1424 bp, Zea mays
  Clone ID: LIB4071-022-F7_FLI
caaagagccctcgttcccctcctcttccgctcgagtccatcgccgtcgccgtcgccctgccctcgtatctcctcccacgacaccggtgaccaccacaggccaccgtcctgatcctcatccgggtcatccccaggcaggcaggtcggcgaggagggcagcaagaccgagccatgcgggggctcgggacgggaacgggacaggaccccaaaatctcagatccttcctgctcgcccgcccgtgcccgtcggcgcgtctttcttgccgtccgcgccccacctccgccctctcctcctccaggggaatcagatatgccacaggctgcgcgatggtgttgtgggtcttcggctacggctccctcatctggaacctcggcttcgacttcgacgacaaaatcctcggcttcatcaagggctacaaccgcacctttaatctcgaggcacagcggagcatccggcgaggacctgcacgcttgaaaccgacgacgaggcgacgacgaggccatatgctggggaattgcatattgtgtcaagggtggtccagaaaaagagctaaaagcaatgcagtacttggagagaagagagtgtgagtacgaccagaagatatccattgatttctacaaggaaggagatcccctgaaaccagctgtgatgggcgtcttagtgttcgtttccactccagatccaattggcaacaagtactatcttggccctgctcctttgcaggatatggcaaggcaaattgctacactacagccaatggccctactggctataatagggattacctgttctcaatggagaaggcattagccagcattagtccccaaactcgacgcgcaggtacgagaattagccaccagccgacgggatctcgatggcgagctccgcgtagcagaaggacaagagcagcaccgccaggtccccaaaccattttcgcgcgggtataaaagcctggcatggtgttccattgaataggtcactggagtggagtgggtggcataccaaggacaaagcaactggactttctcatccgaaccatcaagtggcctccatagaccaccggtgtcaaagatgaagtcactggagtggagtgggtgacataccaagcacaaagcaaaggcatatgcagggtgatgatgatgtcgtagtgatgggccttgaggtagagcacagaggcagtaacgtggcggagtgcaacaagcagtagctagacagtataggcattgaccaagtagaggttaatgcagacaccaacagctccgggtcaggaccatgctgtgtatctcaagatggtcatgacttggagttctacagtgaggatcatgtggagtgtccagtgaaagtcctccataaaaaaaccttaattagtggggagtaacattgtaatggttgttggcaaatgataatatatgtgttgtttgtttt

SEQ ID NO: 25994 - DNA, 916 bp, Zea mays
  Clone ID: LIB4071-023-E2_FLI
caggatcctaggactgagaataatccttatcttggtttcatctacacctccttccaagagcgggcgaccttcatctcgcatgggaacactgctcgtcatgccaaggactttggcgacttaaagctcgcacaaatctgtggcatcatcgcctcagatgagaagcgacatgaaactgcgtacaccaagatcgtggagaagttgtttgagatcgaccctgatggtacagtggttgctctggctgacatgatgaagaagaagatctcaatgcctgcccacctgatgtttgacggtcaggacgacaagctgtttgagcacttctccatggtcgcgcagaggcttggcgtttacactgccagggactacgccgacattcttgagttccttgttgacaggtggaaggtggcggacctgactggtctgtcgggtgaggggaacaaggcgcaggactacctctgcacccttgcttcaaggatccggaggctagacgagagggcccagagcagagccaagaaagcaggcacgctgcctttcagctgggtatatggtagggaagtccaactgtgaaatcggaaacccattgcgactgcttgagttggagcatagtctatcatgcaccctatgacgcatcgcgacgacaagacctggtgtgtcgcgtgacatagttgttcaggttttgaccaaatggtctgggagcatttgttttgccttgtgccgtctcatagagcgttaggatagtgtacgtctgtgttctagctttgttttgtctgctgctttgatgtacaacttgtggccatgaggctggacatggagtgaacatgttgtacattgtcgctggcggtatgtttcggtatgttatttcagttgttgagatctgttaatttttttgtgagctatggaggtcgttctgttctggtcg

SEQ ID NO: 25995 - DNA, 850 bp, Zea mays
  Clone ID: LIB4073-001-A1_FLI
gagaagccatccggatcaagaagcgcgaggcagagcaggagaagccagcgaggagagatcgatggaagccaagaacggctacagctacagcccgctcgccggggacgaccacgaggcggcggcggcggcggcggaggtgatcagcaccaccggcgccggttttggaggcgacgacgtcaagctcaggctgctcggatacaagcagcagctcaagcgagacctctcggtggtggccaacttctcggtgagcttctccatcatctcggtgatcacgggcgtgacgacgctgtacgggacgggcctccagttcggcgggccggtgaccatggtgtacggctggcccatcgccggcgccttcaccgtcgccgtgggcctcgccatggccgagatctgctccgcctaccccacctccggcggcctctacttctggagcgccaggctctgcacccaccgccgatggggacccttcgccgcctggctcaccggctgggtgaactaaacaaggcgtttggttgtactgcaggtacaaccaaatcataatttgatttgacaattcgataccgatacaagtctcaagtctctctgtccaacttatattgtgtcaccaattagtaacggggagacggaagtggcgagtgtccggcacgcaattgcacttttgatacgcttactattagccgtgacttttgacaaaaaaatgctcctccggctccaggagaaaaagaggtgaccatctgtaggagttttatataatatctaggccttgtttagttcacctcaaagccgaaaactttttaagattttctgtcacatcgagtcttgcggtatatgtatggagcattaaatatat

SEQ ID NO: 25996 - DNA, 717 bp, Zea mays
  Clone ID: LIB4073-001-A2_FLI
ggacttcccggcgcccgttcaggatccacatccttcccgagcgagttcttggttgacctcttcctcttcgaccacctcctaggctcttggtgtagcttgccactctcaccaatcaagttttcatgtctgatctcgacgttcagatcccaactgccttcgatccctttgctgaggccaatgctggggactctggtgcggcagcaggatcaaaggactacgttcatgtacgcatccagcagcgtaatggtcgcaagagtctgactactgtccagggattgaagaaggagttcagctacagcaagatcctcaaagatctcaagaaagagttttgctgcaatggtacagtggtccaggacccagaacttggacaggtcattcaactccagggtgatcagaggaagaacgtctctaatttccttgtccaggccggcattgtgaagaaggaacacatcaagattcatggtttctgagcgaccgccgggtccatagcaagccctgcatgcaaagcagctatatatctgaggtggagcatatctatctggctgtgtacaagcaggcctactactacgcctgcgcgttctcctatactacacataacacatagccccctccctgcgtgtatgcttgttaccgttgtgtcgaatcttgtacgaggctccatcgaacttcgatggcttgcttctttatcagaacaagattgaataaacgatatttggt

SEQ ID NO: 25997 - DNA, 819 bp, Zea mays
  Clone ID: LIB4073-001-A7_FLI
gtgcattccaaagctagtacacaagctagcagtctcctcgatcccagtctcgatcagaattcagacaccaagaacatcgacgacatggctcggcttgctgtggcgatcgccgtggtggcggcggcggcggtggtggtgctggcggcgacgacctcggaggcggccatctcctgcgggcaggtgagctcggccatcgcgccctgcctgtcctacgcccggggccagggctccgcaccctcagcaggctgctgcagcggcgtcaggagcctcaactccgccgcccgcaccaccgccgacaggcgcgccgcctgcaactgcctcaagaacgccgcccgtggcatcagcggcctcaacgccggcaacgccgccagcatcccctccaagtgcggcgtcagcgtcccctacaccatcagcacctccaccgactgctccagggtgagctaaacctaaacgaggatgatcgatcgatgatccattccgccgccgtcgccgtcgtcgtcgatcggcgccggccggagcatcgaccatggatcgagtttgtctactactgctacgtcgtaatactgaataaaaatctctccgtatgtacgtacgtacgtgtcgtcgtgtacgctgtgatacgcttgcatcttagcgtatgtacgtacgtgcgtgtgtacatgtgtgtgtgagagatgtacttttgcttgttgggtttatttttgagtgcatgcactgtgtgcggtgtttattatttatgtccgtgtacgttcctctcgctcctgtggtttgtactatgttcgatcactgctacatgcacacacacatcttttcgtttcc

SEQ ID NO: 25998 - DNA, 846 bp, Zea mays
  Clone ID: LIB4073-001-B9_FLI
tccaagcaaccaaagcaacaaccacagggcgatcgatatcgatcgcggcgttgctctgatcgccggcctagctattccagctgctgggctgcctctgaccggcgttcgacggcctgcttggggttaggatcggagctagagtctggggagggacgacagagatcggccggcggcggccatggcgtggatacggtcgctcttgtcgccgctcaagaagctctgggtccgcatgcattccgaccagaacaagaagaggggcatctacatcctgtacgaggacgtcaagtcgtgcccctgcgaggacgtgcagatcctctggtccatcctcgtcgagtcctcccacccgccgccgccgctgcgcctcaagcactgactccctccgaccaccgtccgtccgcccacgtcgagcacggcgcagtaacgtaccgacgggcgacggcgcgcgccagccggagcatcagcaggcgactgattgttgcattggtccgaccgacacaacggaactgccggtgtatgtacataaagattttccagtggttcaccttcttcagccgtgatacgatcggcggttgaaaaaaagaagaagaaagagttccccctttatttgatccatccatggagatggtgtgcttaggagatgagctccttttgttcatcctgccccgtcctccagcagatcagaagcagagcagggcgtccgtccctcaccgacaccgcgaattcgaagcgagtttttttccttttcctttctcttttgctttcgtttttggaaaaggaacggcacggttggtgtcctggtgatcagggtcaatgggccgcgtgtgcctctgtctagcttgtaaatac

SEQ ID NO: 25999 - DNA, 938 bp, Zea mays
  Clone ID: LIB4073-001-D1_FLI
cctcccccatttctcttcccctgcgatccgagcccgcacccgcagggaagagaagggatcacctgatcaccagggcgcggcctcgcgatctcgcggaggagcggagatggggctcacgttcacgaagctgttcagccggctcttcgccaagaaggagatgaggatcctcatggtcggtctggatgcagctggtaagaccaccatcctctacaagctcaagctcggcgagatcgtcaccaccatccccaccattggatttaacgttgaaactgtcgagtacaagaacattagtttcactgtttgggatgtcggtggtcaggacaagatccggcccctgtggaggcactacttccagaacacccagggcctcatttttgttgtagacagcaacgacagagagcgtgttgttgaggccagagatgagctccaccggatgctgaacgaagacgagctccgtgatgctgtgcttttggtgtttgcaaacaaacaagatctgcctaatgccatgaatgctgctgaaatcaccgataagcttggcctgcactcgctgcgccagcggcactggtacatccagagcacatgtgctacctctggtgagggtttgtacgaggggcttgactggctttcgaacaacattgccaacaaggcttgaagcatctaggcagggcttcaatcaatggaaacactctggatacttggggtacgaactgcctctaccattacagcgatgaactatagtcgtgtctgtcggatgtggggatgtttttgggaggataaaaggctctttggtcaaggagctaggtatcagatgttttcgtggtattgttaatttctgttttggtttgtgcaaggtataccatgtccgactgtgtgctgtgtactcgccactgttctataatgtgctgtatactctcgacccctgactgaggcgttgtact

SEQ ID NO: 26000 - DNA, 643 bp, Zea mays
  Clone ID: LIB4073-001-E6_FLI
gggtccgaagcgaagtcttgctagggtttgggttggggggaatctgacgcgagagcgggagcgaagggggaggagaagatgatcgaggtggtgctgaacgaccgcctggggaagaaggtgcgggtgaagtgcaacgaggacgacaccatcggcgacctcaagaagctggtggcggcgcagacggggacgcgccccgagaagatccgcatccagaagtggtacaacatctacaaggaccacatcaccctcaaggactacgagatccacgacgggatggggctcgagctctactacaactaggcgccctgacccaccccgaccgtgctgcgtgcccccctactgctgtgaggttaatctgaatttttctgaagccatgggtgcacttccagtcgcagtgtctttagctaatgagctcacatacatataggcaacttgagtgagctatgtagtacatacatggttgttgcaagttaccaatgactattgacagccttgcatatattgtcatgtgacaaggatgaacctgcaaaattagtgtgctgctactcgcagaccttaccttaaataacacaggttggtcgtgataatcacggtcctgtgcttctgttatgtgataatgtgaaatatacttggccatgtttgg

SEQ ID NO: 26001 - DNA, 545 bp, Zea mays
  Clone ID: LIB4073-001-F4_FLI
ggacgtcccctgaacacaccggcgaacgggcgaagagaaggcgaagaagcgatgggcgtcaccaaggaggacgtcgaggcggccatcacctccgctctcagcccttccaatctcgtggtcacggacacatccggagggtgtggtgcgagctacgagatcgaggtggtctcggagaagttcgaggggaagcggctgctggagaggcaccggatggtgaacaccgcgctggcgcctcacatggcggagatccacgccgtctccatcaagaaggcgctcaccccggcgcaggcccagccccagccggagcccgccgccgataagccccaggcctaagtgcttaattaaaaccccccaaaacggtttgatcacatatgctgatgcagcattagtccctgagtcaagctatgcataacgcatctgtgtaatatgtggtatgtgctacattgactgtctgcttgaataatgtggcggatgaaatttctaaattgcaggatgttatccttgactcattagaaacttctgcactatgcatttaacttctcact

SEQ ID NO: 26002 - DNA, 726 bp, Zea mays
  Clone ID: LIB4073-001-F5_FLI
gcggtcctggcggcgctgctgctggcgtcctcggagccggcatcggcggcggtgagctgcagcgacgtgacatcctcggtggcgccgtgcctcgggtacgcgatgggcaccacggcgtccccctccccggcgtgctgcaccggggtgcgctcgctcaacagccgcgcgtcgtcgacggccgaccgccaggccacctgcgcctgcctcaagagcatgacgagcaggctcggcggcggcggcggcggcgtcagcatgggtaacgccgccagcatcccctccaagtgcggcgtctccgtcggcgtgcccattagtcccaacgtcgactgctccaagatcaactgatgatcgatcataaggacatgcatgaggcatgctcgttggatggcgatcagcatgcagtcgttgttttaccagatgtccatgactccctcccatggatgatgcatgcaatgagatagatacataaattaaggagtagatcatgcatgcacctgttagtgatcactccgtttaattagtatttactgtttactaccttgagtttatacaccaactctgtcgtcgctgtggatgtcgtctcgtgtgcctcgatcgtacgtgtgtgtgtgtgtgtagtagtagcagggtagcaaagcagcactcaatgtcgtccttgggggtttgcttgcctttaaccttgttgctttggcacaggtttctgaataatgaaaacaagcttttgtgtcc

SEQ ID NO: 26003 - DNA, 780 bp, Zea mays
  Clone ID: LIB4073-001-H1_FLI
aatctcctcccccaacttctccgccggatccctgaaagattcccggagatgtcggactccgaggagcaccacttcgagtccaaggccgacgccggcgcctccaagacgtacccgcagcaggccggcaccatccgcaagaacggctacatcgtcatcaagaaccgtccctgcaaggttgttgaggtctccacttccaagactgggaagcatggccatgccaagtgccactttgttggaattgacattttcactggaaagaagcttgaggatattgttccttcttctcacaactgtgacgttccacatgttaaccgtgttgagtatcagctgattgacatttctgaagatggatttgtcagccttttgactgagagtggcaacactaaggatgacaccaagcttcccagtgatgaagctctgcaagcccagatcaagagtggatatgatgaaggaaaggacatcctcctgaccgtgatgtctgccatgggcgaggaacagatctgtgctgtcaaggagattgggggcaagaactaaagctgctgcttcgctccggctgtttgtgggcaatacctgttgtcttgtgcttggagttgagaagccaagttgagatacatacataggcgtttaagttatctgtggttttgggtttacctggaatgtgttgagatggtgcgagtacttgtggtacttggttattgatctctggtatctttttgaactgagtaatggtgtaactctggtagtgcatcaatgggaattacaatatatatttgttaaatt

SEQ ID NO: 26004 - DNA, 1164 bp, Zea mays
  Clone ID: LIB4073-002-A12_FLI
agctgcaccgcagcaacaaacctttggccagaagctgaagtactactgatctgatccagtatggcaatcgcgccgaggatcatggcggtcctggctctcggcctagcactcctctgcgctgccgccgcgcagaactgcggctgccaggcaggttactgctgcagcaagttcggttactgcggcacgaccgacgagtactgcggcgacgggtgccagtcgggcccgtgccgctctggcggcggcagcagtggaggtgggaacgtggctggcgttgtcaccgacgcattcttcaacagcatcaagaaccaggccgggaacgggtgcgagggcaagaacttctacacccggagcgcgttcctgagcgccgccgacgcgtacaaaggcttcggtggcaggtcggtgcagggcaagcgcgagatcgccgccttcttcgcccacatcacgcacgagaccggacatttctgctacatcagcgagatcaacaagaacaacgcctactgcgactcgagcaacaggcagtggccgtgtgccgcgggtcagaagtactacgggcgcggcccgctgcaaatctcgtggaactacaactacgggcctgccgggagggacatcggcttcgacgggcttcggaacccggacagggtggcgcaggacgccgtggtcgcgttcaagacggcgctctggttctggaccaacaacgtgcacggggtgatgtcgcaggggttcggcgccaccatcagggccatcaacggcgccctcgagtgcaacggcaagaatactgcccagatgaacgcgcgggtgggctactacaggcagtactgccagcagctcggcgtcgaccccggacccaacctcacttgctaggtagctaggcgagcggcgtcggcgagtcctttggctcctcgtcgcacggctcgtccagaataaataaatgcttggcatcgcacccttcgcgaaacctagttttgcgacggaacgtgctagcaagcagtaataataaaacgccggggctgagcccgtttgttcaaccggaataatgaagcaactgtattatatgcatgttgcctcgaaacagtgtgtacgattgcagatcgcttgtactctttacggttgcagcgagggtttaaaaactgaaccaatatgcaaagtttacggttgcagcttgct

SEQ ID NO: 26005 - DNA, 581 bp, Zea mays
  Clone ID: LIB4073-002-B12_FLI
cggacaccacaaataaacaccatatatccagctcgatcgatcgacgataaacaacaacacatggcgaagcagcagcaggcggtggcgctgctgatgatgctggtgctggctgcggagacggcgtcggcggcttcgtgcaacgcggggcagctgacggtgtgcgcgtcggcgatgttgtccggggcggcgccctcggcggcgtgctgctccaacctcaaggcgcagcaggggtgcttgtgccagttcgccaagaaccccgcctacgcgcgctacgtcaacagccccaacgcgcgcaagaccgtcgcctcctgcggcgtcgccctgccgcgctgctaattactcttacggtatatatatttaagccgccatgcatcacgtacggctgctgccagcgccgctctctcgggcgtatctgcgaggaataaaggatgggttattcgtccatgcactttgccgtctgcctggctgctcccatccctgcttatattatatatgctctcgtatatgcacgtttgtgtaatgtgtgcccatcgatataaatatatttatatatatatatatatataccggtccagtttgtc

SEQ ID NO: 26006 - DNA, 637 bp, Zea mays
  Clone ID: LIB4073-002-B5_FLI
cctagccgccgccgccgtcgctgctcttcgtcgagatgggaggcaagtgcccgcaccgcaaggtgaagaagcgccgcctctcgcacaagacggcgcgccgcggtaagttcctcctcaaggccgacgatgccgtctacgacgagctcgtcaagctggccgaccagggcaaggacgctgaaggcaaggagctccccgtcgacgaggacctcccaggcatgggacagttctactgcctccattgcgatcgctactttgctagtgaaagtgtgaaggatgaccactaccgctcaaagcgccacaagaaaagggtcaaggtaatgtctgggccagccccacacacgcaacttgatgctgaacttgctgctggaatgggaaagcctgacaatggcctgaagcttatgtccatgtgaaggaacctcttgttattagtacttgttccgtgttttcgttgctgtcgtacatctgaagctgctttgctcagtattagcagagttagtagatggtttttattgtgcacaagacttttgaaaggtggggcttgatcaggagggggagttggttttagagaggtgtcaggggtcaatgtttgtatcatgaaatcatttaccgacccatactagtaatgatgatgtctcgt

SEQ ID NO: 26007 - DNA, 848 bp, Zea mays
  Clone ID: LIB4073-002-C3_FLI
ttgggcgaacgacactgtacacaaacctagctatactagcttagacaacgacccaaaccaaccagcaaccatggctggtggtgctcatcaacaggtggtggttgtgctcgctatggtggcgctcatggtgacggcggccgagggtttcatctccaagaagacatggagcgccatccggcgagcggaccgcgacggcccctttgtggggctggtggtgcccaacacctacgagatggaccccgtcctaagctctcctgacttcaagcctagcaacaacatccccattctagatgtccaagggcgacgattccgcttcggaactattggaagccaaaacgttgtcatggtcatgactgggctgagcatgctgaatgcagggctcaccacccagctgctgctgagcctgttcagggtgaaaggcatcgtccactggggcatcgccggcaacgccaacgaggaccttcagatcggcgacgtgaccatccccgagtcctgggcgcacctgtccctgtggaactggcagaggcacggcgatggtgcggctcgtctctcagcaacgaggccgccacgttccttgacatcgcggccaagaacgccgtcgacgtcatgctcaagttcgtgcccctccttggccgcggtggcgagcaggagcaggccgacggtctggcccaagacatgtaatgtaaggcgggccaggagacagatagacgacgctgagcagtcacgtcgtggtacaatacaatttcgtcttgtaaggtttttatttaaaataatttcccacccacgaattaacttgtatcgctattgcaaacctatcttcgggaataaataagattggttgtcgtgcc

SEQ ID NO: 26008 - DNA, 539 bp, Zea mays
  Clone ID: LIB4073-002-E7_FLI
tggaggtccactgctcaccatcggggatctactcagcgacctcgccgtcgacggcggtgacgaccccctcgtcggcgtcggagatgcgtccgccccctcctctccatcggcgacgcagcaagcggggaaggccgatccgtccgatctcagccggctcttcgaggaacactacaacaatttgatgaaagctctagaagagaaggatccttcatggccctcgctgatgctgaagctgtgcgcagcattgaagactgcagataagctggtgagttgcgcgaacatgaacgcggaacagctgctggagaaggtgaaggcgctggagggcgtccttgagaggagcgatcatgcggtggcagagattgtagaagctctccagaagtctggcctcgccaaggatcgtcaaggttcccaataaaaaacggctagcaagtagtgacatagtgctgtactgtactggtgtcacttttttgtttatcatatatcatgcaaatctctgggtattaatagttgtatgtcgacctgtgcctccacagctttgc

SEQ ID NO: 26009 - DNA, 1210 bp, Zea mays
  Clone ID: LIB4073-002-F2_FLI
caccggcacagctgcaccttcaccgcgcacagctgcaccttcgtcacgtcctgcaccacgggcagccgctctatctccctgtccatcacctgtgccatcacctgctgttgctgctccttccaaggtcggcatacaagcattggttggtagtgctagcatcgcctcaggttcagctgtgattggaaggggggctattgcctctggtgcggctggcatggtgaagaagagtggtcctagtcttcctgctggagcaggggtgagaaggaagactggttggctctcaaggtgggtgagctcatgctcagatgatgcaaagactgtcttcgccgctgtgaccgtgccactgctctataaatcatccctagctgagcctaggtccatcccatccaggtcaatgttcccaacatttgatgttggtgaccggatccttgctgagaaggtttcatacattttccgggagccagaaattttggatattgtgatctttcgtgcgcctcccgtgcttcaggcattgggctacaactcaggtgatgtgttcatcaagagagttgtggctaagggcggggacatcgttgaagtacgtgatggtaacttgttggttaatggagtagttcaggaggaggactttgtgctggaaccagccgactacaaaatggatccgctgactgtgcctaaaggctatgtcttcgtactgggggataacagaaacaacagctttgattcacataactggggtccacttccagttaagaacatcctcgggagatctgtcctccgatattggcccccatcaagaataacagatacaatatatgagcatgacatgatgcagtacacaggtgctgcatcctgataatacattgtggcaataccacatgttgcaggcccatttttcctttcccggctgagctttgctgacaagtgatatgctgagccgtggggttctttatttattggttgtagcctttcctcaaatgccaattggcaggttggctgacagattagttttttcccctccctacgggcagatgcttgtttgaaggcaacaattcttgtactctgtagctaagaatgaatgtcatataaacgttgcagaagtagatgaacgagcgtccaggactaggatgaggatgacagttttcttgttttaggagacgagttggtgctcgaaacttatgtaaaggaaatacaaagcatttatgatttgctc

SEQ ID NO: 26010 - DNA, 937 bp, Zea mays
  Clone ID: LIB4073-003-C8_FLI
cctcgcgcaggcttatagtcagtgatggaacacaaggaggcgggttgccagcagccggagggcccaatcctatgcatcaataactgcggtttctttggcagcgctgccaccatgaacatgtgctccaagtgccacaaggagatgataatgaagcaggagcaggcccagctggctgcctcctccattgatagcattgtcaatggtggtgatggtgggaaagggcctgtaattgccgcaactgtagatgcggcagttcctcaagttgaggagaagactattgttgtgcagcctatgcatgtagctgaaaccagcgaggctgctgctgtaatccccaaggccaaggaaggcccaaacaggtgtgcaacctgtaggaagcgtgttgggttgacaggatttaactgccgatgcgggaacatgtactgttcggtgcaccgctactccgacaaacatgactgccagttcgactatcgaactgcagctagggacgcgattgccaaggccaatcctgtggtgaaggcggagaagcttgacaagatctgaggcgggcattggggagcgaggtggttgcaatctgcaagaattcatcatgcatctttgctgctttatcattgaacttcccattcttgtctgctgtcacatcctctgaggttcaatactgtgatgcacacagcatcctggcagctgcaagaattcgtccccagtcgagtccaaaatggtttgcgtgttggctatgtcgtgtaagcttattcagttattcatggtggtttcggtcggtattgtggcattcccatttaggtagctctgtaatgtactattgtctcatgcatgttaaattccaatcagtaatagtaatcagcaattgtctgccatatttcctacaagtatattttctggttctattttttgtgtgacatttcatctgacttcacattcagtc

SEQ ID NO: 26011 - DNA, 660 bp, Zea mays
  Clone ID: LIB4073-003-D2_FLI
cgagccatcccattaattcccataagcactgtactgtgcctgcgcctaccgacgagcattgctgctgcctcggccagtcggccggcatggcggcagcgccggtggaggtgggcgcgcagggcacggtgggctcgctggtgctccgggaggtcgagtacttccggcggatggaggtcgccggcggccacggcaagaagagcagcagcaaggtcgttggagccagcggcggcagcggcagcggcagcccgtggagcgacagcggcaagaagccgaagccgacgacgaagaagaagggtgccgtagcagcaggcaatgggtccttcttgccgaggatgtgctcgtcggcggaggtcgccgaggaccccggcagcggccggagggagcggccgtccagggtccgctaccggcctctgggcgacgacgacggggacgctctgcctcagcaggactagctgatcagagggatatgtgctgcattattattcttcttctgtatcagattcagatccggagaaatctgtgccgatactaggtactggatgccatttttctcctccgtttcttttggcttcccctccgcttgttcagtgttagtaacatctaggactattagtagatgagaaaagtatttgatattatgacgactgtggtttgactcgt

SEQ ID NO: 26012 - DNA, 768 bp, Zea mays
  Clone ID: LIB4073-003-E12_FLI
tcaaccacacacactcacacacgtctcaaactgacggcgacgatggctgtggtgagcaggaagacgtcgacgatggtggcagcagtggccgtggtggtggcgctgctgctggcgtcggcgtcgtctgcgtcggcggcgatcacctgcggtcaggtggggacggcgctggcgccgtgcatcccgtacgcgacggggagggcgagcgcgctgccgtcgtcgtgctgcagcggcgtgcgcagcctgaacgggcaggcgcgcagcagctcggaccggcaggcggcgtgccggtgcctcaagagcctcgccaacagcgtcaagagcgtcaacatgggcaccgtcgccaccatccccggcaagtgcggcgtctccgtgcctttccccatcagcatgtccaccgactgcaacaaggtcagctaaatgatgaaatctaccacgtaagtacataccagtgcacgtgatgaagctagcaagccaggaaaaataaaataaagttgtgtggtaacatacaggaggattaatagcatgctgtatctatatagtattatgtaaccgtgtgcatcatgcactgtgcacatatacatggatatatatatatatgtatgtgtggcttgcagtgcgacctagctagcttctcgatcatgtgctcatgcatgtatgcggatgatgtgtgtgtgtgaacagctactacactgttgactgttcagtggcttggatcgacctacttgttcggatagttaatggtttgctatatagcggtgcttgttaatc

SEQ ID NO: 26013 - DNA, 140 bp, Zea mays
  Clone ID: LIB4073-003-F1_FLI
accttttaactttgaaactttacctgcatttgtgcgatcagatcatgaaatagcagaagcttctttggtcatcccctgccttctgctcgacatgtgccttctggttggtgcgacaatatatcaactctgttatgctgtag

SEQ ID NO: 26014 - DNA, 1205 bp, Zea mays
  Clone ID: LIB4073-003-F12_FLI
tgaagttgattaaaaaattagaaaaaaatgggaagtgaacaaaagaaaccggcatatatcaagtacttgtttggtggtttatcagggatgggtgccactctcttcgttcagccattggatttggtaaaaaatcgtatgcaattatcaggcgctggcggcggtaaaaaagaatacaaaaataccttcgatgcattaagtaaaattttgagaactgaaggtataactggaatttataaggggcttggtgctggttttttgcgacaagcaacgtacacaacaacacggttgggcgtatacaccggtcttaatgattcatataaaattaaatttggaggatcaccaaatctgttagcttcaatgttaatgggagttatcgctggtgcttcaggagcatttgttggaacaccagccgaggtggcgttaattcgtatgacagctgatggacggttgcctttgaatgaacgccgaaattatgcgagtgtgttcaatgcattgacacgaattacacgcgaagaaggtgtactgacattatggcgtggttgtataccaacgatgggccgtgcaatggttgtaaatgccgctcaattagcatcatacagtcaagctaaacaatatttgattcgcagtggatactttacggaaggcattaaattacatttcgtggccagcatgatgtcaggttttattacaacggttgcatcaatgccggttgacattgcaaaaactcgtctacaaaatatgaaagtatcggccgatggtaaggccgaataccgtggtacagttgatgttttaagtcgcgttattcgccaagaaggtttatttgcgctatggaaaggttttacgccatatttttgtcgtttaggaccgcacactgtactcacattcatattccttgaacaaatgaacagcatgtataataaattcgtgcttggtgactcaggaagtggctcaggactataaagaacaataaactattcaagttaatcaataagtctcgaattgttgaattattcaaatttttttaaaagcaaaaatggcattaattttattgcatattttgaaaaaaaaaatttgctactgactaaaggaagaaaaacacaaatatttagatgtttttgtccgaacagtaaattccgttacgcagcattgaagacaatatgacgcacactattataataaaagaattgtattcaactaaaaatgag

SEQ ID NO: 26015 - DNA, 927 bp, Zea mays
  Clone ID: LIB4073-003-G10_FLI
ctgagctcgagtactgtagggttgtgatggcgaggcggttgctgctcctgccggcgctgctggtcgccgccgcgctcgcgggcggcgcgggcgcgcagctctcggcggggttctactcgtcgacctgccccaccgtggaaagcgtcgtgcgccaggccatgtcgcaggccgtcacgaacaacacccgcaccggcgccgccatgctccgcctcttcttccacgactgcttcgtcaatggctgcgacgcctcgctgctgctggacgacacgcccacgacgcccggcgagaagggcgccggcgccaacgccggcgcctccacctccggcttcgacctcatcgacaccatcaagacgcaggtcgaggccgcctgccccgccaccgtctcctgcgccgacatcctcgccctcgccgcccgcgacgccgtcaacctgctcggcggcccgagctgggcggtgccgctgggccggcgggacgcgacgttcccgaacagcacgggcgacgacgcgctcgcgccgctcgactcgctcactccggacgagttcgacaacggctactaccggagcctgatgaccggcgccggcctgctgcactcggaccaggagctcttcaacaacggggcgctcgactcgctggtcaggctctacggcaccaacgccgacgccttctcgtcggacttcgccgcgtccatggtcaggctcggcaacatcgccccgctcacgggtgccgccggggagatcaggctcaactgcaggacagtcaattcgtgacttcagtttcagaatcacaagggatgcgaatctgtttgactcgttcattgattcgattccatgcgacgaatgaagcatgacaggaatgaaaagtagaaaaataggattcgaatgattccattccattgcatcattgaattgatactgttcttttccccgc

SEQ ID NO: 26016 - DNA, 494 bp, Zea mays
  Clone ID: LIB4073-004-A1_FLI
caaaggtgtaatcaatggaactgcacctaatcctgtgcgtttgtcggagctatgcgaacggctggggcgaatcgtcgggcggccctcctggttgcccgtgccggaattcgcgctcaaagcggtgcttggagaaggcgcttctgtggtgttggaaggacaaaaggttcttccggcgaaggcaaagcatctgggcttctcctacagatacccctatgttgaagacgctctcaaggccattgctcgagacttgtaggttggcgacagtgagcaatttaatttaatttctctctacaaaaattaaataggacctttaatttgtgacgacacgcatgcatgcatgtgtatagagtttacactccgatcctccggcctcgtttgcatgcgcgtgttatgtaacacttgctctcttttcccttcttttgacatcatcaaatgttgtactcctagtagagtacttcttaatacaagtaagagttcacctttcataaggacag

SEQ ID NO: 26017 - DNA, 751 bp, Zea mays
  Clone ID: LIB4073-004-A11_FLI
cgccagaaataatcaagggagaaggccatggcagtgctgtggattggtggacctttggtatattcctttatgagctcctatttggtaagacccctttcaaggggtcaggaaaccgggctacactcttcaatgttgttggtcagccccttcggttcccagagtccccaattgtgagtttctcagctagggacttgataagaggattgctggtcaaagacccgcagcatcgtcttggctacaaacgagggactactgagatcaagcagcacccgttctttgagggtgtgaattgggcgttgattcggtgtgcaagccctccggatgtaccaaagcctgtcgagctggatcgcccaccaaaaccggccccagctaacgataaggttgctccagctgccaaccagaagggcccagataactttctggagtttgaattcttctagagttgttttcctttcagttttgtaatgtgggttggtgcatgcaagctggtgtatgaaaggaggaagatcagttcggaggcgtatactgtgatgactggtgatgctctattgtaagctgtagttctatttcgagtagctcttgttcgttttttttctctccattgaactgctaaagaccctatttgtaccgggtcaatgttgcaattttttttagaaaatcttgtggtgcttaaaggacacaggggaatactttcaccctggcattgtaaatcctgtttgatttggcatcaattgcaactgaatttcctttc

SEQ ID NO: 26018 - DNA, 969 bp, Zea mays
  Clone ID: LIB4073-007-F3_FLI
cgccgctggcgctcccgctcccgccatcaccaagccgtcgctatccaagaagccctcgccgtcgttccgcctccggaacggcagcctcaacgctctgcgcctgcgccgcgtgttcgacctcttcgaccgcaacggcgacggcgagatcaccctcgacgagatggcctcggcgctcgactcgctcggcctcggcgccgaccgctccggcctggaggccgcggtgggcgggtacatcccggccggcgctgcggggctccgcttcgagaacttcgagtccctccaccgcgcgctcggggacgcgctgttcggccccatcccggaggaggtgcctgaggacgacgacgagggggacatgaaggaggcgttccgggtgttcgacgaggacggtgacggcttcatctcggccgccgagctgcaggccgtgctcaagaagctcggcctgccggaggctcggagcctggcctctgtgcaggagatgatctgcaacgtcgaccgcaactgcgacggccgcgtcgacttcggcgaatttaagaacatgatgcaggggatcaccgtgtggggcgcttagctgcagcactccttcgttgtcaccccctctactgcgtggtttcatgttctggagcatctaaagactagaaactggtgccaggtttaaatgtactaagggttctgttagttttgtagcttggagttagtgatgttgtgtgtcctacggtggtcagaatgcaggtgatgacttgtgatttcagtgcgttctaagttctataactttggtggttctgccccctagtgtagatattctgcttctgtacgtagtgtcttccttgctctaataaactctctgaacacgagacatccagtttatctatcaacaaaattgttatgaacacgcatgcttgatttctactacaatgtaatttgccatctttcttggcacagagagattcatataataatcagtgttcctgt

SEQ ID NO: 26019 - DNA, 1067 bp, Zea mays
  Clone ID: LIB4073-008-D12_FLI
cacacccctaagcttgagcttagcttagctccacactccagctccaagcacacagtcgtggttagagggccgtgaaaatgccgatcagcaggatcgccgtggggacccaccatgaggtgtaccaccctggcgccctcaaggcggcgttggctgagttcatctccaccctcatcttcgtcttcgccggccagggttccggcatggccttcagcaagctgacgagcggcggcgcgacgaccccctcgggcctgatcgcggcggctgtggcgcacgccttcgcgctgttcgtggcggtgtccgtgggcgccaacatctccggcggtcacgtgaaccctgccgtgaccttcggcgcgttcgtgggcggcaacatcaccctgttccgcggcctcctgtactgggtggcgcagctgctgggctcgacggtggcgtgcttcctgctccgcttctccacgggcgggctggccacgggcaccttcggcctgaccggcgtctccgtgtgggaggcggtggtgatggagatcgtgatgaccttcgggctggtgtacacggtgtacgccaccgccgttgaccccaagaagggcagcctgggcaccatcgcccccatcgccatcggcttcatcgtcggcgccaacatcctggtcggcggcgccttcaccggcgcgtccatgaaccccgccgtgtccttcggccctgccctcgtcagctgggagtggggataccagtgggtgtactgggtcggcccactcatcggcggcggcctcgctggcgtcatctacgagctgctcttcatctcccaaacccacgagcagctccccaccaccgactactaagccggccgccggcgaccccccaccaagcttgggttccgttccgtgcgcagctagcagatcatcaattctctcgatctctggatctccccctcgccgtttagtttctctcgtgcatgtgcatgcatcgtcgaacatctcaagctgctactgctgctgctgcgccggcgccgctcgatcgtcgcatcgtttgctttcttggacaagtctgtaaccgtgaattccggacccgtttgcttc

SEQ ID NO: 26020 - DNA, 807 bp, Zea mays
  Clone ID: LIB4073-008-E12_FLI
gatcgcctgaagatgtatgacagccgcaacgccaacaaagttctccaccagccgatgggaagcttcccctctaatgttgctgatgaatatgaggaagaaggttactcaacgttgatggagtctttaactcatcctgaggtgactcacaaagtgaaaaccttggtccgtgttgtggcattttatccttttgaagcttatgagctccatttgcttttacgttcgaattatgactattctattcggttgactcttgaggatcctacagcgagaattgatgcgtacgtccacaagcagaatttggtccaattcttcggtgattctctgacagaagtggtggtcatgaaaaagctgaacaagctactcggcatcccagagtcagaggacggtgatgaagttgtcccaatgtcctggaattcaccttggatatggtgtgtcatgtcatcatactattgcgaaaaaaccgatccctggggcagtagaaggtaccgaatcgttgacacaacgatcagggattgagtgtagtattttgtatgtgttgctagcctacttatatagtaagtattttggagaggaggggggaggtgttggcattatagccttacgaacatcttgtaaggatgcagggcgacatgctatagttgtagcctactactgcagtgttattgcctcatgtaatgttgcagtgccgtcgttccgtggccatatgcttttgtacagtcagtgaattattctatccagaacactggtggcaccgtggcattctgtatgtgccaactgtgaacatgcactctagattatcttaatctc

SEQ ID NO: 26021 - DNA, 1364 bp, Zea mays
  Clone ID: LIB4073-008-F4_FLI
tgcctgcatcactgactgtcaagctgcaacccactgcgagctagtgagtgtgagagacgagagttagagagcgagatggcagccacggtttcgttcccggtggtgaacatggagaagatggagaccgaggagaaggccacggccatggaggtcatccgcgacgcctgcgagaactggggcttcttcgagctgctgaaccatggcatctctcacgagctgatggacgaggtggagcggctgaccaaggcgcactacgccaacttccgggaggccaagttccaggagttcgcggcgcggacgctggaggccggcgacaagggtgccgacgtcaaggacgtggactgggagagcaccttcttcgtccgccacctcccggcctccaacctcgccgacctccccgacgtcgacgaccactacaggcaagtgatgaagcaattcgcatcggagatccagaagctgtcggagaagctgctggacctgctgtgcgagaacctgggcctggagcccggctacctcaagtccgccttcgctggctccaacggccccacgttcggcaccaaggtgagcgcgtacccgccgtgcccgcgcccggacctcgtcgacggcctccgcgcgcacaccgacgccggcggcatcatcctgctgttccaggacgaccaggtcagcggcctgcagctgctcaaggacggcgagtgggtggacgtgccgcccatgcgccacgccatcgtcgtcaacatcggcgaccagctggaggtgatcaccaacggccgctacaagagcgtcatgcaccgcgtgctcacccgccccgacggcaaccgcatgtccatcgcctccttctacaacccgggcgccgacgccgtcatcttcccggcgccagcgctcgtcggcgccgccggcgccgaggaggagcgcgccggccaggccaggtacccgaggttcgtgttcgaggactacatgaacctgtacgtgcgccacaagttcgaggccaaggagccacggttcgaggccatgaagtcggccatcgccaccgcgtgatgaacaaacacactgctgccttcaattctgctccttgtcccttcgtgtcctgcattatgctttgagcttgaagccttgatgaggctgcaatgaacagtgtccatgtgcttatatgtagtttggcacggtggttatgcgtgtatcgtggaacggcgtaatgtattttggttgtctcggatctatatgtatgtacgtatatattgagtactgtatgtaaagtgtgtgtagcatctgatccaatgtatgagcagtgtgtacgtgaccaggacctgatgtgctgctattactaccacctcaagtggagggaacatgaattattagtagttctc

SEQ ID NO: 26022 - DNA, 643 bp, Zea mays
  Clone ID: LIB4073-009-B8_FLI
ctctgctcccttcatctgtgagtttttccgtgatgcccaagagaaggtcctcccatatgctgactacatcttcggcaatgaaactgaggcaaagatcttcgccaaagtccgaggatgggagactgagaatattgaggagattgctttgaagatctctcaacttcctttggcttctggcaagcaaaagaggattgctgtgattactcaaggtgccgacccagtggttgttgctgaggacgggaaggtgaaaacattccctgtgatcctattgcccaaggagaagcttgttgacaccaatggcgcaggtgatgctttcgttggaggcttcctctcacagttggctcagggcaagagcattgaagattccgtgagggctggttgctatgccgcgaatgttatcatccagcgcccaggctgtacttacccggagaagcctgacttcaactagtgcgaaaactgaggcacgttatgagaggtggactgttataggcacacttattcttaaccactgcgtggttcggtgtgtacacaccctgtattttcccgaggcttttcttccgatccggccaatatttttgccgtgatatttgtcctgcaactatgaacgtcgtctttgacgctgtataaggcatgttttgccacc

SEQ ID NO: 26023 - DNA, 492 bp, Zea mays
  Clone ID: LIB4073-020-A8_FLI
gagatggcgtcaaagaggattcagaaggagctcaaggatctgcagaaggaccctcccacctcgtgcagtgcaggtggcattccgcaccaaggtgttccatccaaacatcaacagcaacgggagcatttgccttgacatcctgaaggaccagtggagtccggcactaaccatctccaaggtgctgctgtccatctgctccctgctgactgatccaaaccccgacgatcctttggtccccgagatagctcacatgtacaagacggaccggcacaagtacgagaacaccgcgaggacctggacccagaggtacgccatgtagtagtacctggctggcctttggggccgccgggtctccggaatcgtcgctgctgctgctgcgttgtgttgccggacctggacgtgtctccatgttttcgatctgtcctgtataatgaatgatgaatcaaattgggtttgcagtacagtgcaccaccgtgtggtgctgaatgctgc

SEQ ID NO: 26024 - DNA, 707 bp, Zea mays
  Clone ID: LIB4073-020-C6_FLI
gagtctccgaggaggagctccgccagtacgacggctccgacactaagaagccgctcctcatggccatcaagggccagatctacgacgtcacccagagcagaatgttctatggacctggcggaccttatgccctatttgctggtaaagatgccagcagagccctagcaaagatgtcctttgagccacaggatcttactggcgacatctctggcctaggcccatttgagcttgacgccctgcaggattgggaatacaagttcatgagcaagtatgtgaaggttggtactgtcaagaagactgtccctgttgaagacggcagcaccgcaagcacggcccctgaagccagtgaggccaccactgaggctgagaaggcacagacaaccgaagagaagccaagggaggtatctgcggaggcggtaaaggagaaggaagccccatctgatgaaggtgcccaggaaaactagagcttttcagagcctcctgtgtatgcagcaataattcgacatggtcccattcggttcgtgtctgggccctgctatcctctcgtatcagcagcatggcctgtgtaattggatatgtcatctgtaccagcgccatggctcttgaggtcctggtgctttatattgttattatagctgtcgttgcagattttaagaccagattgtgcgccccttgctctgtttgatcggataatcggtgctcttttt

SEQ ID NO: 26025 - DNA, 688 bp, Zea mays
  Clone ID: LIB4073-020-D11_FLI
cttggccgcgcgagagatggagaagcaggcggcggcacaggcgcaggcgcaggagcaggagcaggagcagtggcagggcgcggtggaggcgactctgccgtcgacgccagcgtccgcggcgtggccgcacatcgccagcttctgcgcgctgcaccggtacctcgcgagcatcgacgtgtgcgagctcgcggaaggggaggacggccggcccgggtgcgtccgctacgtggcctccctggcgccgggcaccaccacgggggagatcggcatctgggcgacggagaagctgctggagatcgaccacgacgcccggctgctcgcgtacgccgtcgtcggcagcagcttggggttcggcagatacgtcgctactatgagcatcgtcgctgctgacgacgaggacgacgcggggtgcaggctggtgtgggcgttcgagtgcgaccccgtgcaggggtgggggtggagccgggatgggatgctcgcctacctcgacgccggcgtcaagggcatcgccgcgcggatcgaggaagcccatgccgccgccgccagcgccagtgccggaggagacggcggcgtcgctgcttgacaactccatctgcgggcgggtggaatctcaacagtcgccagatgcatttctatattgaattgttattacgtcgtcaaactaattaatgcattgttaattgctact

SEQ ID NO: 26026 - DNA, 292 bp, Zea mays
  Clone ID: LIB4073-020-D2_FLI
atttaatagatcaacaatatatagaaaccttacaccataattccctctagggaaatgaaacatacaaaacactacacactaaatgtgaactatccataatgttcccaactaataatatgcatagacactaggtcaaccaaatattgaaacccaaccaaggttacatagaaaccaatagtttcactcatatcatccaagcatataaccacaacatctgaaaaactaactttttacattaacctaacaactatatcgaatatcaaactacaccactgtcacaagtccaaggaag

SEQ ID NO: 26027 - DNA, 1081 bp, Zea mays
  Clone ID: LIB4073-020-H1_FLI
ctctaccgtgcggagggggaagaggggagaggccaggaggggaagcctgcagccaccatggattccgacctctggatctcgcgtctcatggctgccaagcggcagtttgcgctgcagcgcgcgcagcgccagcacgccgccccggcatcccaccacgatcgattcgggtatgatgatatcgaacctgaggatgatgtgcgctcagacttcccatgcccttactgttatgaagatcatgatgttacttctctgtgcgcccatttggaggatgagcacccttttgagtctaaaattgtgtcttgccctgtttgcttggctaggatttcgaagaacttgttggatcatataacccttcagcatggctacctatttaaattgcagagacatcacagagtacgtagagttactggtaatggcaaccacaatctctcctatgcagggagagatcttcagcttcaagagacctacttaaaggtgcttcttggaaatagcagtcgaagcagcagtaccaatgcatcaagtacagtcactgattcactgctatcctcgctagttttaaatctatcttcattagaagtggaggacacgtcaaagtcttcagctccttctgtggtggaaaataattggtttaaacgatcactaccttcaaagacttggaagttaagtgctgttgattcgagccttagtcatgaagagagggagcgtaggaggaggagagcagttgtgagatcagcttttgtgcagcatctccttgtcactacccttttcgaagactagcagatcaaacacagctatgcacgggaatcgcactagttgttttggatatcatgaagttgttcatccggtctgctgggtaaccttgacaggaaaactgaagcaccgggcgtcttaccttatttattctgtggaagcagctctgtcatttattttctagatcctattcatttttgtagggctgttgatcagagcctctatagtagagtcgtgatgctttttttgttgggtttcagtctgcaattggagaatatgccaatttaatttatatattactaaacatgattccgagtttggaacttgttct

SEQ ID NO: 26028 - DNA, 535 bp, Zea mays
  Clone ID: LIB4073-020-H10_FLI
cagaccgccgatatataggatcatcgatcaatgtctgggtcgggcgccggcgtttgggtgttcaagaacggcgtgatgcagctggagcagccggcggcggcgagccggaaggcgctggtgtacgtgccgacgaacgaggtggtgcggtcggtggaggcgctggagcggcggctggggacgctggggtgggagcgctactacgagaaccgaagcatcgtgcagctccacaagcgcgacggcggcgccgacctcatcaccatcccgcgcgacttcgccaacctccgctccacccacatgtacgacgtcgtcgtcaagaaccgcgaccacttcaaggtcgtcgacgcctaataagctctaccagctagcagctagctgcacccatccatcgtccacgatcgatcttcttatctcgccaattcggcatgcatgcgttgcgtgtgccagcagtgtacagctgctgatcgatatgcctgcagcagttatatagcaagtctagctatatatactgaatatatacgaacaaacatatgcatat

SEQ ID NO: 26029 - DNA, 847 bp, Zea mays
  Clone ID: LIB4073-020-H11_FLI
cgccggcgcctccacttcgcttcctcaccccatctccgctcagggtccggcggcggcgaagggaaggcaagatgtacaccgcgaggaagaagatccagaaggagaagggccttgagccctccgagttcgaggactccgtcgcgcaggcgttcttcgacctggagaacggcaaccaggagctcaagagcgacctcaaggacctgtacatcaacaatgctatccagatggatgttgccgggagcaggaaggctgttgtgatccacgtcccataccgcctgcgcaaggccttcaggaagatccatgtcaggctcgtcagggagctggagaagaaattcagcggcaaggatgtggtaattgttgccacaaggaggatcgtgaggccacccaagaagggttcagctgttcagcgccctcgcaccaggactctgactgctgttcatgatggcatcttggaggatgttgtctacccagctgagattgtggggaagcgtgtcagataccgtctggatggtgccaagatcatcaagatcttcttggacccaaaggaaaggaacaacaccgaatacaagctggagacctacactgcagtgtaccgcaggctgtgtgggaaagaagtggtctttgagtaccctatgaccgaaaatgcataaagatgatgccctggatatctccatttcatttcgttgaatctggatgttttgttggggtttcaactagtttgctccctatgtacttcaaaaaccatagttttgatgccaaagttgcctaggaattcggtactctggaatttgccgtggacgtgaacaatgttaagttttgagcatttaaattaaacctttgccccgtt

SEQ ID NO: 26030 - DNA, 2101 bp, Homo sapiens
  Clone ID: LIB4117-006-A5_FLI
ggaacagcaggcctggccagcccaaaggactctctatccaggatgtaaatgagcacactgctggcccatgcgcctcggggctgtagagggcagcctcagaggcactgggcattcctggcaccatggatgacgctgctgtcctcaagcgacgaggctacctcctggggataaatttaggagagggctcctatgcaaaagtaaaatctgcttactctgagcgcctgaagttcaatgtggcgatcaagatcatcgaccgcaagaaggcccccgcagacttcttggagaaattccttccccgggaaattgagattctggccatgttaaaccactgctccatcattaagacctacgagatctttgagacatcacatggcaaggtctacatcgtcatggagctcgcggtccagggcgacctcctcgagttaatcaaaacccggggagccctgcatgaggacgaagctcgcaagaagttccaccagctttccttggccatcaagtactgccacgacctggacgtcgtccaccgggacctcaagtgtgacaaccttctccttgacaaggacttcaacatcaagctgtccgacttcagcttctccaagcgctgcctgcgggatgacagtggtcgaatggcattaagcaagaccttctgtgggtcaccagcgtatgcggccccagaggtgctgcagggcattccctaccagcccaaggtgtacgacatctggagcctaggcgtgatcctctacatcatggtctgcggctccatgccctacgacgactccaacatcaagaagatgctgcgtatccagaaggagcaccgcgtcaacttcccacgctccaagcacctgacaggcgagtgcaaggacctcatctaccacatgctgcagcccgacgtcaaccggcggctccacatcgacgagatcctcagccactgctggatgcagcccaaggcacggggatctccctctgtggccatcaacaaggagggggagagttcccggggaactgaacccttgtggacccccgaacctggctctgacaagaagtctgccaccaagctggagcctgaggaagaggcacagccccaggcacagcctgagacaaaacccgaggggacagcaatgcaaatgtccaggcagtcggagatcctgggtttccccagcaagccgtcgactatggagacagaggaagggcccccccaacagcctccagagacgcgggcccagtgagcttcttgcggcccagggaatgagatggagctcacggcttaaagcccaagctctgaagaagtcaagggtggagccagagaaggaaggcagtcccagatgagcctctattttcatcagcttcttctctctccccttgaacttggtaacccacatggttctcccgtggcccctaggtggatgaggccaaagtcaaatccaaggctgagacagtcgtgcgactcctactcccccagagcgtgacccggagcaggtgctggacacagagcctgtctcagcagagggtccccactggccgcaacggctcagtgacagcaagagcaggaagagcagcaggaaggcaccgctgtccaccttgggcaccatttatcctcctttcatcgtccccggggcagttgcgtgaccctgctgggaggccagaccgggccagactgagggtcaggggaccaggctgggttgggggttgggtggggctggacggggacgaggcgcggagaggcggcgggaaagagcttcggctgggccacgggctcgcgggcactctcggcggcagcctcggggactccgactccagctctgggcaagatccataaacttttaaagaagcctcaaaacatacttttaaagcattaagctttaaagtgctagaaatcttgtgccccatatgtgcttctttcagtattatcctagatcctcaggagtagcatggcaactggagaaaatgggaggaaagacaagaagaaatagaagctgatttaacatcaagtttattcagttttgatttttcttatctctactggctttctcctgttcaaaccttgcagcgataatatttggaaaagagcacttggaaattatattcctgtttttaactcttt

SEQ ID NO: 26031 - DNA, 2395 bp, Homo sapiens
  Clone ID: LIB4119-023-F2_FLI
ccagcggccagcgcgcgcgggcccaggccgcccggctccagcccagcagtagcggcagcagcggcggcggcggcagtgcgcgcgaggccctgcgcccccagcagctcctccctggcgccgtgcatggagacgcggcccgccacccgccgctgagcccccgccgcccggccgggacccgccagggctggggtggcctcgggctccggccggccccgccgcccggccgtcccgtcccaggaagtggccgtcctgagcgccatggctcactccccggtgcagtcgggcctgcccggcatgcagaacctaaaggcagacccagaagagctttttacaaaactagagaaaattgggaagggctcctttggagaggtgttcaaaggcattgacaatcggactcagaaagtggttgccataaagatcattgatctggaagaagctgaagatgagatagaggacattcaacaagaaatcacagtgctgagtcagtgtgacagtccatatgtaaccaaatattatggatcctatctgaaggatacaaaattatggataataatggaatatcttggtggaggctccgcactagatctattagaacctggcccattagatgaaacccagatcgctactatattaagagaaatactgaaaggactcgattatctccattcggagaagaaaatccacagagacattaaagcggccaacgtcctgctgtctgagcatggcgaggtgaagctggcggactttggcgtggctggccagctgacagacacccagatcaaaaggaacaccttcgtgggcaccccattctggatggcacccgaggtcatcaaacagtcggcctatgactcgaaggcagacatctggtccctgggcataacagctattgaacttgcaagaggggaaccacctcattccgagctgcaccccatgaaagttttattcctcattccaaagaacaacccaccgacgttggaaggaaactacagtaaacccctcaaggagtttgtggaggcctgtttgaataaggagccgagctttagacccactgctaaggagttattgaagcacaagtttatactacgcaatgcaaagaaaacttcctacttgaccgagctcatcgacaggtacaagagatggaaggccgagcagagccatgacgactcgagctccgaggattccgacgcggaaacagatggccaagcctcggggggcagtgattctggggactggatcttcacaatccgagaaaaagatcccaagaatctcgagaatggagctcttcagccatcggacttggacagaaataagatgaaagacatcccaaagaggcctttctctcagtgtttatctacaattatttctcctctgtttgcagagttgaaggagaagagccaggcgtgcggagggaacttggggtccattgaagagctgcgaggggccatctacctagcggaggaggcgtgccctggcatctccgacaccatggtggcccagctcgtgcagcggctccagagatactctctaagtggtggaggaacttcatcccactgaaattcctttggcatttggggttttgtttttctttttttccttcttcatcctcctccttttttaaaagtcaacgagagccttcgctgactccaccgaagaggtgcgccactgggagccaccccagtgccaggcgcccgtccagggacacacacagtcttcactgtgctgcagccagatgaagtctctcagatgggtggggagggtcagctccttccagcgatcattttattttattttattacttttgtttttaattttaaccatagtgcacatattccaggaaagtgtctttaaaaacaaaaacaaaccctgaaatgtatatttgggattatgataaggcaactaaagacatgaaacctcaggtatcctgctttaagttgataactccctctgggagctggagaatcgctctggtggatgggtgtacagatttgtatataatgtcatttttacggaaaccctttcggcgtgcataaggaatcactgtgtacaaactggccaagtgcttctgtagataacgtcagtggagtaaatattcgacaggccataacttgagtctattgccttgcctttattacatgtacattttgaattctgtgaccagtgatttgggttttattttgtatttgcagggtttgtcattaataattaatgcccctctcttacagaacactcctatttgtacctcaacaaatgcaaattttccccgtttgccctacgccccttttggtacacctagaggttgatttcctttttcatcgatggtactatttcttagtgttttaaattggaacatatcttgcctcatgaagctttaaattataattttcagtttctcccc

SEQ ID NO: 26032 - DNA, 4700 bp, Homo sapiens
  Clone ID: LIB4119-026-D11_FLI
cggcgcggccccggaggcagcagcagcggcggcggcagccggagcagtaggcacccgagcagcgccagcggccgagcgggcggcttcctggcctgggcgctccggtggcggcggaggtgcgcgcggagccatggttatcatgtcggagttcagcgcggaccccgcgggccagggtcagggccagcagaagcccctccgggtgggtttttacgacatcgagcggaccctgggcaaaggcaacttcgcggtggtgaagctggcgcggcatcgagtcaccaaaacgcaggttgcaataaaaataattgataaaacacgattagattcaagcaatttggagaaaatctatcgtgaggttcagctgatgaagcttctgaaccatccacacatcataaagctttaccaggttatggaaacaaaggacatgctttacatcgtcactgaatttgctaaaaatggagaaatgtttgattatttgacttccaacgggcacctgagtgagaacgaggcgcggaagaagttctggcaaatcctgtcggccgtggagtactgtcacgaccatcacatcgtccaccgggacctcaagaccgagaacctcctgctggatggcaacatggacatcaagctggcagattttggatttgggaatttctacaagtcaggagagcctctgtccacgtggtgtgggagccccccgtatgccgccccggaagtctttgaggggaaggagtatgaaggcccccagctggacatctggagcctgggcgtggtgctgtacgtcctggtctgcggttctctccccttcgatgggcctaacctgccgacgctgagacagcgggtgctggagggccgcttccgcatccccttcttcatgtctcaagactgtgagagcctgatccgccgcatgctggtggtggaccccgccaggcgcatcaccatcgcccagatccggcagcaccggtggatgcgggctgagccctgcttgccgggacccgcctgccccgccttctccgcacacagctacacctccaacctgggcgactacgatgagcaggcgctgggtatcatgcagaccctgggcgtggaccggcagaggacggtggagtcactgcaaaacagcagctataaccactttgctgccatttattacctcctccttgagcggctcaaggagtatcggaatgcccagtgcgcccgccccgggcctgccaggcagccgcggcctcggagctcggacctcagtggtttggaggtgcctcaggaaggtctttccaccgaccctttccgacctgccttgctgtgcccgcagccgcagaccttggtgcagtccgtcctccaggccgagatggactgtgagctccagagctcgctgcagtggcccttgttcttcccggtggatgccagctgcagcggagtgttccggccccggcccgtgtccccaagcagcctgctggacacagccatcagtgaggaggccaggcaggggccgggcctagaggaggagcaggacacgcaggagtccctgcccagcagcacgggccggaggcacaccctggccgaggtctccacccgcctctccccactcaccgcgccatgtatagtcgtctccccctccaccacggcaagtcctgcagagggaaccagctctgacagttgtctgaccttctctgcgagcaaaagccccgcggggctcagtggcaccccggccactcaggggctgctgggcgcctgctccccggtcaggctggcctcgcccttcctggggtcgcagtccgccaccccagtgctgcaggctcaggggggcttgggaggagctgttctgctccctgtcagcttccaggagggacggcgggcgtcggacacctcactgactcaagggctgaaggcctttcggcagcagctgaggaagaccacgcggaccaaagggtttctgggactgaacaaaatcaaggggctggctcgccaggtgtgccaggtccctgccagccgggccagcaggggcggcctgagccccttccacgcccctgcacagagcccaggcctgcacggcggcgcagccggcagccgggagggctggagcctgctggaggaggtgctagagcagcagaggctgctccagttacagcaccacccggccgctgcacccggctgctcccaggccccccagccggcccctgccccgtttgtgatcgccccctgtgatggccctggggctgccccgctccccagcaccctcctcacgtcggggctcccgctgctgccgcccccactcctgcagaccggcgcgtccccggtggcctcagcggcgcagctcctggacacacacctgcacattggcaccggccccaccgccctccccgctgtgcccccaccacgcctggccaggctggccccaggttgtgagcccctggggctgctgcagggggactgtgagatggaggacctgatgccctgctccctaggcacgtttgtcctggtgcagtgagggcagccctgcatcctggcacggacactgactcttacagcaataacttcagaggaggtgaagacatctggcctcaaagccaagaactttctagaagcgaaataagcaatacgttaggtgttttggctttttagtttatttttgttttatttttttcttgcactgagtgacctcaactttgagtagggactggaaactttaggaagaaagataattgaggggcgtgtctgggggcgggggcaggaggggagcggggtggagggaacacgtgcagtgccgtggtgtggggatctcggcccctctctctgggttcgtcgtggttgagatgattacctcggacgtctacggaaacgagcgggcgcattgttgtccgcttgtgtgtgtgtgtgtgtgtgtgtgtgtgcgcgtgcattgattactatccatttctttagtcaacgctctccacttcctgatttctgctttaaggaaaactgtgaactttctgcttcatgtatcagttttaaagcagcccaggcaaagatcatctacagattctaggaattctctcccctgaaatcaaaacctggaagacttttttttcttattttagttgagaagtttcataaactgctcaaggattagttttccaggactctgcggaggaacggcaggaagaacctcagagagggcagaggtgacttcaaagtgctggggactccgtcctgagggtcacttggccctgagcccctgcgtgcccttgcggaagcccagaagcttcttcctgctgcacctcccgtttccgctgctgctgacgtttatgcatttcatgatggggtccaacaagaacacctgacttgggtgaagttgtgcaatattggaggctgactgtagggctgggcagctgggagacaggctcatggctcatggctcatggctcagggcggtgcctgccctgggccgggacccccctccccaccccccacctaggctttttgggttttgttcaaggaaggtaaagtgagaggtttaggtcagtgtttttaagtttttgttttttttttaaagcaaatcctgtatatgtatctacatgggagacaggtagacactacttatttgttacattttgtactacacgtttgtgttccaggtttcagcttccctcgctcctgttgttaagaagcgtccctgtcagcacaggtgtgcattgaggaaggggccccagggccttcgctccctcagcactggggtggaggcggcaggaaggggcggcccttacctggcaggtctgggcgcacctttagcaggtggactccgtggggctccaccagccagaagcctttggaaggcaacgaaggcaatgctgctccctgagtccagtccccgcccccaaacccagcccaggtgccttcagctacttcggcttcttaaaccctgcagtgttaaacagaggcattgagaaaggggaaaggcgggtatttttaaaagccaaagattgacccagttacttgagggtagggaggcgggcccagtgcaggaggctgcatccctggcctgctggtgcccaccgggggctgtgcctgtgccgggccgcagggaagctggctgcccccattcctgctgctgctgctgctgctgctctgtggctgtttcaaagactgggcgaaaggctgtccggagggcagaccaggtgccttgccgcagagaaaacaccaaagtctcctgttcgctcataaagaagtttttgggatgggagagaatccagaccatcttggggcagccaggcccttgccttcatttttacagaggtagcacaattgattccaacacaaaacttcccctttttaaaatgatttctgttctaatgccatagatcaaaggcctcagaaaccattgtgtgtttcctctttgaagcaatgacaagcactttactttcacggtggtttttgttttttcttattgctgtggaacctcttttggaggacgttaaaggcgtgttttacttgtttttttaagagtgtgtgatgtgtgttttgtagatttcttgacagtgctgtaatacagacggcaatgcaatagcctatttaaagacactacgtgatctgattgagatgtacatagtttttttttttaccataactgaattattttatctcttatgttaacatgagaaatgtatgccaaatgattagttgatgtatgttttttaatttaatatttaaataaaatatttggaagg

SEQ ID NO: 26033 - DNA, 2195 bp, Homo sapiens
  Clone ID: LIB4119-067-D3_FLI
gccgcgtttgaattcggggaggagcggagcggtgcggaggctctgctcggatcgaggtctgcagcgcagcttcgggagcatgagtgctgcagtgactgcagggaagctggcacgggcaccggccgaccctgggaaagccggggtccccggagttgcagctcccggagctccggcggcggctccaccggcgaaagagatcccggaggtcctagtggacccacgcagccggcggcgctatgtgcggggccgctttttgggcaagggcggctttgccaagtgcttcgagatctcggacgcggacaccaaggaggtgttcgcgggcaagattgtgcctaagtctctgctgctcaagccgcaccagagggagaagatgtccatggaaatatccattcaccgcagcctcgcccaccagcacgtcgtaggattccacggctttttcgaggacaacgacttcgtgttcgtggtgttggagctctgccgccggaggtctctcctggagctgcacaagaggaggaaagccctgactgagcctgaggcccgatactacctacggcaaattgtgcttggctgccagtacctgcaccgaaaccgagttattcatcgagacctcaagctgggcaaccttttcctgaatgaagatctggaggtgaaaataggggattttggactggcaaccaaagtcgaatatgacggggagaggaagaagaccctgtgtgggactcctaattacatagctcccgaggtgctgagcaagaaagggcacagtttcgaggtggatgtgtggtccattgggtgtatcatgtataccttgttagtgggcaaaccaccttttgagacttcttgcctaaaagagacctacctccggatcaagaagaatgaatacagtattcccaagcacatcaaccccgtggccgcctccctcatccagaagatgcttcagacagatcccactgcccgcccaaccattaacgagctgcttaatgacgagttctttacttctggctatatccctgcccgtctccccatcacctgcctgaccattccaccaaggttttcgattgctcccagcagcctggaccccagcaaccggaagcccctcacagtcctcaataaaggcttggagaaccccctgcctgagcgtccccgggaaaaagaagaaccagtggttcgagagacaggtgaggtggtcgactgccacctcagtgacatgctgcagcagctgcacagtgtcaatgcctccaagccctcggagcgtgggctggtcaggcaagaggaggctgaggatcctgcctgcatccccatcttctgggtcagcaagtgggtggactattcggacaagtacggccttgggtatcagctctgtgataacagcgtgggggtgctcttcaatgactcaacacgcctcatcctctacaatgatggtgacagcctgcagtacatagagcgtgacggcactgagtcctacctcaccgtgagttcccatcccaactccttgatgaagaagatcaccctccttaaatatttccgcaattacatgagcgagcacttgctgaaggcaggtgccaacatcacgccgcgcgaaggtgatgagctcgcccggctgccctacctacggacctggttccgcacccgcagcgccatcatcctgcacctcagcaacggcagcgtgcagatcaacttcttccaggatcacaccaagctcatcttgtgcccactgatggcagccgtgacctacatcgacgagaagcgggacttccgcacataccgcctgagtctcctggaggagtacggctgctgcaaggagctggccagccggctccgctacgcccgcactatggtggacaagctgctgagctcacgctcggccagcaaccgtctcaaggcctcctaatagctgccctcccctccggactggtgccctcctcactcccacctgcatctggggcccatactggttggctcccgcggtgccatgtctgcagtgtgccccccagccccggtggctgggcagagctgcatcatccttgcaggtgggggttgctgtataagttatttttgtacatgttcgggtgtgggttctacagccttgtccccctccccctcaaccccaccatatgaattgtacagaatatttctattgaattcggaactgtcctttccttggctttatgcacattaaacagatgtgaatattc

SEQ ID NO: 26034 - DNA, 1865 bp, Homo sapiens
  Clone ID: LIB4119-088-H2_FLI
aacttaggtctcaaaaaaccaagctctccaagtgagcaattcctgtcccttttaagggcttacaactgtaagggggtccacgtaagagggtcatgatcgattgagcaagcagggggttacaagatgttcacctaagattgagacctagtgactacatttcctacgggaacaaataaatggtttttcatctcccggagatacattacaaacaaatatggtgctaaaagaactccttacctttctctgactacaatttatttggacatacttttgtattgaagagaggtatacatactgaagctacttgctgtactataggagactctgtcctgtaggatcatggaccatcctagtagggaaaaggatgaaagacaacggacaactaaacccatggcacaaaggagtgcacactgctctcgaccatctggctcctcatcgtcctctggggttcttatggtgggacccaacttcagggttggcaagaagataggatgtgggaacttcggagagctcagattaggtaaaaatctctacaccaatgaatatgtagcaatcaaactggaaccaataaaatcacgtgctccacagcttcatttagagtacagattttataaacagcttggcagtgcaggtgaaggtctcccacaggtgtattactttggaccatgtgggaaatataatgccatggtgctggagctccttggccctagcttggaggacttgtttgacctctgtgaccgaacatttactttgaagacggtgttaatgatagccatccagttgctttctcgaatggaatacgtgcactcaaagaacctcatttaccgagatgtcaagccagagaacttcctgattggtcgacaaggcaataagaaagagcatgttatacacattatagactttggactggccaaggaatacattgaccccgaaaccaaaaaacacataccttatagggaacacaaaagtttaactggaactgcaagatatatgtctatcaacacgcatcttggcaaagagcaaagccggagagatgatttggaagccctaggccatatgttcatgtatttccttcgaggcagcctcccctggcaaggactcaaggctgacacattaaaagagagatatcaaaaaattggtgacaccaaaaggaatactcccattgaagctctctgtgagaactttccagaggagatggcaacctaccttcgatatgtcaggcgactggacttctttgaaaaacctgattatgagtatttacggaccctcttcacagacctctttgaaaagaaaggctacacctttgactatgcctatgattgggttgggagacctattcctactccagtagggtcagttcacgtagattctggtgcatctgcaataactcgagaaagccacacacatagggatcggccatcacaacagcagcctcttcgaaatcaggaaatttttgtggattaactgctggtgaggacccctgagctagaggcagataagaatgaacagttacggagagagaataacagtaagatgaccacttattgagctgttaccatgtctcatgccactgggctaagcactttctgtgggttgtctgcacagtaaacaccattagccaaggtctttaacaagcagagtgttttgtccagcagtgaggccccttttcccacttcccagcacccacataaacaggaataatgtgctggaaatgaaaccaggtggcagaagcagctacacatgcaagagaagcctgattgggtccacattaaccagatgacaggagtgagagccttcacttacatttcggggaccatcagtgagaactgggatggcagtgaacctgaaataaagatcgttgaaat

SEQ ID NO: 26035 - DNA, 650 bp, Zea mays
  Clone ID: LIB4073-004-B1_FLI
cgcgcaccagcagatcccaagctcaccggggaggaggaggggagagggcgaccggcggcggcggcgatgggtttcatcatggagttcgcggagaacctgatcctccgtctgatggaggacccggacaagcgcgaccaggttcggcgggagcatgtctacaagatgaaggagcggtgcgagcgcaccaaggcggcgtggaacctcccgctgcgcccctacggcttctggaccttcgagcgcttcaactcgcagctctcctgggacccgcagatcagccaggccgccggccgccgggacccctacgacgacctcatcacccgccactccggctccccgccgtcttcctaaacacccgcgccgcaggtctacctcggcaccaataagaaactcgcccctctcaaactgattgtgattccattctcttctgttcgaaaaatgttgtcaccaaactactctactttctgtttcagtttggcatggaagcagaagttgtgtacttttattctcaagttgttgtctttgtattatgaaatgttccaataatcattcggagcactcatttgcctttaccattcgggaaattctcctagtgattacaggcgccagatcttatatattttggatggtttgtcaggggcagataattttct

SEQ ID NO: 26036 - DNA, 757 bp, Zea mays
  Clone ID: LIB4073-004-B4_FLI
gctcagagtttcaaaagctggggttaacttgctcttgataaaatggatgaaggagctagagaaaatattctatggaaacattgtgaagtatgatgctgcgataagcccagaggctcgtcaagatgatcttgtaaatgtcatctggagaaatatttatgctgaggaaggttcagaggttatggatgcggctgctgcccctgctgtccaggcattggcaagatacacacgaagggaggcaacttgtctatcattgactgacaaagattctatgttctctgggaacttcaaattcacaaccctgctgccggcaactcccagttccagcccaaagaagcctgtgcgatgaactgccgtggtacatccacattccatatgaagatttgaaaacagcaggatcagtggatatctgtcattctctcagcaatacaaataacaggcttcttccagcagtagtttattctggggttctcacgattcaaacccttttgatggatatatacttctttctagataggaagtttattttattaatcttacgagaatctgctctagtaggccacccacatgaatggagcctttttgtctctttttctatggtaatctttttcctttggctgatttggactctggtcatcgtgccagtgcctagtgggaggtgatagagaaagtaaccatacaaatgcattgtctaaatatgtacttttgtttgaagccatagctggatggtttgggaaagaatgcagatgcggtcagcttt

SEQ ID NO: 26037 - DNA, 784 bp, Zea mays
  Clone ID: LIB4073-004-B7_FLI
gtactgccgtggtgtccctgaccccaagatcaggatctatgatgttgggatgaagaagaagggagtggatgagttccccttctgcgtccacctggtgagttgggagaaggagaatgtttccagtgaggctcttgaggctgcccgcattgcttgcaacaagtacatgaccaagagtgccgggaaggatgccttccacctgagggtgagggtccacccattccatgtccttcgtatcaacaagatgctttcatgtgctggggctgatcggctccagactggaatgaggggtgcttttggcaagccccagggtacctgcgctcgtgtggacattggtcaggtcctcctttctgtgcgctgcaaggaaagcaatgctaatcatgctgaagaagccctccgccgtgccaaattcaagttccctggccgccaaaagatcatccgcagcaggaagtggggttttaccaagttcacccgtgctgagtatctgaagtacaagagcgagggtaggattgcacctgatggtgtcaatgctaagctgctcggtgttcatggtcccctctctaagcgtgccccggggaaggcattccttgcagagaacattcaagcgtctgcgtagacttatccttctgccaattggaactccagatattcaggatattctgcttagtctaattttctatgctagaactttgttaatggctattgcttgcagcatgatctacttgtgtagcccagtttcatatggtggttaaatattcataatagattgtttgaacccttactatgt

SEQ ID NO: 26038 - DNA, 684 bp, Zea mays
  Clone ID: LIB4073-004-E6_FLI
tgcaatccagccctcgtaagaaaccttaatccacaacagaagctttcgattcgatcccaccgagggcgaggaggaggaagaagaagacggcaatggcgtccgaggagggagtcgtcatcgcgtgccacaccaaggccgagttcgacgcccagatggccaaggccaaggaggccggcaagctggtggtcattgacttcaccgcctcctggtgtggtccttgccgcgccatcgctccactgtttgtcgagcacgccaagaagtacactcaagctgtcttcctgaaggtggacgtggacgaactgaaggaagttactgcagagtacaagatcgaggcgatgccgaccttccacttcatcaagaacggcgagacggtggagactatcgtcggtgccaggaaggacgagctcctggccctgatccagaagcataccgcgtctgcgtccgcgtaagaagatagtcagtcgtcgtcaataagggccagcgcatcgcatggctgtaaatgatgtcgttatcagtttggtttgtcatttgtgggcgattgtgaaccaatagtatgttccgatctgaataccttaaccatggatacttgttgtgagttgtgattttgactggtattggaatttggatgtctggcttcattttctgttggagtgcgactcttgaataaaccacattggtgatggc

SEQ ID NO: 26039 - DNA, 693 bp, Zea mays
  Clone ID: LIB4073-005-C11_FLI
ggcccggcacgacagggaccgcaacggtgccgtcacgctgcgcgaattcttcgcagactggagcaacatggggcatggcaaaatggcgaggtggatggacaagtttgcgagcgcggacagaaacggagacggctcgctcaacgccgtcgaattcaacgacttcttgcatcctgaagacaccagccaagagagcgtgatgctgtggctactgaaggacaagctaagtgagatggaccatgacggagatggaaggataaacttggaggagtttgtcgcccaatctgatcttgagcgtgccgaagctgaagagaagttcagagaattggacgccgacatggacaactacttgacggtggaagaagcacgctctgtactgcaaagcctcattacaggggagttctcatatgctacttcacatgccaaatttttgatgaaggctgatgttaaccaagacggcaaattgtcgctggaggagatgctagatgactacgtatccttctacagcaccgtttatacggatgatcattacagcaatgaagttgatagtgattcccacgacgagctatgagcagttaagccagggcaggacagcgatacggagggaggaggttctttttactttctaataggagttcgcagccaaaaaaatgaaaaatgtacagcagacaatcaactgcaaagatcaattttgtt

SEQ ID NO: 26040 - DNA, 607 bp, Zea mays
  Clone ID: LIB4073-005-C2_FLI
gagaaaaataaatagaatgggaagatccgcgttgtagagccacgctcaaggatggaagtattacagccaaataagcaatggcaaagtggcaaaccatttccgaggatggaagctacctgcaggatggaaactagatgtgaccgcgacgtgtctgacaagaataggatgcctgccactttggcactgtaataagctgtacactatccatgtacaatagtactatacttatctccaacaacggcacaatgcaagacacctgcgacgttgtaaagggttcaggaccattttaactcttttggtcatttttctcttttggtcatcaacgattggaccaaatcctttctccaacctaaaattaactctgctttagcataggatgtgtgtgtgaatgtttagaatgccctcaaacataggatgtgtgtgtgaatgtttagaatgccctcaaatgtttgatgtgtcgagtaatattcctatcccaagatagatattgctttcccgctttattaaaacagacttgttacatgtctgtcatatatgtagctacaatacaataacagactcatctagcttccgtaatttaagggaattagctgtgtacaacagtatt

SEQ ID NO: 26041 - DNA, 1202 bp, Zea mays
  Clone ID: LIB4073-005-C3_FLI
gaatcagttccatctctctgtctctcgcttgggaaattgggaggacgacgaggaagaggaggcgcgtgccggcacccgaccgtcgactaccacgctacgacgcggcaccgggataggtgctcctgagctacgaatccacaccccacgcccacggccaatccgctgcgtgcgccgcggccttagcatgaggtggccgctggcgatctcgactcgccgccgccccctccttttcgtccttctcgtcgccctctacacgattcctgggacattttcatcgaggcaagtcacactcgatactgttgagatatttactactcatgaatggtttggcaagccaacagtggctttccggtgcaatggagagaacaaaacagatttgccagatgtgaaggaggcgcacacgctatatacatttaagggtgaagaatcgtggcagagcttccagaaaagaaatgcaagcgatgtggtttgtatgaggaggacacatttaaaactgatgtctttgatgaatgggagatgtgttcgagtgatttcaagggtggaaaatacagccggattaaggaaggccagttcaatgcaacattcctatgtccaaactgcaccgcctcaactggtactgctgatatccaatacctattcctttctgtttgtttagacatttttcctatgagctagctggtttttttatagtctaataaggtaattcttggctgcttgttttattttggttgcatctttgatgatgaaatttccctgttaaatcagtagtacgtaaatgtcgaagaaatgccttgtgtctttgttctacattgcctttgctccagatgtttctttcgtgccaggacaaggaaacagtgaacctagcgaagatttggaatctaagaagacatcggttgtggtcatcataatagttagtgttcttgcgtcagtccttgtcatcattgccttgttcgggggctacaagtactggcagaagaagaagagggagcgagaccaggcgcgattcctcaagctctttgaagaaggagatgaccttgaagatgaactgggccttagcaatgaaatctaaaacagtgcgtacagtcgtacttccgatgtcttcagttgtagtttccatgtatgatgtatagaatgtgcaattttttcacttagaaattttgtagtgtatagcatccagtagtttatgaagaaacggttccaac

SEQ ID NO: 26042 - DNA, 456 bp, Zea mays
  Clone ID: LIB4073-005-C4_FLI
gccccgtcccgccagatcagatcggatcgctccaccacctgctggtctgatggcgccgcctccccccttctagatctcgcctaagaaacctctcactgtgtctctctcagagtatcgctttagttttgccgatccgggcgcccatgagcgcccgccgccgcctcctccttccaccctgctgcagaggagtgcgtcagtccgtccatccgtccgtcgttttcagattttgtttccccatcttgggttcgtttggttcgtagaagaactcaagttaagttatcatcatcgagtgtgcttggtctcgttgtcagtcgttgttaaggttttaagaagaattgagaagtgagatggattggtcttgtgttgccgaggagatgtcaaatctgcctctctctctttttttttgtggttttgttcttccagactgaggaagggagatcagatgattattatccc

SEQ ID NO: 26043 - DNA, 1872 bp, Zea mays
  Clone ID: LIB4073-005-C9_FLI
ctccgagcacaagtgttttccatgcatgatgcgtcgcaggaggagcgggtttcccctataaaaccccgcgtaaccccccgctcggatggcacggacgcaccgcgcactcggtggtggaattcctcgcccgcgccgcttcctccgccggcctccgctgctagtgctaggtgctagctgagtagcttggacgtcctctcctcagtaactatattttgtcgttccttgggaagatagaaaaatatactcttggttttcttgaacagattccatttcaggtctgtttctgaagggagatttcgtcgaacaggatgaatgcattggcagcaaccagcaggaacttcaagcaggcagctaagctgctgggcctcgactccaagctggagaagagcttgctcattccattcagggagatcaaggttgaatgcacaatcccaaaagatgatgggactttggcatcctatgttggatttagggttcaacatgacaacgctaggggacctatgaagggtggaatcagataccaccatgaggttgaccctgatgaagtcaatgccttggcacaactgatgacatggaaaacagcagtggctaacataccatatggaggagctaaaggtggaataggatgtagccctggagacctgagcatctccgagcttgagaggcttacccgagtttttactcagaaaatccatgacttaattggcatccataccgacgttccagctccagatatgggcaccaactcacagacaatggcatggatacttgatgaatactcaaagttccatggttactcacctgctgttgtgacaggaaagcctgttgaccttggaggatcattgggaagagatgcagctactggaaggggggttctgtttgctactgaagctttgcttgcagagcatggcaaaggcatttcaggccagcgtttcgtcatacagggattcggtaacgttggttcctgggcagctcagctgatcaatgaagccggtggcaaggtgattgctatcagtgatgtcacaggcgctgtcaaaaacgtcaatggccttgacattgcccagctagtgaagcactcggcggagaacagagggatcaagggcttcaacgggggagatgccatcgatccaaactcattgctcactgaagagtgcgacgtcctcatcccagcagcgcttgggggagtcataaataaggataatgctaacgacataaaagcaaagtacatcatcgaggctgccaatcacccctcagacccagaggcagacgagatcctgtcaaagaaaggcgtcatcatcctccccgacatcctcgccaactctggcggtgtcacagtgagctacttcgagtgggttcagaacatccaggggttcatgtgggacgaggagaaggtgaacgcggagctccggacgtacatgacgcgcgccttcggggacgtgaaggagatgtgccggagccacaactgcgacctccgcatgggcgccttcacgctgggcgtcaaccgcgtcgcgcgcgccaccgtcctcaggggatgggaagcctgatgatgataccgtctcgtgtccgtgccccactgcgtttgctgcgcgtcgtgtcctcttgagccttgtttttctttggttattatatgtcgatcgatcgatcaacggaggtccgggaaaaacaagttcggttaataattccaggaagtgcgtcttcttggagaccaatagcggaagaagggtaataagtctgtagcccatagctgcctgagatgatgcttgttggtggtctgcaagcagcaatgccaatgccatttggttttcttgcacgactttgggtcatccagccacgttatggaatatggtatatgcaaatccatttgttagcctt

SEQ ID NO: 26044 - DNA, 728 bp, Zea mays
  Clone ID: LIB4073-005-D7_FLI
catccccctctatcagcaccaataatcccaatagcaaccacgtctcgatctccattaccaaagaaaatgaagatcgtggtggtgctcttcgtgttggtcctcgcactcatcgctggagccgctgccgacaagaaggagaaagaagacacttgcaaaaatctctgtgcagaaaagaagctcaaggagccagcctgcaaggagtcctgcgccctcaacaagcgcttcaaaaaggtgtggatcgaggctgtccaatgctcgttgaaatgcaacaagaagcacggctttggcactccagactccaagtcttgcgaagaaggatgcaaaaagaagtacgaggataaagtggcggagatcactgctagctgccacacggtttgcactaaggtggagaaggagcagcttgctattgaagaatgcaagaagatctgcaccccgtccctcatcttcaaggaaattaaggaggcgttgcattgagctatctatacgctggccaccatggtctgccaattaatcatttgatggatatggaccaaactaccaattaattaatttgatattttctttgctaatttgttttttgttcaaatcgatcagtcaaaggatccatcgatatatggtttcatctgctggacaggcagtccaatgtaatcccaatgtaatgccacacacggttttttaatttttttgtttgattaaataaataaaagggcatgttggcaattatcgct

SEQ ID NO: 26045 - DNA, 715 bp, Zea mays
  Clone ID: LIB4073-005-E8_FLI
gaaaaataatgctgcgcttttggaggacgcagaggagcaccacctcgtcgaacgcgttatccgtcgtggagatgaacgtgcacatggactgcgacggctgcgagaagcgagtcaggaaggccatgtcccggctccaaggagtgagctcggtggagatcgacatggaccggcagaaggtgacggtgacggggtacgtggaccggcgggaggtgctgcgcgcggcgcggcggaccggcagggcggcggagttctggccgtggccgtacgacggcgagtactacccgttcgcgatccagtacctggaggacaacacgtacatggccaccgacaggtactaccgccacggctacaacgaccccatgatcgggtcctacccgtgccacgccttcacgcatgtcatcgacgacgacgcgctcgccgtcttccacgtcgacaacgtccacgcctgcgccgtaatgtgatgcatgccccggagctaactggtcttcttctcgcaaaagagagagaccatcttaaacattatattatcagctcaagaggccgtacgttaacaaatcgctgatgtgaacaagcagctcaaataaaagtcctgctctaaacaccgcacaaaaaaaattggtactgtgtgatttttttttattacttgtgcaaaggttgtatgtgtgtccggtaccattcagcaaggaatctatagaggaatggacatcgatggacg

SEQ ID NO: 26046 - DNA, 765 bp, Zea mays
  Clone ID: LIB4073-005-F4_FLI
agattaggcaaaggatgggcgaggatctggacactctggagttcgacgagctgcgcggtcttgagcaaaatgttgatgcggctctcaaggaggttcgccataggaagtaccatgtgatcgccacacagactgaaacttacaagaaaaaggtgaagcactcgtacgaggcgtacaagaacctgcagcaggagctgggcatgcgcgaggacccggcgttcgggttcgtggacaacactggcgccggcggttgggacggcgccgcggcggcgctgggcggcggcgccccggacatgtacgccttccgcgtggtgcccagtcagcccaacctgcacggcatggcctatggctcccacgacctccgtcttggctagcatcgtcatccacagccagcgctgcctgctgctagctagctgcattgcgcgccgccatgggtgctgctcctccacggcgagcacgtactgcatgcacgccaatgcaagttactagctagctagttcatgcaccaccaacgcaagcaagcagcaatataatgcatgcaactaccgaggtattgtaataacaaataagaattactgcgagcccaatgctgcagatgatgaacagcttaattaccgcgcgcttgtttcgtgataccatgcgtagtcgtcattatattcctgtggcatgtatgtcgtttatgatgtgtgttgtgtgtgtgttcgaggaaaatggttgtattctattatgatcgtgtggcattatatctatattgttgactctattccc

SEQ ID NO: 26047 - DNA, 911 bp, Zea mays
  Clone ID: LIB4073-005-G3_FLI
gcccaaccagaagtgcggcggcgcaggcggaccaggaggaggcggaggagaagcagcggagccaagccaccgccgccaccatgggtatctcgcgtgactcgatgcacaagcgcagggccaccggtggaaagcagaaggcctggaggaagaagcgaaagtatgagctcgggcgccagccggccaacaccaagctgtcaagcaacaagacagtgaggagggttcgtgttcgtggaggtaatgtgaagtggagggctcttcgcctggatactggtaactactcatggggaagtgaagctgttacccgcaagacccgtatccttgatgttgtctacaatgcatcaaacaacgagcttgtgaggactcaaacccttgtgaagagtgccattgtgcaagttgatgctgccccattcaagcagtggtacctcactcactatggagttgacatcggtaggaagaaaaaggctcctgctgcaaagaaggaagctgctgagggacaagagggtgaggcagcagctgaggaagcaaagaagagcaaccatgtgaagaggaagcttgagaagcgtcaggagggacgcgagcttgatgcgcacattgaagagcaatttggcagtggaaggttgctggcgtgcatttcctcccgccctggacagtgtggccgagctgatgggtacattcttgagggtaaagagcttgagttctacatgaagaagcttcagcgcaagaagggcaagggcgccgcagcttagagcattctcatggatggtcttacgccgaaatgtgtggcctattaaatattactcttgcttttttgttagtcgtctcaagttcagagcgtctatgtcatgttttgcagacctgagaacactattttctgaaaatgaatcaactctatctagctcttaagaattgag

SEQ ID NO: 26048 - DNA, 319 bp, Zea mays
  Clone ID: LIB4073-006-C8_FLI
tgaatgtgaaagaaccatcgagtttaccccacatatcagcggtggagacagagatgtgattactgttggtgtaacaaagttgtcggtgacggttgcttggtcactgattagtcagtagtttgtagctttgggctgtactggttaacttagtaatttatttataatgacttatgtttgggcacaagtagtagtgcgtgtatcgactagtactgtgaatttgtgatgtgctttgttatgttgaactagtgtggtagtgtgtaaggttatcttagcctgttcaatggaagctggcgcctcatcctaggcgcggctgcaaatt

SEQ ID NO: 26049 - DNA, 853 bp, Zea mays
  Clone ID: LIB4073-006-D3_FLI
gacgtcccaatcgagccgagctaatcggaatctcatctcatctcacaccgccattgccagtgccattgccatcggcggcaccagcagcagcagcaacagcaggccaatccatccggtgccgtgttcgtgtgtgtccggcagccaacaatatgggagtggagtcgtcggagtgcgacaggataaaggggccgtggagccccgaggaggacgaggcgctgcggcggctcgtggagcgccggcggcttcgacgccatcagctgcaccgccgacgtgcgccctcctccgcccccgccagcagcagcagcagaagactacgaggacccgctcacctcgctctcgctttcgctgccggggctggaccaccagtcggcgtcgtcggggttccaccacgacagcgcgcggagccacttccaggagctgtccccctcgcgctccccgtcgccgcagtctactcctccacccgccgcccttctttcgccgccggcggcggcggctccctctcagtcgtcgtcgtcgtcgtcgtcgtacccgttcagcggcgagctggtggccgcgatgcaggagatgatccgtgccgaggtgcgcaagtacatgtccggcgcgggcctacgcgccggctgcggtcccggcgccgtcggcgaggcgggcatgccgcagctggtggagggcgtcatgcgcgccgccgcggagcgcgtcggcgtcgtcacacggccgtagaagaagaaaatcccaaaccaaaccaaaccaaatcagatcgaatcaatgcgaagcattgtgttaattaagatcccgtccgtcctgtgtagcagcaactacgtagactactactactacaactgctagtcgttcttgt

SEQ ID NO: 26050 - DNA, 602 bp, Zea mays
  Clone ID: LIB4073-006-D5_FLI
ggctcggggctagatttgggaggttcaggaggactcactcaggagggaagctttttccggtcggccggcgacatggcggaggagaagagcgctctgcagtcggcgagggagtgggtcgtggagcacaagctccgggccgtcgggacgctgtggctcagcgggatcgtcggctccatcgcctacaactggtccaggccgggcatgaagaccagcgtcaagctcatccacgccaggctgcatgctcaggctctcacactggctgccttggctgggtctgggctggtggagtactacgatcaccaacaagggtcaggatccaaagtccaccaatacgcaaagcagttcctatcatctgatgctgatagcagtagcagcccacaaaaagagtagcagccttacgaagtaccatctgtggagtgggtcagtgggtgttattctctgatcaaataattttgcctatggcattctgtggcaacttaggcggagcttcgcctgattttctatgtaatgtaagctgctgaaacctgaattaccgtgtatgaagatggtaccatgcatatgttttcctgaatgtcttgaaatgaaataaatggttttttttt

SEQ ID NO: 26051 - DNA, 317 bp, Zea mays
  Clone ID: LIB4073-006-D9_FLI
gagacgccggggctgatgacgccgcggcgggttccccttgtcgtggtccccaggacggtgcctcagccagcactgccgtaggatcacggtcgacctcggccagtgggccttgtttggaaaagccagttctgtagctacctaaaatccttgtaaacagttgctcaaaaaaaaatccttgtaaatacgcacccccccccccttttttttacaaggctaagtactctctctatcccattaaaaatattatttttgactttcaaactttttgtttgatcatttgtcttatttaaattttttatataaatattatttatttt

SEQ ID NO: 26052 - DNA, 554 bp, Zea mays
  Clone ID: LIB4073-006-H3_FLI
cacgcatcgcggttctccccgtgtccttcgcgtgagttctgcgacgactacgcgaccgccggcgccagcgccgccgttcgccaggtttccggatctctatcttcgggttggagcccttcaccggcgacgagcagccaccagtgttgcgagtcccgatggcggaaccagcgaagcccgaggtgacggaggaagctaagatggacctgctcgaggacgacgacgagttcgaggagtttgagatcgatcaagagtgggatgacaaggaagaaggcaatgaagcacttcagcaatgggaggatgactgggatgatgacgatgtcaatgatgacttctcgctgcagctgaggaaggagctggagagcaatgcgcccaagaactagctagcatttgcattttgcaactgttatttgttctggaccttggcatggctactttgatgtagtcgctgcatttgctgttgttaataccttgattactgaaagatctattttccgagttatattaacctgctttcatcatcatctaataataatccaaatctgatcggtctattc

SEQ ID NO: 26053 - DNA, 872 bp, Zea mays
  Clone ID: LIB4073-007-B3_FLI
cacagcagcagcaagtgagaagacttgtagtcgaggagctggggagcaagcaagcaagaagagagccgagagagctaagctagcgcgcgatggcgaggtcttccaagatgatgatggcggcggcggctctgctggccctggctctggccgtggcgacgaccgccgaggcgaggaacatcaagacgacgacgacggcggcggcggcggagaagaaggcggacaacgacgcggtggtgcagccgcagaccttcccgcccttcgaccgcctcggcggcggcgcgtccccggcgttcggcggcctccccggcaccggcagcagcattcctggcagcagcattcccgggttcagcctgcccgggagcagcggcggcagcagcatgcctgggttcctgcccggcagcggcagcatcggcagcatgcccctcttcggcggcggctccccgttcagcggcttcggcggcatgcccggctcccccaccgccggctccgtccccgagcacgccaacaagccctgaactccgtcagtcgccggcgtggtagtagagtgatgctactatagtacgtcgtcgtcgtcgtcgtcatcgtgcgtgcgtgcgtgcatgcatgcgtggttggttggttgcattggtttcccctagctacatacgagcagttcttgtgttctagctagctatagctcgtgttctagtactgcttttagttacctgcatgcattattggagagctggatgtgttccatttgttgtttgcttcattattagttctgtctatgtgagacatatggtgtttagctgttggtgatgactggttgtagtagtggtggtgatgttcttgaggcatgaataatgctacatgtgatgtgatgtttgttg

SEQ ID NO: 26054 - DNA, 1043 bp, Zea mays
  Clone ID: LIB4073-007-C11_FLI
gtctgcttctcctctgatggcgatgctcctgctcgcctcaacactggcgccgcgcgttcctgtcacgcgggggagcgggagcggcaccagcgccgcccacccggcgtacgccgatgccacggcctacggtctcgccgcggcctctgccttggaggcggggctggaggagtacggcggcgggcgcatcgtggacatcacgcacgcgtaccggccggagctgccgttccccgggcgggacgggctcggcgcggtcacccgcctcacggagtccatggccaacggctccgtcaacaacgtgtcggagctgcgcatggtggtgcactccggcacccatgtcgacgcgccgggccacatggtccaggagcacttcgtggccggcctcggcgtcgacaagctcgacctcgacgtcctcaatggacctgcgttgctcattgatgttccgagggacacaaatataacagctcaagcaatggagtccctaaatatcacgcaaggaattcgccgagttcttttcagaacactaaacactgacaggaagctaatgtggaccaaggaaattgacacgagttttgttgggttcacagaggatggtgcacaatggttagttgacaacactgacatcaagctagttgggattgactatctatcagttgcggcatttgatcacttgatatcagcccatttggtctttttaaatagacgagacataataccaattgaaggtctcaaactagaccatgtaaagactggagtatatatgttgcactgcttacctctcagacttattggatgtgatggctcaccaattaggtgcatccttatcaagtgatcactagtagctggtactgctgaacatcatataaagctggtactgccgaaggctggctaatgtacttgtgtactttccacctctctatgaaagaaaatgatgtgtgcgatgttgatatgctcaagaacaacatagttcattgatacattatattgtaaagagtattacagctaagtctgtgtttgtaagaaatatatctgcagtaaagagaggt

SEQ ID NO: 26055 - DNA, 760 bp, Zea mays
  Clone ID: LIB4073-007-E3_FLI
gcgcctcctctcgccctcgcgccgccgccgccgccgcagctgctgcagcagcaagctcccgcccgccgtcgtcgcctgaggtagacaccaatccgccgccatggggcgtatgcacagccgcgggaagggtatctcgtcgtcggccctgccgtacaagaggactcctccgacctggctcaagacggccgccaccgaggtggaggagatgattaccaaggctgcgaagaagggtcagatgccgtcgcagattggcgtcctgctccgtgaccagcacggcatccctctcgtcaagagcgttactggtagcaagatcctccgcatccttaaggcccatgggctggcgccggagatcccggaggacctgtacttcctgattaagaaggctgtggcaattaggaagcatttggagaggaacaggaaggataaggactccaaattcaggctcattcttgttgagagcaggatccaccgccttgcccgctactacaagcgcaccaagaagctcccgcccacctggaagtatgaatcaaccacggccagcactctggtggcctaagtgatatcctccgatggcgtggtcttgagcacctttgaacttgttctagatatgaatttatgtaatgcttaatatgtctggagcgggttagatggacaaggaacctcaacttttttatgttattacttggagaatctataaaccatttttggttttgcaattctgtctgttaaacgtaacatggatccatgttttgtcgccttc

SEQ ID NO: 26056 - DNA, 256 bp, Zea mays
  Clone ID: LIB4073-007-F5_FLI
gtctccgccggcgtcatgctgtccgtcgtcttctggatggtgcacacacggcaccggcggcggcgcgccttgtgcaagtagctgtgactgaggagatcttggtggcgtgccggcgccacgatttagattgagctgttctggactgacaaccacggctctgtagatgaagcctcgtgcatccgattcagctatgtacagtatggtattgtgcatctgaaagtgaaaatcgaaatgacgcatgtggtgtggttgctct

SEQ ID NO: 26057 - DNA, 764 bp, Zea mays
  Clone ID: LIB4073-007-G3_FLI
gcctctcctcgattaacaaatcccccaaccactccagatccccaaaaccctagccgcccccaccctccggcgatggcgaacccgcgcgtcttcttcgacatgacggtcggcggcgcaccggccggtcgtatcgtgatggagctctacgccaacgaggttccccgcacggccgagaacttccgcgcgctgtgcacgggcgagaagggcgtggggaagtcgggcaagccgctccactacaaggggtcgacgttccaccgcgtgatcccggacttcatgtgccagggcggcgacttcaccaggggcaacgggacgggaggtgagtcgatctacggcgagaagttccccgacgagaagttcgtgcgcaagcacacggggcccggggtgctgtccatggccaacgctgggcccaacaccaacggctcccagttcttcatctgcaccgtgccgacgccctggctcgacgggaaacacgtcgtgtttgggcaggttgtggaggggatggatgtcgtcaaggcgattgagaaggttgggtctcgcagtgggtccaccgctaaggaggtcaagatcgccaactgcggccagatctgataggtgtcgagcttgccgccgccgccctccgtcgttcgtcatcggctcgtcgtcctcccccctcctccttccatgctcctgttcaattcccttccccttcctcgctctgaataagatggcgtactgtcggtgatctgagaggtggtttgagtacttgagtctgaatttgtgtccct

SEQ ID NO: 26058 - DNA, 748 bp, Zea mays
  Clone ID: LIB4073-007-H9_FLI
tcttcatctgtttccgttggatcctcgtctccggaaggtgaagcaaggtcgccatggcgggaggcaaggtttactcgttcgaggaggtgaggaagcacagcgatcgcaaggattgctggctcatcatcgccggcaaggtgtacgacgtcacgccgttcatggaggagcacccgggcggcgacgaggtcctgctggcgtgcgtcggaaaggacgccaccgccgatttcgaggacatcggccacaccgactccgccaaggagctgatgccgcagtactgcgtcggcgaggtcgacgcggctaccatcccggccaagctcacccacgccgtcgtcaccaaggacgccgccagcaggtccgagaagaccacgacggcgagcgccggcacctgggccacgctcctgcagctcgccctgcccgtcctgctgctggccctggccttcgcgctgcagaactatagcagggccaaggcagcgtagacaagatagatagctaccgtcgttgattccgcctgtgtgagtgataccgtcgttgattccgctgtgccgcgggcctgcggcctcttggaagcatctgaaagctggagcagttgttgatgcgagtgtgacgtactgtgacaaagtatatcctaaagtgctaattaattaagccgctcgtggtatcgttactttcgtataataatggttgaattttgttcctggtaaagtttgttactcttgtgtgctgaaactcatatattcaggctttcttc

SEQ ID NO: 26059 - DNA, 1295 bp, Zea mays
  Clone ID: LIB4073-008-A9_FLI
cttccttcatctcgagcatctcctatctccgtcgtcctcgttcttcaactcgccatgggcaagattaagatcggaatcaacggtttcggaaggatcggcaggctcgtggccagggtcgcgcttcagagcgaggatgtcgagctggtcgccgtcaacgaccccttcatcaccacggactacatgacctacatgttcaagtatgacacggtgcacggccactggaagcacagtgacatcaccctcaaggactccaagacccttctcttcggtcagaagccggtcaccgtctttggcatcaggaaccctgaggagatcccgtggggcgaggctggtgctgactatgtcgtggagtccactggtgtcttcactgacaaggataaggctgcggctcacttgaagggtggtgccaagaaagttgttatctctgccccaagcaaagatgcgcccatgttcgttgttggtgtcaacgaggacaagtacacctcagatattaacattgtttccaatgctagctgcacaacaaactgcctggctccccttgccaaggtcatccatgacaactttggtatcatcgagggtctgatgacaactgttcatgccatcactgccacccagaagactgttgatggaccctcagccaaggactggagaggtggcagggctgctagctttaacatcatccccagcagcactggagctgccaaggctgttggtaaggttcttcctgatttgaatggcaagctcactggtatgtccttccgggttcccaccgtggatgtgtcagttgttgacctcactgtccgaatcgagaagggtgcctcctatggggatatcaagaaagctattaaggctgcttctgagggaccactcaagggtatcatgggctatgtggaggaggatttggtttccaccgacttcgttggtgacagcaggtcgagcatcttcgatgccaaggctggtattgccctgaacgacaacttcatcaagcttgtctcgtggtacgacaacgagtggggctacagcaaccgtgttgtcgacctgatccgccacatgttcaagacccagtagagatttttctgctttccatagcatcccaatggccttggtcgctgtccatcccgctgcttgtctatgctgagaataaatgtgaatggtgcctctggacgcccgctccatgctgggtctgaacatgttttgtgtttccatttctgctaccatcctgtaacaaattcactaatatgggacctgagtttagttttttgcttgtgaagaatataaacagtggggttgcaatt

SEQ ID NO: 26060 - DNA, 802 bp, Zea mays
  Clone ID: LIB4073-009-D7_FLI
ggagggggggtctcttctccagttctcctttgcttgcgcctcccgtctgcgtgcgtgcgatcgacgcagaggcgggcgcgggcgctcgcaccaccccgatccgatggccttcatgcgctcccactcaaatgcatcttccggcatgggagttgctcctaacattagggagacatttgtcgagctccaaatgaagaaggcataccgatatgtcatcttcaaaatcgaagagaagcagaagcaggtggttgtggagaagacaggggctactactgaaagctatgatgactttttggcctctctcccagagaatgactgccgatatgctctctatgattttgattttgttactggggagaacgtgcagaaaagcaagattttcttcattgcctggtccccatcgacatcccgcatccgtgctaagatgctgtactccacctcaaaggaccgcatcaagcacgagctcgacgggttccactacgagatccaggcgaccgacccgacagaggtggacattgaggttctccgggagcgggctcactgaagctggttcgcctttgaagggacctgtggagggccgtgaaccttcggtcagatgcaaactctattatgaaatgatgaagctcccaccgtggtatttgttaataagttcctgtaagcatatcatttagtcgcgatgcatgactctagctggtgaagcgttattgaaagctgtatcggtatgaggtttggttgtcgatactgtaaacgaagcaagatttgcaaacttgttatattgtggtattgattatactggattactggc

SEQ ID NO: 26061 - DNA, 753 bp, Zea mays
  Clone ID: LIB4073-009-E12_FLI
ggagatccggactagggttttagacggcgatgggtgcggcgggcgacgagaaggcggctgcggctgcggggaccggtgccaccgccgccgagggcgagggagcggtggactccaaggatcttcagcagcagagcaaggcgctcgacaagctcaccgatcatgtcgaggaccggcagctcgattcatcccgtgtccaatccgccatggcagcacttgcttcatccaaagaggctgactggaacgcgatgaggctgagggagaaagaactagctgctgtcaagatcaaccctactgatgttgaaattattgctaatgagcttgagctggacaagaagattgcagagagaaccctccgagagcacaaaggtgatgctgtagctgcggttcgattcttgctgcactagtttggagatttagttgccagcattatatgttttccttaaatcaacacgacatgtgatgatgtgaagcagtagtgcttttctgtgcctgtgctggaaatttgctctgtcacaatgaaacgatcatacttggcattgaccgagagcctttgttgccaagttgccatggtgtttgcgaattattttctattctgctgtaaaggcatgtggttttaactagaaaatcctcctataccttcatttggcattttgtattttcggagatagctgcaaacattagaaacagaaaatatgtatgaaacaaatgagaacctctgagacacaacagttttcttgaatggatatttccaag

SEQ ID NO: 26062 - DNA, 1298 bp, Zea mays
  Clone ID: LIB4073-009-G1_FLI
cgcgccaccgccgattgcctcctctccactccaccagatctcatccccttctcgcccaccccgatcaccgcgtgggtatcggagcatggcgtctgcggcggtggtggacgccggcgacgcgccggagcccacggtgcggaacctcctggaccaggactccctcaagtgggtcttcgtcggcggcaagggcggcgtcggcaagaccacctgcagctccatcctctccgtcctcctcgccggggtccgccagtccgtgctagtcatctccaccgaccccgcgcacaacctcagcgacgccttccagcagcgcttcaccaagttccccaccctcgtccgcggattcaccaacctctacgccatggaaattgacccaaaggtagaaaatgatgatttatccaatgaaggaatggagggattcctttcagaactgacaaatgcgattccaggagtagacgaagctatgagttttgctgaaatgctaaaattagtccaaacaatggattactccgttgtagtttttgatactgctcctacggggcatacattgcggttgcttcagttcccagcaaccctggagaagggtcttgagaaaatgatggagttgaaaaatagatttggcggtctgttgaatcaggccagtcgattgtttggtcttggcgatgagctgaacgaggatgcaatgcttgggaaacttgagggtatgaaggacgtgatcgagcaagtgaacaggcaatttaaagatccagacttgacaacttttgtgtgtgtttgtatcccggaatttctttcattgtatgaaacagagagattggtgcaagagttagcaaagtttgagattgattcacacaatattattattaatcaagttatatttgatgaggaagctgtcgagtcaaaactgctaaaagcacggataaaaatgcaacagaaatacattgatcagttccatatgttatacgatgacttcaacatttccaagcttcctttgctttcagaagaggtttgtggtgttcaagctctacaaaacttttcccagcacttccttacaccatacaagtctaatcttaaaaggggcaccatcgaggagctcgaacagagaataactttattaaaatctgcactgcaagaagctgaggcagaattagatagggttaggaaaggcaagcagtcagcgtgatcctttttttcacaggtcaaggtgtgtaaaacctgacagaagctatgaagaatacagagtcagagttagagagagacgctcagtttttttgtgtcattacactcttattgatttcacaatc

SEQ ID NO: 26063 - DNA, 500 bp, Zea mays
  Clone ID: LIB4073-009-H7_FLI
cgcaccatcgtccaaggggcacgccgagggcgggttcgaggcggcggccggcgccggagctgagaacgaagggtgcaagtgcggccccaactgcagctgcaacccctgcacctgcaagtgagctgtataataaccccctgcactgcactgcagcccggaggaaggacggactcccctagctagtatagcagtgtcgtcactgcagtgtgtgtgtgtttgagtcagccagtcagtcgagtgccatggcaccatatgctagtggttctggtactgatgggaaccaataataattgtactgggatgttggcgtcgtgtcgtccttcccgtgctcctccgggggctcatctactagcagtcggtgttgtgttgtgtgtttgtgggtgcagtgcagcacagcagcaggccatgccccctgctctgtgggcacgtcgatcgtgtgcgactttgtttgtgctctgtcaccatccatctattacctataatatcccccgtctttgtgt

SEQ ID NO: 26064 - DNA, 744 bp, Zea mays
  Clone ID: LIB4073-010-B9_FLI
ctcttgtttgtggttttggccaatccttcccctccctctcatcccgggccccgggtgaaaattttgccccacaaactctagcgcgtcggatcacaagcaagggcaaaattttctgtgactccggctgaaggaccctgcgacacccaaaactatgtcggtggcgaaggacgacactggccgcactatacccaagttcggcgaatgggacgtcaacaacccggcctctgccgacgggttcacggttatcttcagcaaagccagggatgagaagaaagccccgacgaccaaaccacaaccaggccacatcacccaaaggtcggcgtcggctgacagcaaggactccaggaccgacaagatgacctcctacaactccaggaccaacgcatcgaagaaatggttctgctgtgtctcgcccagtcctacacaatcttgaggaagcaaaagaggaacgcaatgctgcagtctggtgctattctgtgatggttatgtgtagctctgtcgctggcagactggccatgagtgacctcttcgaactcgatcctactacttgccagtgacaggggcactatgtatagccgttgcaaaatgagaaaattactctgatgggtgtctgcttatagctccttagctctgtataccatcagttcaagttgatgtctgcttgtaagtttctttttctcgccccttctctatgtggtgtaacccttcctcaacgttatcagtgaatccgagttactccccaat

SEQ ID NO: 26065 - DNA, 498 bp, Zea mays
  Clone ID: LIB4073-010-C4_FLI
ctcccagagaatgactgccgatatgctctctatgattttgattttgttactggggagaacgtgcagaaaagcaagattttcttcattgcctggtccccatcgacatcccgcatccgtgctaagatgctgtactccacctcaaaggaccgcatcaagcacgagctcgacgggttccactacgagatccaggcgaccgacccgacagaggtggacattgaggttctccgggagcgggctcactgaagctggttcgcctttgaagggacctgtggagggccgtgaaccttcggtcagatgcaaactctattatgaaatgatgaagctcccaccgtggtatttgttaataagttcctgtaagcatatcatttagtcgcgatgcatgactctagctggtgaagcgttattgaaagctgtatcggtatgaggtttggttgtcgatactgtaaacgaagcaagatttgcaaacttgttatattgtggtattgattatactggatt

SEQ ID NO: 26066 - DNA, 814 bp, Zea mays
  Clone ID: LIB4073-010-C5_FLI
gatggggtgctgtggaagcagtgccgtagatgatgaggaacatctggactacagctccggaaaagtcactatcatacccgatctgaagtcttgggaacataaattggatgaagcaaatgaactagggcaaacagttgtggtaaagttcagtgcaacttggtgtggaccatgcaggaatgcagctccagtatacgccgagctttctttgaagcattctgatcttcttttcgtctccattgacgtagacgaactgccggaattggtcacacaattcgatgtacgtgcaactccaacgttcatcttcatgagagataagaaggagatcgacaagctggttgggggcaaccatgaagatctccagaagaagttcgacccatactgccagtgccagtagatgtgatccatggccaattcggctgtcagtataggatcagaacgagcagagccaaacatctgattggctgaaaaccgcgacagatcagaattttgcagccagttgatgagctctctctgggagtgtctgcatctgcataggttcgaggaactgaccaaaggaagtaggatttctgtctagaataatgtaaggttagctagtgtctgaaaattctgcaccacattgttcaagcaagtcccatacagaacaacaagttgtaacatcagttgccagatgactccctcttgatgcctctcacgattggctttacagcgaaaaatgacagtgccattgctgaccactgccccactggtatgctaaggattcaacaatgcgcaatgtacaccatcaccgatgatgaattgttgggaggattccagt

SEQ ID NO: 26067 - DNA, 680 bp, Zea mays
  Clone ID: LIB4073-010-D12_FLI
cctgcgtggtggcatgcagatctttgtcaagaccctcaccggcaagaccatcaccctggaggttgagtcctctgacaccattgacaacgtgaaggccaagatccaggacaaggagggcatccccccggatcagcagcgtctgatctttgctggcaagcagctggaggatggccgcacccttgctgactacaacatccagaaggagtccacccttcacctggtgctgcgtcttcgtggtggtatgcagatcttcgtcaagaccctcaccggcaagaccatcaccctggaggtggagtcctctgacaccattgacaatgtgaaggcaaagatccaggacaaggagggcattcccccggaccagcagcgtctcatctttgctggtaagcagctggaggatggccgcacccttgcagactacaacatccagaaggaatccactctccacctggtgctccgtctccgtggtggccagtaagtcctgggccatgagcagccgtccttccagggttcacatgtctggtgccttcctctgtccctctgatggagattatctgcatgtcgtggtcgtgtcttgatcgagtcggtgaagagtccctatgtttccctttctcagaaaatcgtcctatgtcagtctggttgtgttcgtgaacatttctgctggtgcccagcagtttggttgg

SEQ ID NO: 26068 - DNA, 558 bp, Zea mays
  Clone ID: LIB4073-010-E10_FLI
aagcacaataacaagctagccacacttgcccaggccagagcatcattatctcgtcatcaactgatttgcagtttcaattcgcgaccgacaaccggccggccaccatgagctccacggcagcggcggcaccggagtgcggcggcgccaagacgtcgtggccggaggtggtcgggaagagcgtggaggaagccaagaaagtgatcctcaaggacaagcccgacgccgacatcgtcgtgctgcccgtcggctcgccggtgaccatggattaccgcaccaaccgcgtccggatcttcgtcgacacagtcgcccagacgccccatgtcggctgataagctagctagctgcttctgctgctgcatgtctcagtgctgcttccttcgctcctcgctccagaacatcaataaaatacgatgatcgaataacgcgcggacatgccatgtatgcatgtcagtgcatctgccgaaaaaataatggatgtatacgtgtttctttcgtactataaattatcactacataatgacatcgttcttatataaataaatgtatcagaatgtcgtt

SEQ ID NO: 26069 - DNA, 1086 bp, Zea mays
  Clone ID: LIB4073-010-E8_FLI
ggctggtatcctccaggccatggtgatgtgttcccctctctgaataacagcggaaaacttgacatcttattggctcagggcaaggagtatgtcttcgttgcaaactcagacaacttgggtgctatagtcgacatcaagatcctaaaccatctgatcaataaccagaacgagtattgcatggaggttactccaaagacgctggctgatgttaagggcggtacactcatctcttacgaaggaagagttcagcttttggagattgcccaagtacctgatgagcatgtcaatgaatttaaatcaatcgagaagtttaagatattcaacactaacaacttgtgggtgaaccttaaagctatcaagagactcgtagaggctgaggctcttaagatggaaattattccaaaccccaaggaagttgatggtgtaaaggtccttcaactcgaaactgcagctggtgcagctattcggttcttcgacaaagcgattggaattaatgttccccgctcaaggtttctcccagtgaaggctacatctgatttgttgcttgtgcagtctgatctttacaccttggttgatggctttgtcatccgcaacccagccagagcgaatccagctaacccttcgattgagcttggacctgagttcaagaaggttgccaatttccttgctcggttcaagtccatccccagcatcgtcgagcttgacaacttgaaggtttctggtgatgtctggtttggctctggaattacactcaagggcaaggtgacaatcactgccaagtctggagtgaagttggagattccagatggagctgtacttgagaacaaggatgtcaatggccctgaggatctttaagcgatgcttggcgtcaccagtttttcccaaggacatgtcacaggagctggcaaccctaatcacccccactgagctctatcttttgtaattttcttgtgcattccgcttccgttgtgagggttctgtgagcccgctagagaataattgtgatctttggtgcgtctgtacttctgtttttggtgcaccagggacgtatattttgctgaaatgatctttgctgtatggcgtctt

SEQ ID NO: 26070 - DNA, 723 bp, Zea mays
  Clone ID: LIB4073-011-A7_FLI
tcgcgccgggggtcgcctgagatcacagagaaaatggtgaagggagttgctgtcctcgctggccctgatgtcaagggcaccatcttcttttcccaagagggagacggtccgaccacagtgactggaagtatctctggcctcaagccggggctccatgggttccatgtgcacgcgcttggtgacaccaccaacggctgcatgtcgactgggccacacttcaatcctgctggtaaggagcatggcgcacctgaagatgagaaccgccatgccggtgatcttgggaatgtgacagcaggagaggatggtgttgttaatgtcaatattactgacagccagatccctctcactgggccacactcaatcattggccgggctgtagttgtccatgctgacccggatgaccttggcaagggtggacatgagcttagcaagagcaccggaaatgctggcggacgtgttgcgtgtggtatcattgggctccaaggttaggtgttaacccccgaggcaaacaccatcgaagcgagcacctcaggagatgctgttccatttcccttgtattaattggccccccaatttggttactccaaataagcgcctgatccatgatcagagcacatgtcattttgcatatgaacaatattgcacatctccttaagtggtggttccaacaaatgcttgttttttatatgatgagctctcccgtataagttagagcactaccag

SEQ ID NO: 26071 - DNA, 349 bp, Zea mays
  Clone ID: LIB4073-011-B6_FLI
gtgaggatgacgatgacaatgacgttgacatcccgcttgtgtccatttacttccggtaaagaggggctcgctgcctgtttacatgatcctgcgcgatatttgtcagaaggatcgagtgtataagttgcgaatgcaaccgtgaaactagattcggtttaagcactgatgttttcccccgctaccatctgggtagagttggctggggattgtcattgagatttgggtcaccgttatggaattcttgagcataacatcatgatagttactgcatggtactgttgttgctaaatgttgtcttagtacttgggaaatgcatttgacagtgtgacgctattctggttgcaatttc

SEQ ID NO: 26072 - DNA, 742 bp, Zea mays
  Clone ID: LIB4073-011-B8_FLI
gtctttgcgccggtgttttctcttccttcctgccgcggcgatggcgtcgggtgacaacagcaagcagaggagcgaggaggagtggcgcgccgtgctctcccccgagcagttccgcatcatccgccagaagggcaccgagttacctgggacaggagagtacaacaaattctatggcgacggggtttataactgtgctggctgcgggactcccctgtacaagtccaccacaaaatttgattctggctgcggctggcctgcattctttgaggggcttccaggagccataaaccgaacaccggatcctgatggtaggaggacagagattacatgtgcagcttgtggtgggcatctgggccatgtgttcaagggagaaggcttcaagacacctactgatgagcgccactgcgtgaacagtgtttctatcaagttcagtcctagctcctagctagatcatcttccccctggatgagattctcgtgcctggaactgtgggggagcacagcgaaacgatgaataagatctattcagcacatgtgttatctgattgagagatggatctattaccataatcagttgttactctacgtgatttgtcatttacatcagccagtaatgttttcatgaaagttatcctgaagttgctttgtccatttgttttcccagaatgttcagtcagtcggatacatgtaaagttgtgatcattactcgtcaaatgaactcgtctccactgagggcttgtttg

SEQ ID NO: 26073 - DNA, 902 bp, Zea mays
  Clone ID: LIB4073-011-G3_FLI
ccctcttcgtcgtcgccggcgaccccgcaccggccgcgcagctgtcggggatgccggtcagggtggtcgacaccgccacgccttcctcgcagccctccccagggcaagaaacaaatactggacacccatctcctcctagctgttcactcttaagtgctggaagatcttttgctggaactcagaatgtttcaagtctgcagaaggacgaagcatggaaagtgaatgttcgcatccatggttgcgatcttgaacagggttatctatgtggaacgatggaagcacttaatgttccattagcagatacacctgtagtgacattctgggagggggagatagtggatgctaaaaattacacttttttcactggcaagtgggaggcatcaccagaggacgatataagacattggtccaagttcccatcatttacgcctcttctgagtcagattgagactgatggtggcaagtctctggactttagcaactatccttatatatttatgagatggaaagagcaatactttgtcaatgttggagctgactgtgggttaaccattgctggtttctactacgtctgcttttcttgtagcgatggctccatcagtggattttattatgatccaaatagcagtccatttcagaagctcgaactgaagtgtaccaatgagaaaaattctggattcaccttttcatcctatgagctgcagtgacaggcccgatgccctcggcagacaactttctgttagcatatactagtgtatactgagctcgtagtccctaatgctgttgtattaaaagaaatgagaggttgtttatgtaacagtttgttttctagcaactaagcaaactgtcactttgtaatctgcagaagcatattgtcttttctaaaatccaccttttgtatt

SEQ ID NO: 26074 - DNA, 1085 bp, Zea mays
  Clone ID: LIB4073-011-H5_FLI
cgtacgggaaggtgtacagggcgcgagagaaggcgacggggcggatcgtggcgctgaagaagacgcggctccccgaggacgacgagggcgtgcctcccaccgcgatgcgggaggtctccctgctgcggatgctgtcgcaggacccgcacgtggtgcgcctgctggacctcaagcagggcgtcaacaaggaggggcagaccatcctctacctcgtcttcgagtacatggacaccgacctcaagaagttcatccgcggacaccgcaacaaccgcgagaagatccccgaggccaccgtgaagatcctcatgtaccagctgtgcaagggcgtggccttcgtccacggccgtggggtgctgcaccgtgatctcaagccgcacaatctgctgatggaccgcaagaccatggcgcttaagatcgccgacctcggcctcagccgcgccatcaccgtccctatcaagaagtacacccacgagatccttactctctggtacagggctcccgagattctcctaggcgccacgcactactccacgcctgttgacatatggtctgttggctgcatttttgctgagttggtcactaaccagccacttttccctggtgactccgagttgcagcagctgctccacatcttcaagttgctgggcaccccgaatgaggaggtgtggccaggcgttgacaagctgcccaattggcacgtgtacccccagtggaagccgacgaagctgtccactcttgtgcccggtcttgacgctgatggctacgatctccttgagaaaatgctggtgttcgagccggggaagcggatccctgcgaagaaggccctggagcacccctacttcaacgacgtgaggaaagagatgcactgactgaagcgattcaataatccaccgaggggtgtgttgagcatgattgccctgaagcagttcttttgctaccagggcctactttaattaatttctgttttctactagactagatgatttttcctgtgtgctgtgaaccgttcgctttggttgtgatggattaaaacactagggataaagtaagttgaacataagccagcaaaatcgtgtttgcgagtg

SEQ ID NO: 26075 - DNA, 1222 bp, Zea mays
  Clone ID: LIB4073-012-B9_FLI
cctcggccaaaaatctgcggcgagctccgctccgatccgatccgatccgactgctccccacgccgttgaggccgagcgggggtccaggagaggagaggagaggcgcggcgccgcggctgccaccgtaccgccgccggaggagagaggggagaaggaagaggagccgtacccgtccgcttgctccgcttccgccggacctatcgacccgatggactcggagcactggatctcgcgcctggcggctgcgaagcgcttctacgcggcgcagctcggccacagcgatcgggcggggatggaggagctggacatggacgaggaggtcaggcccgagttcgcctgcccctactgctacgaggaccacgacgtcggatccctctgcgcgcacctggaggaggagcacccgttcgagccccaagccgcggcttgccctgtctgctctgagatggttacgaaggatatggttaaccatattactatgcaacatggatatttattcaagaatcgtcgccggttgcgcagattcatcattccaggcagccaggccctttctttactgagccgagatctacgggaagcccatttgcaggtgcttcttggaggcggacatagatcaagcaacaataacagcaccacaaatatttcagctgatcctcttctgtcatcattcggccttagcttccctacatcagatgcagagcaaacatccaaatcgactctttccattcctgatgatgctacgatgataaaagaaacgcctgctcaggcacggaagttaagtatcgattcgtccctcacaagtgaagaaagggagcagaaacggaagcaagccagcgtcagagccacattcgtgcaagacctgctgctctctactctattcggggactaataaatcaggatgagccaagttatcactggaagggtgcttcccggtgcaggtctgcagagactagcgtgctccacccaacttgctgaattcctcgacggaacatatgcgcgcatccggggtgctagcctttcgtcccttccagtgtggtgcagaatcgatgtgggcatgatgtgtcttctaagttattgtaagccggtctctctatcctcagttccttcataactgacgatcagcatgtgatatgcatgcaagtcgcggttgtgcgtgtacctcatctgtgtctgaactctgaagcattggtttgttgtaccaacataataataataatgttacaac

SEQ ID NO: 26076 - DNA, 489 bp, Zea mays
  Clone ID: LIB4073-012-D7_FLI
gaatgctgatcccagcaaagacacggctacttcaacctcagaaacagagcatcgtggcctggcaaacaacaccagtagcaataagcccaagaattcaggccatcgaaggagaaacagagctaatgcatcaagaagacagcctcaccctcacggccagcctgctaggcagcagtggcagaggaaagaagcagacacctgaagcaatgaggacgtgacttgtgagttgtttttatcggttgtgtatattaatgtcgtgccctgcattggtttcataattgtaaggcatgacatggcaatgttttggcgctgctatggcagttttatgctataggggtactctggaaagaacctgcactggattctatagaactagtataaaactctgcgtgcttggaagtacacactgtattttttttttgggtgtcattgccaggtacttgtcaaattgcttggccgtggtcagaaaagaaatggattacactatttcgt

SEQ ID NO: 26077 - DNA, 1278 bp, Zea mays
  Clone ID: LIB4073-012-E12_FLI
cgtatttgacatgcgtgagtgcctcggcttcctccagtagtccagtgtccagcccctcatccctccgctccggtccgcacagcacaagggagcagccggcagcagcacagtgctgcggcaaagctaagatggcagactacgtgtatggccccgggcggaaccacctgttcgttccgggcccggtgaacatcccggaccccgtgatccgcgccatgaaccggcagaacgaggactaccgctcgccggcgatcccggcgctcaccaaggtcctcctcgaggacgtgaagaggatcttcaaaaccaccaccggcacgccgttcctgatcccgaccaccggcaccggcgcgtgggagagcgcgctgaccaacacgctgtccccgggcgaccgcatcgtctcgttcctcatcgggcagttcagcctgctgtggatcgaccagcagcagcgcctgggcttcgacgtggacgtggtggagagcgactggggccacggcgccgacctcgacgcgctggagcggaagctccgcgacgacaccctccacaccatcaaggccgtcgccatcgtgcacaacgagacggccacgggcgtcaccaacgacctcgccgccgtgcgcacgctgctggacgcgtacgcccacccggcgctgctgctggtggacggcgtgtcgtccatctgcgcgctggacttccgcatggacgagtggggcgtcgacgtcgcgctcacggggtcgcagaaggcgctgtcgatgccgacagggatgggcatcgtgtgcgctagctccaaggcgctggaggccagcaaggcggcgaggtccgtgcgcgtcttcttcgactggaaggactacctcaggttctacgagatgggcacgtactggccatacacgccatccatccagctcctctacggactccgcaccgcgctcgacctcatcttcgaggaagggctcgacaatgtcgtcaagaggcacaatcgtcttggaacagccaccaggttcgccgtggaggcgtgggggctcaagaactgctgccagaaggaggagtgtttcagtgacacggtcaccgccgtcgtcgtgccgccatacatcgacagcgccgagatcgtcaagcacgcgtggaagcggtacaacctcagccttggcctcggccttaacaaggtcgccgggaaggtcttcaggatcggccatctcggcaacctcaacgagctgcaactcctgggatgcctgagcggtgtggagatggtgctcaaggacgtgggtacccggtgaagctcggcagtggagt

SEQ ID NO: 26078 - DNA, 746 bp, Zea mays
  Clone ID: LIB4073-012-F1_FLI
ctcctcgattaacaaatccccccacccactccagatccccaaaaccctagcccccaccctccggcgatggcgaacccgcgcgtcttcttcgacatgacggtcggcggcgcaccggccggtcgtatcgtgatggagctctacgccaacgaggttccccgcacggccgagaacttccgcgcgctgtgcacgggcgagaagggcgtggggaagtcgggcaagccgctccactacaaggggtcgacgttccaccgcgtgatcccggacttcatgtgccagggcggcgacttcaccaggggcaacgggacgggaggggagtcgatctacggcgagaagttccccgacgagaagttcgtgcgcaagcacacggggcccggggtgctgtccatggccaacgctgggcccaacaccaacggctcccagttcttcatctgcaccgtgccgacgccctggctcgacgggaaacacgtcgtgtttgggcaggttgtggaggggatggatgtcgtcaaggcgattgagaaggttgggtctcgcagtgggtccaccgctaaggaggtcaagatcgccaactgcggccagatctgataggtgtcgagcttgccgccgccgccctccgtcgttcgtcatcggctcgtcgtcctcccccctcctccttccatgctcctgttcaattcccttccccttcctcgctctgaataagatggcgtactgtcggtgatctgagaggtggtttgagtactttgagtctg

SEQ ID NO: 26079 - DNA, 644 bp, Zea mays
  Clone ID: LIB4073-012-G2_FLI
tctgacactattgacaatgtgaaggccaagatccaggacaaggagggcattcccccagaccagcagcgtctgatctttgccggcaagcagctggaggatggccgtaccctcgctgactacaacatccagaaggagagcaccctccacctggtgctccgcctgaggggtggtatgcagatctttgtgaagaccttgactggcaagaccattaccttggaggttgagagctctgacaccatcgacaatgtgaaagctaagatccaggacaaggaggggatccccccggaccagcagcgtctgatcttcgccggcaagcagctggaggatggccgcacccttgcagactacaatatccagaaggagagcaccctccatctggtgctccgtctccgcggtggtcagtaagccgtgggtcgtttaagctgccgctgtacctgtgtcgtctggtgccttctggtgtacctgggaggttgtcgtctatcaagtatctgtggttggtgtcatgagtcagtgagtcccaatactgttcgtgtcctgtgtgcattatacccaaaactgttatgggcaaatcatgaataagcttgatgttcgaacttaaaagtctctgctcaatatggtattatggttgtttttgttcgtctcct

SEQ ID NO: 26080 - DNA, 645 bp, Zea mays
  Clone ID: LIB4073-012-H2_FLI
gaaatcctcaacctatggaccaaactgaagacaattctatgccctcagctcagcaacaggaagaagcaatcaagaagaagtttggaggactaatgcccaaaaagccaccactcatctcaaaggatcatgagcgggcctactttgattctgctgactgggctctaggaaagcaaggtgtggccaaacccaaaggaccgctggaggcacttaggccaaagcttcagccaacacgccaacagcagcaacaacgcgcaaggcgctccatttacacttcgtcagaaaacgaggacggagatggtgctggtgctgaggagatgagcatcaactgaagtggagtggaatctgtaggacgtgggtacggttgttgcagaatcgcagcttgctttggccattgccagaattgattgctgagtaagtcgtcagtatatgtcaagtgttgtattttgctttgcaattgaagggcagagagtgattcatgtctatacagtttcatgtatgactgctgggttattgagttcaacattggatatgcatgatgggatggcctattatgtagtgtatatatataaattactgcatagtacgtgttcgcgtgaacttatgagcactacttttcagtttcagaatagtgtttttttttctctc

SEQ ID NO: 26081 - DNA, 1142 bp, Zea mays
  Clone ID: LIB4073-013-B2_FLI
gtatggcttatggctgcaaaggagaaatggttggctggggacgtgcctgctgctcgtgccattcttcaggaagcttatgctgctatccccaattcagaggagatctggctggctgcattcaagcttgagtttgagaacaatgagccagagagagcaagaatgctcttggccaaggccagagaaagaggagggacagagagggtttggatgaaatctgccatcgttgagagggaattggggaatgttggtgaggaaaggagattgttggaggaaggtttgaagctattcccttcattcttcaaattatggttaatgcttggacagatggaggaccgacttggtaatggagcgaaggccaaggaggtttttgagaatggcctgaagcactgccccagttgtatccctctttggctctccctagctggcctagaggagaaggttagtggcttgagtaaatcacgtgctgtcctcacaatggctagaaagaagaaccctgctacacctgaactctggcttgcggcaattcgagctgaatcgaggaatgggaacaaaaaggaagctgatgctctactggccaaggcattacaagagtgtccaacgagtggtattttgtgggctgaagctattgagatggcgccccgcccacagcgtaaaggaaagagtacagatgctattaagcgaagtgatcatgatccacatgtcattgcaactgtggccaaacttttctggcttgacaggaaggttgataaagctaggagttggttgaacagggctgttactcttgctcctgatattggtgacttttgggcattgtactacaaatttgaacttcagcatggaactgtggacacacaaaaggatgttctgaaaagatgtgttgcagcagaaccaaagcatggtgaaaaatggcaagaagtatccaaggctgttgaaaactcacacctgcctgttgaggctcttctaaagaaagctgttgtggggcttcatgtagaagaaaatctcaatccggcaggcgcctagactcactctttttataaggtgtttggtgaacatgttttgtactactatccttaaatttctgtttgcttcaatatgaggtactttaccttttaatattaatatttcatctttattgttgagtt

SEQ ID NO: 26082 - DNA, 635 bp, Zea mays
  Clone ID: LIB4073-013-F9_FLI
ggcagaccagaagttgcggttggcctcctcctcctcctcctcctcttctcctccgtcggctcagacttcagatctctgcgtgcggcgatggcgtcgttctcggaggctcccccaggcaaccccaaggcgggcgagaagatcttcaagaccaagtgcgcgcagtgccacacggtcgagaagggcgccggtcacaagcaaggtccaaacttgaatggtctttttgggaggcagtcgggtaccaccgcaggctactcctactctgcgggaaacaaaaacaaggctgtggtctgggaggagaacactttgtatgactacttgcttaaccctaagaagtacattcctggaactaagatggtcttccctgggctcaagaagccacaggagcgtgctgatctcattgcgtacctgaaggaagcaactgcatagtgcaatgacatgtctttgccatgaagagagaaattcgtttttgcagtttaataaagacattctagacaatttgggtcactctgtttgaacagggtgcaatccacgtttcagtattttcgttcttatggtgtcggtattgaatgcctaggtgtttagctgtgcacaaaaaaacagttaaactttgacggctcctatttcaactgctggag

SEQ ID NO: 26083 - DNA, 552 bp, Zea mays
  Clone ID: LIB4073-013-H1_FLI
ctgacctctgccgctgctgagttcggagccttcgtcgacgatgtctggagccggtgaggaggacaagaagcccgcggaggcgggcggcgcccacatcaatctcaaggtcaagggacaggatggcaatgaggttttcttccgcattaagaggtccacccagctgaagaagctgatgaacgcctactgtgaccgccagtctgtggatatgaatgccattgcattcctgtttgatggccgcaggcttcgcggcgagcagaccccggatgagctggagatggaagacggcgatgagattgacgccatgcttcaccagactggaggcagcgttcctggcgcctagatgcagccgttgcagagcctcttttgctgcgccatgctccgccttccctagcagtaaactaaagaagtctttttaaggaacttgtgatgctctggcaccctgtgccattgctgagggacatcattagccttgtttagtatggtttggtacctttgtctgtcatatgactcgtttatctatcccctaatatatcccgccatgtttgtactccc

SEQ ID NO: 26084 - DNA, 1118 bp, Zea mays
  Clone ID: LIB4073-014-A10_FLI
gttgccgtgctgatttttttaggtggttactggcctgcctgtctcgagcgggaagctccggattacgtgaggcctgagagctgggttgggtggggactcagggtgtgccgcctgaggccgaggagtaggagaggggcgggggcggcatgaggatccagtgcgacgcgtgcgaggccgcggcagccacggtggtgtgctgcgccgacgaggcggcgctgtgcgcgcgctgcgacgtcgagatccacgccgccaacaagctcgccagcaagcaccagcggctcccgctcgcgctcggcgacgccaccgccgccagcgccagcagcctcccgcgctgcgacgtctgccaggagaagccggccttcatcttctgcgtcgaggacagggcgctcttctgccgcgactgcgacgagcccatccacgtccccggcacgctctccggcaaccaccagcgctacctcgccaccggcatccgcgtcggcttcagctccgtctgcggcgccggcgccggcgctgagggcctcccgccgccggcgccgcccaagggcagctccaagcccgcggccgtcgtcagcgcgccagctgccggggccaccaagacaacgacgacggtcaaggacacgctgccgcaggaggtgccgtcgtcgccgttcctgccaccgtccggttgggctgtcgaggacctcctgcagctgtccgactacgaatccagcgacaagaaagactcgcctcttgggttcaaggagctggagtggttcgcggacatcgacctgttccacgcccattcgcccgctaaaaccactacggcggaggtccccgagttgttcgcctcgccgcagccagcgagcaacgccgggttctacaagacgaacggagtagcgcgccagagcaagaagccacggatggaggtgcctgaggacgacgaggactacttcatcgttcctgatcttggctgagatgagagatctttgcatgattctcctgtcatgtgatgtgtgtatgtatgcaaaatatgtatgtatgccatcatgagatgcactgacgcttactggacatatgtactgtaattataaggcagggccatactttcagcctgataaatgagaccggtttgatgtatg

SEQ ID NO: 26085 - DNA, 734 bp, Zea mays
  Clone ID: LIB4073-014-A2_FLI
gcccaccagcacctgcccccctcgccgtcgccgcctcgcctcgcgcgaccgatccaccgccgcggccaccatgtcgctgatcgccggtgaggacttccagcatatcctgcgtctgctgaacactaacgtggatgggaagcagaagatcatgttcgccatgacctccatcaagggtgtggggcgccgcttctccaacatcgtctgcaagaaggccgacatcgacatgaacaagagggccggcgagctgactcctgaagagctggagcggctgatgacggtcgtggccaaccccaggcagttcaaggtgccggactggttcctcaacaggaagaaggactacaaggacggcaggttctcgcaggtcgtctccaacgccctcgacatgaagctcagggacgaccttgagaggctcaagaagatcaggaaccaccgtggtctgcgtcactactggggcctccgtgtccgtggccagcacactaagactactggcaggcgtggaaagactgttggtgtctccaagaagcgataagctagcagcggcttatggcaacagcagcagtgaacaagccttaccttccaacatatcttatgaaaggtttctgtttagacagtttcctgaaattatgttttgccctaggataatcttgcagttatggaaccttaatatattgtatcctgcaatgtgttttttccaacttctaagagtaattttattttgaatgagacttctgctg

SEQ ID NO: 26086 - DNA, 719 bp, Zea mays
  Clone ID: LIB4073-014-E11_FLI
cacttgcgagcgagctagggttccgagagccgccggcgccatgttggtctaccaggatctgctctctggcgacgagctcctctccgactccttccagtataaggagatctttgacggcgtcctctgggaggtcgagggcaagtgggtcgtcaaaggagctgtcgatgtggatattggtgccaatccatctgccgagggtggtgaagatgagggtgttgatgaccagactgaaagggttgttgacattgttgacaccttccgcctccaggagcaacccacatttgacaagaaaacatttgtgactaacattaagcgctacatcaagaacctcactggcaagctggagccagagaaggcagatgaattcaagaagggcattgagggtgccaccaagttccttcttagcaagctcaaagatcttcagttctttgttggtgagagtatgcatgatgatggaagcctagtgttcgcttactacaaggaaggtgccactgacccgacattcctctattttgctcatggtctgaaggagattaagtgctaggcgggcatgccctctttacctcatgttgcttgttatcatctttacctcatgtcgatggttatcatctatataatactatcctatttttgttctagtatggattatgtcatggatggttatggaaaaactgttttggaaaaaaactgttggaagaatggattcggattatgacgtg

SEQ ID NO: 26087 - DNA, 515 bp, Zea mays
  Clone ID: LIB4073-014-E2_FLI
caccatatatccagctcgatcgatcgacgataaacaacaacacatggcgaagcagcagcaggcggtggcgctgctgatgatgctggtgctggctgcggagacggcgtcggcggcttcgtgcaacgcggggcagctgacggtgtgcgcgtcggcgatgttgtccggggcggcgccctcggcggcgtgctgctccaacctcaaggcgcagcaggggtgcttgtgccagttcgccaagaaccccgcctacgcgcgctacgtcaacagccccaacgcgcgcaagaccgtcgcctcctgcggcgtcgccctgccgcgctgctaattactcttacggtatatgggcgtatctgcgaggaataaaggatgggttattcgtccatgcactttgccgtctgcctggctgctcccatccctgcttatattatatatgctctcgtatatgcacgtttgtgtaatgtgtgcccatcgatataaatatatttatatatatatatatatataccggtccagtttgtcac

SEQ ID NO: 26088 - DNA, 929 bp, Zea mays
  Clone ID: LIB4073-014-F6_FLI
cacatcgatctgcttgggggggctgccaagccaaggaacaaacaaagagctagctaggatctcgatcgagaagctaagcttctcaagctctcgaggatgtctctggtaaggctgttggacacgctggctctggactcgtgggtgcggaacccgttcagcatcttcggcacggcggtggccgccgacgcgtggctggccagcgacacgtcggcgttcgccaacacgtacatcgagagccgggacacggcgggggcctacgtgttcagcgccgcgctcccgcccggcgtgaggaaggaggaggtcacggtggaggtggacgagggcaacgtgctcgtcatcaccggccagcgcagcgtgtccagggaggagcgcgtcggcgacaggtggcaccacgtcgagcgctgctgcgccagcttcctcggcaggttccacctccccgaagacgccgccgtcgacggcgtcagggccgccatggacgccggcatgctcaccgtcaccgtccccaaggtcggtgccgctgctgccgctatcgccgagaagcccaacgaggcgccgccgccggtggccgtcgaggcggccgacggcggccctgcctgctgatcttctgatgccgatcgacgccgagacggccggccggcacctccctgttccgatcctcgacgccggcgcggccccctggtgaatgaaccgtagcgtcccacgtcgtcgcccgtgcccgtgctgtctcgaagagtttgcttccgtggtttggtcttggccttgcgtacttttccgcgtgatatgatggatggagcggcctacatgcatgtagcaagggaaaaaaaaaaaagagtatgcctgcactgcatgcatggctgcaccatgcaatttcgtcctaaaatgtcttactgtgatttaggaaatgaaaaatcaagctaagctggaatcat

SEQ ID NO: 26089 - DNA, 646 bp, Zea mays
  Clone ID: LIB4073-014-F7_FLI
ccactccgaagcgaagtcttgctagggtttgggttggggggaatctgacgcgagagcgggagcgaagggggaggagaagatgatcgaggtggtgctgaacgaccgcctggggaagaaggtgcgggtgaagtgcaacgaggacgacaccatcggcgacctcaagaagctggtggcggcgcagacggggacgcgccccgagaagatccgcatccagaagtggtacaacatctacaaggaccacatcaccctcaaggactacgagatccacgacgggatggggctcgagctctactacaactaggcgccctgacccaccccgaccgtgctgcgtgcccccctactgctgtgaggttaatctgaatttttctgaagccatgggtgcacttccagtcgcagtgtctttagctaatgagctcacatacatataggcaacttgagtgagctatgtagtacatacatggttgttgcaagttaccaatgactattgacagccttgcatatattgtcatgtgacaaggatgaacctgcaaaattagtgtgctgctactcgcagaccttaccttaaataacacaggttggtcgtgataatcacggtcctgtgcttctgttatgtgataatgtgaaatatacttggccatgtttggat

SEQ ID NO: 26090 - DNA, 1026 bp, Zea mays
  Clone ID: LIB4073-014-G1_FLI
agagagagagagagactcactgaccggcgaccgacttggggaaggaagcagcagcaaaggatggcgccgctgaagctgtacgggatgccgctgtcgcccaacgtggtgcgcgtggccaccgtgctcaacgagaagggcctcgaattcgagatcatccccgtcgacctcaccaccggcgcccacaagcagcccgacttcctcgccctcaaccccttcggccagatcccggctctcgtcgacggagacgaagtcctctacgagtcccgtgccatcaaccggtacatcgcgaccaagtacgcgtcgtcgggcgcggcgctgctcccggcgacggcgtcggcgaagctcgaggtgtggctggaggtggagtcgcaccacttctacccgaacgcgtcgccgctggtgttccagctcctcttcaggccgctcttcggcggcgccccggacccattggtggtggacaagcacgcgcacgagctcgccaaggtgctcgacgtctacgaggcgcacctcgccagcaacaagtacctcgccggcgacgagttcacgctcgccgacgccaaccacgcgtcctacctgctctacctcaccaagacccccaaggctgggctcgtcaacgaccgcccccatgttaaggcgtggtgggaggagatcgccaagcgccccgcgttccagaagaccgtcgccgccatcccattcccaccgccgccctcctccgcttgagttgacctttcgctgggtcgtcgccggtcacggacgcgtccgagttgaataaaaacggcctccttgcttgttgctgcgccgttgtgtgaatcaaatccaaataatattgtagttgtttccatgtgtgttcatctcactgctgtctcggcttggttgtgtaaagagcacggtgggggtgtggacacgatgtgtagaacctttttttttttttttgatccttggatgtttctattagcccgttgcttaatcttatcagctgaatctggtgtttttctctatcaataaatctgctacggcttattaggc

SEQ ID NO: 26091 - DNA, 385 bp, Zea mays
  Clone ID: LIB4073-014-H7_FLI
tcttctgccagtcctccccggccagcgccgctgcccgggagttcgtgaagaagaactatggtgacatcaaggcccgcaaccccgccctccccttccttgtccgcgagtgctccggtgtccagccccagctctgggctcgctacgatatgggcgtggagagatgtgtgaacttggatggcctgacagaagcacagattgataagaagctggaggagcttgccaaggccggcgagtctcttaaaaccaaatagttttggaacttgtatcatgtcttgtgtttaatgttcccaaataaaagataccatatcggtggacaattgttactcttcattattcctgtagtccgtggaatgaagtcttcaattggctcaaattaatgtgaaat

SEQ ID NO: 26092 - DNA, 415 bp, Zea mays
  Clone ID: LIB4073-015-A11_FLI
cttcaagcagtgttagttgcaacagagctactagtaagtagcacacaacaacgacaatggcttccctgaaggcctcgaagcccgccggagttgcagcgcagggcaaggagccggcacccaagctcagcgagacggcgacgaagccgtccgccgccaagagcggcggcgtcaagaaggctgagcagaagccccgggaaaccaaaaagaaggtgaagagcagcaaaccggcggcagccaaaaagtgacagtgtgagatgtagtggagcttcttcgatcgcatgagggtctccatgctatgttattatgaattataaatccagtccttcctttcttgtgtcttccatgtgacggtgtgtgcgtccctatgtgtgatgactgatgaattaatactacaaataagacgttgtaattgtgt

SEQ ID NO: 26093 - DNA, 556 bp, Zea mays
  Clone ID: LIB4073-015-A8_FLI
cccatgcccccgccgccccacccctcctagaagctttcggaaccctttcactggcccttctcggtggacgccaaggcaccggctcctcgctcccatggcctccaccgtcgactcacccgggagctcctccgacttcgccaagcgcatagaccgcgcctggctaatctcccagcaaccaagaccagtttcttgctcttcctgtcaatctgctggccacgtggagtgcaagtggtgtgcaggaacaggcttctttatccttggcgacaacatgttgtgtgaagtaccctcaaggaattcaaaatgtgtgatatgctctggaaagggcttcacaagttgtgctgattgccaagggactgggtttcgtgccaagtggctcgaagaacctcctattaacaaatgaggaaaggaagttaatcatactgtaaacttttccatttcacagtaaactagctacttttatggtcctctgtccatattctccatatgtagctatggtaatttatttccctgtaactgcatcaattccatgcctattgtgacatgttcttaattattc

SEQ ID NO: 26094 - DNA, 701 bp, Zea mays
  Clone ID: LIB4073-015-B12_FLI
catgaagagagcatcgccggagtcggggacggtgcgccgagaaggaacaaaagaagacggcggcggggcggagatggggagccccctgggcgggtggccgtcgtacaacccgcacaacttcagccagctcgtccctgccgacccctccgcgcagccctcgaatgtcacaccagccacttatgttgcgacccacaggacagacccgccacccaatcaagtgataacaacggaggccaggaacatcctgctgaggcacttctaccagaaatctgaggagaagctgaggccaaagagagctgctccggacaacctcgctccggagaacaacaacaagcagcccaggggacctgtgggcgacgtcgggggccagtcaagcgcaagaggctgaagccacacagctggtgctggtgcccgtcctcccctgcctctcatctctcggtgtcatgcagatgcagcctgcatctctcgctcacatgtcacagctggtggttgtttctcccctgtgcgtcctcttcgcctctcacgtatgtacgtatgacccaaagagctgaggtatacatacctggatggttggatggatgtacataaccacctgagacgagacaaagctcggtgcgtgccatttcacatggcactaggtgtgctgcagcctctccttttcatcctctacaatgcaaaaatatggatgtgcccatgctgct

SEQ ID NO: 26095 - DNA, 818 bp, Zea mays
  Clone ID: LIB4073-015-B5_FLI
cgctccggtcggaagcaccagggcggcttcaggatgtctggcgaggaggaggagaacgccgcggagctcaagatcggcgaagagttcctcaaggccaagtgcctgatgaactgcgaggtggcgatcatcctggagcacaagtacgagcagatccagcagcactcgtcggagtcggacccgtcgtcgcaggtgtcgcaggtgttcgagaagtcgctgcagtacgtgaagcgcttcagccgctacaagaaccccgacgccgtgcgccaggtccgcgagacgctcagccgctacggactcgccgagttcgagctctgcacgctcggcaacctctgccccgacaccagcggcgaggccaccgcgctcgtcccgtccctcaagtccggcggcaggttcgtcggagacgccagggacgagaagatcgagaagatgctcaacgacctctccctcatcaagaagttcgagtagagtagcgcccagggttcatgttagcttgatgtgctgctactcgatctccatcatgatgtattgatggaaccttgttggtcgataattcaagatactactaatatatgtgtggttgatgaactgtctgaaattctacacgagaagccatggccatggccatgccctgttctgttcttcagttcctccagctgtaaggactcttgtaatcaagagagttcaaagatcaaacaaaatgtactgattttcttgctattgttgagcttcacattatcttcatctgctcaccatctagtcatgtatgaatggattaatgcaacctgtttgctcggtaattcaagttactagcacttact

SEQ ID NO: 26096 - DNA, 1031 bp, Zea mays
  Clone ID: LIB4073-015-B8_FLI
cctagcccctcgcgccgccgccgccgccgccgccgccacaccaccaggctggagctcgccgctcggggctagaggtgctcgccgctcgcgaccatgaagttcaacatcgcgaacccgaccaccgggtgccagaagaagctcgagatcgatgacgatcagaagctgcgtgtcttttttgacaaaaggatctcccaggaggtcagtggtgatgcacttggtgaggaattcaagggctatgtctttaagatcatgggtgggtgtgacaagcaaggtttcccaatgaagcaaggagtgttgactcctggacgtgttcgccttctgcttcacaggggcactccgtgcttccgtgggtatggcaggcgcaatggtgagcgtaggaggaagtctgtccggggttgcattgtcagccaagacctgtctgtcattaacttggtcattgtcaagaagggtgagaatgaccttccaggtctgactgacactgagaagcccaggatgagggggcccaagagagcatccaagatcaggaagctcttcaacctttccaaggatgatgatgtacgcaagtatgtcaacacataccgcaggacattcacaaccaagagtggcaaaaaggtgagcaaggcccccaagatccagcgcctggtgaccccacaggtcctccagaggaagcgtgccaggatcgcagagaagaagaagaggattgcaaagaagcaggctgaggccgcagagtaccagaagctgctggcacagaggctcaaggagcaaagggaacgcaggagcgagagccttgccaagaggaggtcgaagctctctgccgctgccaaggcttcggctgccacatctgcctaaggaatggttgctttgagttgatttaagaaagcccccctacctacccaagacaatgttatagctgaagaaaagaaccccatgtgctatgtttgatatgttcggaacctctactttctagcttcatctgtgcaattttgcgtggacatgatgctggcttgtcgaaaattttttgagtacctgtg

SEQ ID NO: 26097 - DNA, 978 bp, Zea mays
  Clone ID: LIB4073-015-C2_FLI
cttgggctcttggccggctttatttgcaatggcttccaaggcgtgcgcgtgggatgccgtcctcgtcatttgcctggcggcggcagtcgtcgctggctcggcggcggaggcggcgttcgatgagaactacgtggtgcagtggggtgaagatggttatcaccttgtcatccggggcacggaggctaatatcaccatggatcagagctctggtgccgggttccggtccaagtccatgtacggctcagggttcttccacatgaggatgaagctgccctccggctacacggccggcgtcgtcacaacattctatcttatctcgcagccggaagatggaagccgtgatgaggtggacttcgagttcctgggcgacaaggccggcgtgccgataaccctccagaccaacgtcttcgtcaatggccgcggcgacagggagcagcggctgcacctctggttcgaccccgccgccgacttccacgactacaagatcctctggaacccataccagctcgtgatgttcgtggacgacacgccggtccgggtgctgaggaacctgacgggcaccgtgccggggtacccgttcccggcgaagaagacgatgatgatccgcgcgagcatgtgggacggctccgactgggcgacggacggcggacggaccaaggtggactggtcccaggggcccttcaccgccggctaccaggggttcgacgtcagcggctgcgccaacgggagcgcgacgacggcgccgtgccagtcgccggacctctggtggaacggcggcgagtaccggaacatcaccgcggagcagcgggcggcgtacgaggacgtgaagaggaattacttcaactacgactactgcgccgataaggccaggttcaataacaccgtacccatcgagtgcaactacgcttgataagcgctacgagtggcgttgtatgtcaaactaaatccacgatttatattatatatatacacacacac

SEQ ID NO: 26098 - DNA, 455 bp, Zea mays
  Clone ID: LIB4073-015-D11_FLI
aaaacaattggatatggagttgctgcaggtagtttggtgaaccttgcaacaatgttgtacttcaattcaatccggggaccagcaaccattgcatactccctctgcgcattcttcgggctgcaagttctgatcgggcttgtcaaggttaagaagttggatcggcaggagagactgataactggcactgcgtgagctgagttcttgatcaatgagtgagaactgaaccgtcacttttcagcgctgtgcgttgtcttcacgtctcctttttttggcctaattttacccccagcgggatttagcataggcacggccccccggtgtatgatagctgtatgtagatgagataacagataaagatgtacatagtgtataatagaaattctacatgtattgttcgcttccgtggagtagcagatacgtacaggattttctttctaaaatgatgattcagggtt

SEQ ID NO: 26099 - DNA, 679 bp, Zea mays
  Clone ID: LIB4073-015-F5_FLI
gaaaacggaaaaggtggggaagtcgtcaagaactcctccgatcccacctgtccatcgatcgatcgactcccgttcccctcggaatcgaggcggccccgagaatcccaacgcacgagaagaggaacaagggaaccaggcggagcgaagagagcccggggtgatgaattgttacggtttatggacggagcaagcaaggagcctctccgcaaggactactacaaagttctggaggttgattatgacgcttctgatgacaccatcaagttgagttatagaagattagctttgatgtggcatccagacaagcataagggtgataatgatgtcacagctaaatttcaggagattaatgaagcatacaaggttttaagtgacccagctaagcgactagaatacgatgtttctggttgttatgagattgatcaatatactttgcgtgagtaccttgcaaaatttaagggtatgatacttacctgtaatggccttggcatagatcatccttctagtaaatgggcccgacatttgagggaactgaagccccattgatcgacgggtacggattgtaacattgttgatgctgatcggatttactgttccatgtaagacacaattgggttgtatcacagacaatgatcccttgccactttctgcgcaaaagatgcatgtatagtaagggtct

SEQ ID NO: 26100 - DNA, 1152 bp, Zea mays
  Clone ID: LIB4073-015-G5_FLI
tctagcaacacccaaggacaaggagtagccgacgcgccagctagtgcccagtgccgcacccagatctccgggagggacttgttcagctactgcagcactgcccgcaatggccaccacggcgaccgaggcggccaaggccgcgccggcggagcaggccaacggcaacgccaacggcgagcagaagacgcgccactccgaggtcggacacaagagcctgctcaagagcgacgacctctaccagtacatcctggacacgagcgtgtacccgcgggagccggagagcatgaaggagctccgcgagatcaccgccaagcacccatggaacctgatgacgacctccgccgacgaggggcagttcctcaacatgctcatcaagctcatcggcgccaagaagaccatggagatcggcgtctacaccggctactccctcctcgccaccgcgctcgctctcccggaggacggcacgatcttggccatggacatcaaccgcgagaactacgagctgggcctgccctgcatcgagaaggccggcgtcgcccacaagatcgacttccgcgagggccccgcgctccccgtcctcgacgacctcatcgccgacgagaagaaccacgggtcgttcgacttcgtcttcgtggacgccgacaaggacaactacctcaactaccacgaccggctgctcaagctggtgaagctggggggcctcatcggctacgacaacacgctgtggaacggctctgtcgtgctccccgacgacgcccccatgcgcaagtacatccgcttctaccgcgacttcgtgctcgtcctcaacaaggcgctcgccgccgacgagcgcgtcgagatctgccagctccccgtcggcgacggcgtcaccctctgccgccgcgtcaagtgaaaaaaaacatgcctggccaccgacggcgccgccgccgccgcatcccccatcccaatcatatcgtagacgacgcgcagcattaattattcaccggcttttttttttggctctttcttggccctgtaatcttttcttgtccttctgcttcttcttgggaattgtcgccatctccatacgtaaatctaaatctcgagatggataatactagtatcaatcaattttactactatatactgctcctaccgtggatgatttcgtcc

SEQ ID NO: 26101 - DNA, 758 bp, Zea mays
  Clone ID: LIB4073-015-H8_FLI
gaaaagaacacctagctaggaaaaatcccaagcagctgttgcaaccggttcctgcgaggagaaacaagcatgaggccccaggtggtgctgctcgtctcgctggctgtcttcgtcgtcctcgtagctctgccactcggcaaagcgaacgaggagaaggaggccgccgccgaaggggttgacgcgaggaggtggaggtggccgtgctgcgacgagtgcggcgtttgcacgaggtcgcagccgccgatatgccagtgcctggacacgtcgacgagcggctgcaacccggggtgcaaggcgtgcgtcaagtccatcagcgacggcctctacgagtgcaaggacaggatcgtcaacttctgcaagcgccgctgcacccgtcctgctgctgctgctgctgctgctgatgcgtgatctgcgcggtcgtcgtccgatcccagagccggcaaatgagctttgccaataaataatttccgttcggacttcggagttccctttttgcatctttctcaagatgcagacagggtttgaataaggtgatgcttgctgttttctgaaataaagagcatggatgtgttatgctcggagttctgtagtcatgggaggtagagaaaatgtaataatcgctttgtttatgtgcatctttagatgccatagaccgaggcatgactagctaataagcgcatggctacttgcatctctttgatgcaaaggccgtgatatggacatgtctatttcatataattcccacaaatatcacaaac

SEQ ID NO: 26102 - DNA, 1047 bp, Zea mays
  Clone ID: LIB4073-016-C4_FLI
gcaccggcaaggccgcactaccgctcaagcgcgaccgcacgaggtccaagaggttcctcgagatacagaagctgagggagagcaagaaggactacgacgtgcccaccgccatctcgctgatgaagcagatgtccagcgccaagtttgtcgagtcggcggaggcgcacttccgcatgaacctcgaccccaagtacaatgaccagcagctccgggccacggtgaatttgcccaagggaacaggccagtcggtgaagattgcggttctcacacaaggtgagaagatagatgaagctagagctgcaggagcagatatcgtaggtggagaagatttgattgaacaaataaaaggaggatttatggagtttgacaaattgattgcatcacctgatatgatgcctaaggttgccggcttgggtaagattctaggaccaagagggctgatgcctaaccccaaagctggcactgtttctccaaacattactcaggctatcgaagagttcaagaaagggaaggttgaatacagagttgataaatcaggaattgtccatattccctttggcaaggttgactttccggaggaagatctcattgcaaacttcatggccgttgttcgctctgttgagaggaacaagccatctggtgctaaggggatatactggaaaacagcgtacttgtgctcatccatgggaccttctatcaagctaaacataaaagaaatgcttgattatggtttggactcatctgactagatgtgaccacaggcaccagttaagtcagattaactatctgccccttgcgacaaatgagcggagacatggttgtggggtatggcaaggaggtgcttaggtacagttttttcagttttacgggcacccatcatcagagcagctaaagtatgcccagatcgacaaagaggtggtcttgttggtcatgtatttatgagcaaattattcatggtttcatagatgtctgtctctgagacgtttgttgtaatgtttcatattctgtcaatagtcatccttgagcttaagccagcaatttattttc

SEQ ID NO: 26103 - DNA, 664 bp, Zea mays
  Clone ID: LIB4073-016-F12_FLI
gaaatctcccgtccccaaatcgaccgagcgaattcaccacagcctcaccgtcccgaatccgcaccaccgatggcacccaaggcggagaagaagccggcggcgaagaagcccgcggaggaggagcccgcgaccgagaaggcggagaaggccccggcggggaagaagcccaaggccgagaagcggctccccgcgggcaagtccgccggcaaggagggcggcgagggcaagaaggggaagaagaaggcgaagaagtccgtggagacctacaagatctacatcttcaaggtgctcaagcaggtgcacccggacatcggcatctcgtccaaggccatgtccatcatgaactccttcatcaacgacatcttcgagaagcttgcggccgagtccgccaagctggcgcgctacaacaagaagcccaccatcacctcccgcgagatccagacctcggtgcgcctcgtcctccccggcgagctcgccaagcacgccgtctccgagggcaccaaggctgtcaccaagttcacctcttcttaggttcgtagtagtgatggctgggtggtgctggtagacatggctcggtttatctggtagggcaagcgatggatgttggtgatgatgatctgcgtgtaattgtgttgttaagaattgtgaaacactgttccacatc

SEQ ID NO: 26104 - DNA, 663 bp, Zea mays
  Clone ID: LIB4073-016-G12_FLI
caacgacgtggcaagaaagaactacctgcagggctacgtcacatgcctatccaaagcagtcaggaacggagcaaacgtgcggggctacttcgtgtggacgctcctggacaacttcgagtggacgttcggttacaccgtgaggttcggcctgtaccacgtcgactacgacacccaggagaggacgccccggatgtctgcgacgtggtaccagggcttcctcactgcaggcaacaccagcctggtgacccacgaagacgaagcgcaggcacggagagcagacgcgtgatggtgatgcttccagttccagcgaacggatgcgttgctatttgctaaacagctagccgcaggcctcaggatgaactcaggagtcagcactactcgatcgtgctcgtctccttcccctcgccatattagaatgcgtggggtgtcctagctagtgtgtgtgtatatggatagatataatatatgggcatcattagaaaaggtggtactgctgcatatatagtggatcatgctgtactgctgctcgatggcttaacggtctgtactactagctagatgcttgcagttgcaggtagatgctctcagacgatctgaatgtgaatgtctgtctgtagtactatttcatagacgaacgcccagcagtccatttctgctgctgag

SEQ ID NO: 26105 - DNA, 423 bp, Zea mays
  Clone ID: LIB4073-016-G9_FLI
gccagagaaggcagatgaattcaagaagggcattgagggtgccaccaagttccttcttagcaagctcaaagatcttcagttctttgttggtgagagtatgcatgatgatggaagcctagtgttcgcttactacaaggaaggtgccactgacccgacattcctctattttgctcatggtctgaaggagattaagtgctaggcgggcatgccctctttacctcatgttgcttgttatcatctttacctcatgtcgatggttatcatctatataatactatcctatttttgttctagtatggattatgtcatggatggttatggaaaaactgttttggaaaaaaactgttggaagaatggattcggattatgacgtgaaatgttttggaaaaactgagaagattggattggagttttccaatatct

SEQ ID NO: 26106 - DNA, 1766 bp, Zea mays
  Clone ID: LIB4073-017-C2_FLI
ggggagaggagcagggcgagcagccagagaacacagggagggaggtagagaggcggaggcggaggaggagggggagtagggagaaggcgaagaggaggaaccaaatctcggaggtgaacagagagatttctttggcggaggaaggaggaggttagaggtagcccaatagatctgctgctgttgggggagttgatgcaaagctgagttgctgcacgttggattccttcagagatggcttcagctggtgtagccccttctgggttcaagaacagcagcagcgccagcattggtgtggagaagttgcaagatcagatgaacgagataaagattagagatgataaggaagttgaagcaaccataattaatgggaaagggactgaaactgggcacataattgtcacgactactggtggcaagaatggtcaaccaaaacagacagtgagctacatggctgagcgcattgtaggtcaaggttcttttgggattgtcttccaggctaagtgtttggagacgggtgagactgttgcgataaagaaggttcttcaggataagcgttacaagaaccgtgagctgcagaccatgcgccttcttgaccaccctaatgttgttgctttgaagcattgcttcttttcaacaactgagaaggatgagctttatctaaacttggtccttgagtatgtgccagagacagttcatcgagttgtgaagcatcacaacaagatgaaccaacgcatgccacttatttatgtgaagctgtatatgtaccagatatgtagggcattggcttacattcatggtactatcggtgtctgccacagagatattaagccacaaaatcttctggtgaacccacacacccaccagcttaaactatgtgactttggtagtgcaaaagttctggtcaagggggaaccaaacatatcgtacatctgctcccgatactatagggctcccgagctcatatttggtgctactgagtataccacagcgattgacatttggtctgctggatgtgttcttgctgagcttatgctagggcagcctctgtttccgggtgaaagtggcgtggaccaacttgttgaaatcatcaaggtccttggtactccaacaagggaagagattaaatgcatgaacccgaattacacagagtttaagttcccacaaatcaaagcacacccatggcacaaggtattccacaaaaggatgccgccagaagctgttgatctggtctctcggctactccagtactccccaaatctgagatgcactgctgtggaggcacttgttcacccattctttgatgagcttcgagatcctaatacccgccttccaaatggccgctttttgccaccccttttcaatttcaaggctcacgaattgaaaggagtcccagcagacattgttgcgaaattgattccagaacatgcaaagaagcaatgctcctatgtcggattgtgaaatggctgtgccttgagactgaacctatggttgcaattgtgcatttcccctgggatgttggatgatctgaggcatgcgagcccgtcgttgaagatgcaaggttatctacttgtacgacaatgtgacctgtgtagctgagtagtctatgtcgcagtgacatgtaacggcacccccttcctactaactgacgcttactggagattgccatagctgatcttgtaatttgttatagagcagtatgaatgtatttatggtagcttgaatctatgtatggattcacttcgttttttcatgtttccttgtctccg

SEQ ID NO: 26107 - DNA, 675 bp, Zea mays
  Clone ID: LIB4073-017-D8_FLI
gaagaggccgaaggaaaacaaatcctgaaaccaagccatgggtctgcaggaggaatttgaggagtacgctgaaaaggcaaagaccttgcctgagagcacgagcaatgagaacaagctgatcctctacggactgtacaagcaagccactgttggaaatgtgaataccgaccgtcctggcatattctaccagaaggacagggccaaatgggatgcatggaaggctgttgaaggtaaaccgaaggaagaggcaatgaatgattacatcaccaaggtgaagcagctccaggaggaggctgcggctgccacttcttaaagtctcttaatagttgccaaacagctattgtcagctgagctttatgccatttgttcgtgagaaatagatcatttgatccactggggatctgtgaactatgtacctgcttatgtaactggttaccaatgttatccatctatctacatgtgaagacttaatatgtctgtgtattaaggctgtgtttggttcagtttctaggaagtgcgcttctgctggccaaacgggtagaacacgaagctgtttttccaaaataggctgttttcatgtagtataattatcccacaccttggaccctgctttgcctttcagctttcagttttccaaatgggtgaataaaataaagagatgttttcatttgcttc

SEQ ID NO: 26108 - DNA, 584 bp, Zea mays
  Clone ID: LIB4073-017-F8_FLI
ctcgacggaggaggcgatgcggagcgccatcgagggtatgaacggcaaggagctcgacggccgcaacatcaccgtcaacgaggcccagtcccgcggcggccgtggaggcggcggcgggggcgggtacggcgggggccgtggaggcggtggcgggtacggccgccgtgatggaggtggtggtggctacggcggtggcggcggcggctacggcggtggccgtggaggctacggcggtggcggctatggcggtggcggcggcggctacggtggtggcagccgcggcggcggtggctacggcaactccgatgggaactggaggaactgagcggtggggcccgcgcggccaagttatcttgttcgctactgctaccatgttgtgttgttaccctagtccatagggtttatctatcgtcttgttgttcgtcgtcgtcgtgtccgtgtgtttgttgttgttgcccatctgtgtttttgatcgcaagttgtgttagtgctgtgttcgtcctcgtcttgagccccgtgcatcaatcaagcatgaactgggctccagggatcgatggatgttgttgtcaagttatcagtcaatc

SEQ ID NO: 26109 - DNA, 1023 bp, Zea mays
  Clone ID: LIB4073-017-G2_FLI
gtgagaggcaagggacgtaagaagtcgtctaattctttgatcgaattaggcgccttcttcgtcccacactcctctctttatttgtaatttagcacgctaacttctaatctacaggatctaaagcaacacttgattcaattatggacggattggtaggcctcttgaaagtccgggtggtccgagggatcaaccttgcctaccgcgacgcaagaggcagtgatccttatgttgtcttacgacttggcaagaagaagctgaagacaagcgtgaagaagagatctgtcaaccccatctggcatgaggagctaactctgaccgtcacagatcccagccaaccactcaagcttgaggtgtttgacaaggacacattcagcagagatgacccgatgggagacgcggagatcgacgtcgcaccattgatagaggcggtgaacatgaacccagaggagatcaggaacggcgccatcatcaggtccgtgaggccgagcaccaagaactgcctcgccgacgagagccacgtgtgctggaggaatggcaagttcgtgcaggacatgatcctccggctcaagaacgtcgagagcggggagatacagttgcagctgcaatgggtaaacatttctcctgttgcagccaggtgaatcatcatccgattgtatatagctgctgttcctgtcattgcctgacaggcacaacgacaggaatttatttccaaatcggtgggcacgggacggatgcctgcccctctgttcatccgcgaaatgaagcgtcccgtttcaatcgcattttcacctcttgtgaatgtcggattgtatgtaacttaaccaacaatggggtcagggtagttgatgttgcttcgtagtggggagaaaaaacaagaaaaaaagagaggaaaataatgtcggatggcgctgccaaaatgtaaatatccggggacaggacacgcacacagctttgctttgtaaagcctgggacaacataataattgaagtcaagtggtaggatcttgtttggtaacaaacttac

SEQ ID NO: 26110 - DNA, 499 bp, Zea mays
  Clone ID: LIB4073-018-A4_FLI
tgtagcaaaaatgacggctggctacattgttggctcactggtcggatcctttgccattgcatacctgtgtgacacatttgtttctgacaagaaggcttttggaggttccacccccaagactgtctctgagaaggagtggtggcaggccacagacaccaagttccaggcctggcctcgcactgctgggccaccggttgtcatgaaccccatcagccgccagaacttcatcgtcaagtccactgagtaggctggagaagttggttcagcaacgtgttgccaccatgaagctaaagttccttttctaggtcttaattgattgtaataaaacgaactacagtcaggctttttgtgattttcactcccatctgtgaacaaacactggggctttcagcttacttgtcattcaatgggttctgttccttggtgaaatttcccgccaggcagtaaagaattgcaacgttttctataatatatgcttttgctattttgctatgcagcc

SEQ ID NO: 26111 - DNA, 834 bp, Zea mays
  Clone ID: LIB4073-018-C12_FLI
ccgtgaaggcgacgccgggctcgggcgggcgcatccccgaccacaccggcggcaacgacccctacgtccccggccccaactcttctcagatctagatcggcggcgaccgcctcttccggccacacccgcgccaccggagacgcatcggtggtgccagagacgaaccagtctgcacaccttctctctgcaggagacgatccttcccggtcgcatctgctatttgcccgagataatcccgtcccagccatgtgaatctgtccagcgataggcggctttgtgtggaggcaaaggatcgatgtatattcagtagatgcgaaagttgggcatttttaggccagattaacgactagtgctccagtaacgggattttccagtttccacaaagtcacatcctctggccgccggcggactcattgtttggccaaaagtaaatcagccggacacctgatctgcgcacaaaggagcacctccagattgaaatcaatttgatctagaaaaccagaactgaactaacagaattaattccggtggttacttaggccaagatgcacgagaaggggccccagttttggttaaagctgcacttctacatgcttttgccatccactgaacaactaagaaacttctagccggacctgaggctcacatggcatgatcttgatcgttcaagagtccttcaaaatgagtggagacctagtatcattctgatggaaaaatggatcgatgtactctttctattttttactagttttttgagaaatatgtaatcactttcatgccaatcttatgtaacaccacagcctaatcatcatttgcaatattctgaaatgttgt

SEQ ID NO: 26112 - DNA, 910 bp, Zea mays
  Clone ID: LIB4073-018-D6_FLI
gatcgacaccatccatactttctcaaagcttgctttcgaaacacttgatcaacactactgatcgatcaatggcttcttcctgggtttctcggttgcctctggcagtgctgctgctcgtggcctgctcctcctccagggcagcggccaccagctacaccgtcggcgacgggtccggctggacgaccggcgtcgattacacatcttgggccgcctccaaaaacttcaaagtcggggacaatctggtgttcaactacgcgaaagggctgcacacggtggtggaggtgagcgcggcggagtacatggcgtgcacggcggccaacccgctgggctccgacagcagcggcgcgaccaccgtggccctcaagacgcccggcacccactacttcgtgtgcagcatcacgggacactgcggcgccgggatgaagctcgccgtgaccgtcggcggctccaactcccctgccaccacgccgaccccgacgaccccgcgcacgtccccgaccacgccctacacgacgccgacgaccccgactaccaccacgccgtacacgactccgaccacgccctacacgacgccgacgtgctctggcggcggtggtggcaccacggcgaccccgggcatgactccgttcatgtcataccccagcgcggccggcctcggatcggcggcgttggctggatttggactggtttggtgtgtgatcgtccaggtagcgctgctctactaggcacaagggcggtcgaccaggatggaggcagagataggtcatgtcgcctgtaagctgtaacgcactactgatgtgtttgttctttgttccggatcgagctagctggggtatagtgtacttggatgaaggaaactggtgtctctgctccgctgtgaatcgcaggtgcaagtcaatttccttgagcc

SEQ ID NO: 26113 - DNA, 1253 bp, Zea mays
  Clone ID: LIB4073-018-E1_FLI
gttacattacataccatccaccaaacgatcaaaggaagatgggagcgaacatgatgtcgtggtcgatgcaggtggcgttggtggtggcgctggcgtttctggtgggcggcgcatggtgcggtcctcccaaggttgccccgggcaagaacatcacggccacctacggcagcgactggctggaagcgaaggcaacatggtacggtaagccaacaggcgccggccccgacgacaacggcggcgcatgtggttacaaggatgtgaacaaggcccccttcaacagcatgggcgcgtgcggcaacctccccatcttcaaggacggcctcggctgcggctcctgctttgagatcaagtgtgacaagccggccgagtgctccggcgaggccgtggtggtgcacatcacggacatgaactacgagcaaatcgccgcctaccacttcgacctggccggcacggcgttcggcgccatggccaagaagggcgaggaggagaagctgcgcaaggcgggcatcatcgacatgaagttccgccgggtcaagtgcaagtacggtgaaaaggtcaccttccacgtggagaaggggagcaaccccaactacctggctctgttggtcaagtacgtcgacggcgacggtgacgttgtgggggtggacatcaaggagaagggtggcgacgcgtaccagcccctcaagcactcctggggcgctatctggaggaaggacagcgacaagccaatcaagtttcccgtcaccgtccaaatcaccaccgagggaggcaccaagaccgcctacgaagacgtcatccccgaaggctggaaggccgacaccacctacaccgccaaataaactgtccaacagacctaacgctgctctgggctcggttggattggatcccaacttcccaagcaatgcattacacttacgcatgcatcgatccatgcacaatatctatttttttactgctgctactgctacgacaatgtcctcctttgtcctctccatatatagctagagtcaggctccgctctcttatattattattatataagataagaaataggagagagaggagagagagaccgagtacataataagtgtctaattaaagagagatttgagaggcctttattttgtatataataaagaatccaaggagtgaggcaaacagcaacaaaaatgcgttgtactgtccatggataaccatgtaatctcaattataccatgtctacattttaatagaatacacactttttaatgatt

SEQ ID NO: 26114 - DNA, 889 bp, Zea mays
  Clone ID: LIB4073-018-H11_FLI
acagaacgcagcagccgaaggaaaaatttccccccaaccaaaaaccctcgctcccaaaccctagctaccttcggatcccgatggcgaacccgcgcgtcttcttcgacatgacggtcggcggcgcggcggcggggcggatcgtgatggagctgtacgcgaacgaggtgcccaagacggccgagaacttccgcgcgctgtgcacgggcgagaagggcgtggggaagtccgggaagccgctccactacaagggctccaccttccaccgcgtcatcccgcagttcatgtgccagggcggcgacttcacccggggcaacgggaccggaggcgagtccatctacggcgacaagttccccgacgagaagttcgtgcgcaaccacacggcccccggggtgctctccatggccaacgccgggcccaacaccaacggctcccagttcttcatctgcaccgtcgataccccctggctcgacggcaagcacgtcgtctttggccaggtcgtcgagggcatggacgtcgtcaaggccatcgagaaggtcggatcccgcagcggatccacctccaaggaggtcaagatcgctgactgcggccagctcagctagatcgttggtctggtctggtctggtctgcccgtccgccctccctccctcccgtcatcgtccactccgcctgcgtcccgtcccgtttccggtttgcttcgatctgaataagatgatggtgatctgagtggtggtctgagttgagtcgtttgtttgtcatgcgtctgtctgtgtcgctcgcggtttaattctggcggtgtaggtgtggatctccgaatcccatggcgcctctgcttacttcgtgtttcatcaccagttatgttatatgagatccaggataatgcattaatgct

SEQ ID NO: 26115 - DNA, 582 bp, Zea mays
  Clone ID: LIB4073-018-H4_FLI
ctcataaaggggaatgaagagacatattgaggtttccagctcaagaagaaagcaaagaaaggctcatttcactgctccttctcatcttaagagaaagatcatgagctcccacttatccaaggatcttaagaagaagtacaatgtcagagctgttcccgtcagaaaggacgacgaagttctcgttgtcagaggtcctttgaagggtaacaagggtaaagtcatccaagtatacagagccagatggtgcatctacattgaaaagctcaccaagcaaaagctcaatggtcaacccatcaacattcccatcgacccatccaaggttgtcatcaccaagctcaagatcgataaagacagaaacgacttgttggcccgtaaggaaagaaccctcagccttaagatgaagggtggcaaatacaccggaaaggacgtcggtatgggtgtcgattaatccagttaaaaaaagcacacttaagtttatgttattatgcttgttatccccttgatcctatgcttaatagtataagaatctaaacttaacctttcctcatcacataaaacccctgcatgaatcgttatccagtg

SEQ ID NO: 26116 - DNA, 836 bp, Zea mays
  Clone ID: LIB4073-019-A10_FLI
caactggagaagctcaactcgccgacggatcggaaacaatggcgagccgccagccgcggccggtggacgcttccctgagatcgctgtcgattgcatctgcgctgctgacatggagcgtttgctgtgccgcggtgagtgtgagggcactacctgaacctgacggttgtagctccaactccaacatgacagaactccagatgcatgtgtcattcttcgacaggaacaaagatggcatcctcactcctcttgaaactttccaaggatttgttgctatcggatgtgaagttgctttctccaccgcggctgcatcgacaattcatactgctctcgctcctttgaccaaccctcctggtgcactgccaccttacataaatatctacgtggagtacatccacaaagcaattcatggaagcgacaccggtgcctacgattccaaaggaaggtttgtccaggcaaaatttgacgaaatatttaagaagcatgctcatatcagaaaagacgccttgtcgctcttggaggtagaagagatgctcacagtcaaccgggacgttcttgatcctgcatcatgggctgctgctgaggccgagtggcagctgatctaccagctagcccacgacaggtatgggtttcttaccaaggaacgcgcgaggggcatctacaacggcaagatcttcgttgagcttgaggaacgcatcagcaggagacctcttcacagcaacgcatgatatctatcattaatttggcagctgcagcaacttgtatgcttcacatgatcacaattaggcagccgtggtagtaccagcatattgtatactggaatggaacctgatttctat

SEQ ID NO: 26117 - DNA, 555 bp, Zea mays
  Clone ID: LIB4073-019-A5_FLI
gcgaccggatagggagcacgccgcacaagcccttccggcctcctttccgccgccgccaaaatggtgaacgttcctaagaccaagaagacctactgcaagaacaaggagtgcaagaagcacactctccacaaggtgactcagtacaagaagggtaaggatagcctgtctgcccagggaaagcgccgttatgaccgcaagcagtcaggatatggtggtcagaccaagcctgtcttccacaagaaggctaagaccaccaagaagattgtgctgaagctgcagtgccagagctgcaagcactactcacagcacgcaatcaagaggtgcaagcattttgagattggtggagacaagaagggcaagggaacatctcttttctaagtttatcatcaccaatgtgtgtgggtctactactgttctaaagactttttgtcaaatttcaatgttactagtagttctgaaagcagaccatgctatgtatccaaattccaatgcctgacatttgctctgagtgttggtcgacttttggctaaatgaacatttgtagcttgaatcgtc

SEQ ID NO: 26118 - DNA, 1106 bp, Zea mays
  Clone ID: LIB4073-019-B1_FLI
cttgaaggtaaaagtgctgaaggtattagaaaagcatcacagatgattgcagatgttcttgaagaggctgttaaaagtcgacagctcgactactctcatttcatatcacttccattggctctccgcccatatcttgtcgagaaacggaaccacttccagagttgaatccttggggaagaagacagtgacaaagatgagagccgaagaacatgtttgaaacttggtctctagcttggtgggaatatccaaagaaaccacaaagcaccatcttaaacaaaatctctagaaagttttccttgtgattaggatttgaaatatcacctctgttctatgaatttctaaaatctaaatttaaatgtcttgttcccttcaggctttgagttgtttatttgtcacctgtagattttggcattgacaagtcaatatttatcaaaccgaaaacatttcacctgacggttcttatgttgaagttgtggaacaaggatcgtatagctaaggccgcggatgtgctccagtcagtatctaccaaagtaaatgaagctttggaaaatcgacctatctccatacagcttagaggtctgacatgcatgaaaggttctccagctaaggctcgggtggtatatgctccagtgctggaagttggtggcgaagggcgcctagcacgtgcttgtaaagtcataactgatgcctttgtcaagtcaggtctagtttttgaaagggacgcaagagaacttaagttgcacgcaaccgtaatgaacgtgcggcataggaagaggaaatacgggaacgaggactggggcgaatatcccatccatgaggtccacctttctcagaggttcaagtttgacaaaagtggatactactattgctgcccttgcctgcagagatgcacacagagtgagatttgtagctgtgatcatgttttagggttgttgcataataataataataataataataaaactgctgttcatgaggcgtttaactttgttatcagcggtatgcccttaggtcaggtgttactgtgtatcaattgttttgaatcaccgatgagcaggtgtatctactgtcttgagtcaccgatatgagccatgtgttgtcgttgg

SEQ ID NO: 26119 - DNA, 1550 bp, Zea mays
  Clone ID: LIB4073-019-C4_FLI
gggcactgctgccgtcgcgctggcgctgctgttcttgtcgtcgtcgacgaccctgcgcctcgccgtcgtcgtcggagcccgcgtcatccaccagccgtacggcggcggcggaggtggtggaccatgcgcgctggccgtggcgccgctcggctacccctgcgaggagcaccaggacggcatgtcatggctgctggcctctccggaggagtcgctgccgttcatcctcgccgaccgcggcttcgacgtctggatcgccaacaaccggggcacccgctggagccgccgccacgtctcgctcgacccctcaagccggctctactggaactggtcctgggatgacctggtggtcaacgacttgccggccatggttgacttcgtcaacacacagaccgggcagaagcctcactacatcggacactccatggggacgctggtggcgctggcggccttctcggagggccgggtggtggaccagctgaaatccgcggcgctgctcacgccggtggcctacctcgcccacatcaccacccccatcggcatcctgctagccaaggccttcgtcggcgaggcgctctcggacctcctcggcgtcgccgagttcgacccggtagcgtacgtacggcgtcctcgggctcgcatctccaggctgcagtccctgcactgcagatcgattcagattattcatctctccgtttttggatcactcgattcgtgtgttgtgatcagctgacctgctgctctgctgactgcgcaggccgccggtgacgaacctgatcagggcgttctgccgccggccaggcatgaactgctacgaccttctcggatccatcaccggcaagaactactgccttaacagctccgccgtcgacgtcttcctcaagtacgagccccagccgacctccaccaaaaccatggtccacttcgctcaaaccgtgcgcgacggcgtgctgaccaagtacgactacgtgctgccggagcgaaacatcgcgagctacggccaggccgagccgccggtgtacgagatgtccggcatcccggcgggcttcccgctcttcctcagctacggcggccgggactcgctcgccgaccccgccgacgtgcgcctcctgctgcaggacctccggggccacgaccgcgacaagctcacggtgcagtacctggaccagttcgcgcacctcgacttcatcatcggcgtctgcgccaaggactacgtctacaaggacatgatcgccttcctcaaccgcttcaactagtagtagctatagctactagttcagtgactgccatcttcagtcttccactcactgcagggcgtgaacattggtcatacatatgtcagaagtgaaaaatatacatgaagtaatttaatactactagattactagatagttatattgatatggatttgtctgagcaaggaagctagctagatagccagctaggtgtcatggagaagggtgatcaccggaacagcggtcagcccagccagtcgtcacactgtatttgcaatttgtaacactgaacaattactaaaggaaaggcagtagctc

SEQ ID NO: 26120 - DNA, 845 bp, Zea mays
  Clone ID: LIB4073-019-D7_FLI
tgacaagcctagccgcccacgcgaaggccggtggcggatgcctttataaggaacgtgtgacgacgggcgaggcagacctctgcactctgcaaacctccccgtccgctcggcccggtcaaacaagtcaggtagccgcgtcgtcctccggtcagagctcaagaagcccaccgcgatcgacgcggcgcaggcgagacagcatgggtgggggcacggcggcagagcccccggcgtggatggccgccgccgcgcgcaggtggctggagaacgccggcgccacggtggaggacgccccgggccgggccttcaacgcgctgcccctctccggcgtgcgcgtgtccctcgccgagcgaggccgcgcgctctgctccctccgcgtgccgccccaactcacagacgcggaggggaactggcacacgggcgccatcgcggcggcggcggacgacgtgtgcgccgcggccatcatgtccgtcgagggcatcatcaaggtctccgtccactacgacatctcctacttcacaccggccaagctccatgaggaagtggagatggacgggcgggtggtcgagcagaaagggcggatgacagcggtgacggtggagatccggaagaaggagtccggcgagctggtggccatcgggagacagtggatgacggcctccaggcccaaaggctctcagagcaagatctgaagcttcctttaaatttaatcagtagcttgaaaattaatcagcaagatctgaagcttcgttgaaaattcagttccagatgttactggtgttgatgtcccctgtaatttaatcatgcattggcaagcaagatgaaaatcttcatctctgtcctgcgtt

SEQ ID NO: 26121 - DNA, 808 bp, Zea mays
  Clone ID: LIB4073-019-D8_FLI
gtaacaaattcagcagctccggggctcccccaacggcgccgccgccggcagcgtaccagcagcagcagcacggggcgaacatgaacccttcacgccccggcggcgggctgaggaaatggtccaccggccttttccactgcatggacgacccgggaaactgtctcatcacatgcctgtgcccctgcatcacgttcgggcagatcgctgacatcgtggacaaaggcacctgcccatgtctcgcgagtggattcatctatgggctcatctgcgcctcgacggggatggggtgcctgtactcgtgcctctaccggtccaagctgagggccgagtacgacgtggatgaaggggagtgcccggacttcctggtgcactgctgctgcgagcacctggcgttgtgccaagagtaccgcgagctcaagaaccgtggcttcgacctgggaatcggttgggaggccaacatggaccggcagaggcgaggagttaccggcggcacggtgatgggggcgccggccataccgctcggcatgattaggtaggtggtggatgggaaatggcaacgctttgctagttgctttcatggtgacattggtccctttgtgttgctatgtacgtactccgtaatttatttttgtttcttcgaacctatgtaatttatctggctttttttcactctttctcgtctggagtcgtgtgtacgacgctgctttttagttgggtgtgaatcgtgcccgtggtacctgtaatatactgtattctgctgaagtggagcttaaatttgaaacccgccatgccggagaggcaaatggct

SEQ ID NO: 26122 - DNA, 575 bp, Zea mays
  Clone ID: LIB4073-019-F8_FLI
ccaaagcgaccaacctcttgcttcccaccgtacctgcctgccacgccgcagcctccggctccgatgtcgtcgcagcgcccgggccgccaccagcgtcgcgcgtcgcagagcgtgttcgtgctcccggagaacctggcctccctcgacgtcgacgcggcgggcgaggtgggcgcgaattcgaaggccggtggcccagacggcgccggcgccgagcagcaggcgaggccgcccgcggggcgtcaccgccgcgccatgtccgtggccgtggcctccactagggacctcgagctgatcaaggaggacctcggcagctacaagctcggcgcttgagagagggggccggctggcacgtcgcgtcatgtgtatatagcctgtgggttagccgtgcccagacctggctttgatcggcgcttaacagtggcttaattacaaggtctctcctccgttgctctttttgttttcgctcaacacacgcatatgtaatactactactagtactatgtagtaacttttttcattacaaagaggaagtatttggacactttaatcgcgtgaaggtcctgctcagtggcagc

SEQ ID NO: 26123 - DNA, 505 bp, Zea mays
  Clone ID: LIB4073-019-H2_FLI
gcatccacgagaggagagcgaaggagattcccattcgcccctcaaatctcaccagaagcgaagccggaggcggaggagggaggaaggagatcgcgagcagccggagccggagccggagccggaggccgagaagatgaagacgttcgacccgtggccggtcttcttccgccgggagtggaggcgcaactggcccttcctcacggggttcgccatcaccggattcctcatcaccaagatgacggccaacttcaccgaggaggacctcaagaactccaagttcgtccaggagcacaagaggcactgaccgaccaggtgaaggagttgtccgaatttcctgtggacagccagttatgttatgccgtttgaatgaaaaattagccccctctttttcgttttttaaatctaaaaatgcgtgcactctatgctccatttgtaatgtaataagaggcaactgaattgattcaacagcaatcagcttctgattaagatacataaagtttaatcc

SEQ ID NO: 26124 - DNA, 601 bp, Zea mays
  Clone ID: LIB4073-020-A11_FLI
caaacccgcgccggccgccgcctccaccgattgatcgatcgccgggaaactgacctctgccgctgctgagttcggagccttcgtcgacgatgtctggagccggtgaggaggacaagaagcccgcggaggcgggcggcgcccacatcaatctcaaggtcaagggacaggatggcaatgaggttttcttccgcattaagaggtccacccagctgaagaagctgatgaacgcctactgtgaccgccagtctgtggatatgaatgccattgcattcctgtttgatggccgcaggcttcgcggcgagcagaccccggatgagctggagatggaagacggcgatgagattgacgccatgcttcaccagactggaggcagcgttcctggcgcctagatgcagccgttgcagagcctcttttgctgcgccatgctccgccttccctagcagtaaactaaagaagtctttttaaggaacttgtgatgctctggcaccctgtgccattgctgagggacatcattagccttgtttagtatggtttggtacctttgtctgtcatatgactcgtttatctatcccctaatatatcccgccatgtttgtactccc

SEQ ID NO: 26125 - DNA, 1005 bp, Zea mays
  Clone ID: LIB4073-021-A8_FLI
ggaacgccaagctcccctccggcgaaatggccccgaagcgaggtggcagggcgcctgtgccggccaagaagaagacggataaagtggtgaaccctctgttcgagaagaggccgaagcagttcggcatcggcggcgcgttgccgcccaagaaggacctgcaccggttcgtcaagtggcccaaggtcgtccgcatccagcgccagcgccgcatcctcaagcagcgcctcaaggtgccaccggcgctcaaccagttcacccgcaccctcgacaagaacctcgctaccaacctgttcaagatgcttctcaaataccggcctgaagacaaggctgccaagaaggagaggcttctgaagagggctcaggctgagactgaaggaaaaactgttgaagccaagaaaccaattgttgttaagtatggccttaaccatgtgacttacctcattgagcagaacaaggctcagcttgttgtcatcgctcatgatgtggatccgattgaactggttgtgtggcttccagccctgtgcaggaagatggaggtcccttactgcattgttaaaggaaaggctcgccttggatcgattgttcacaagaagactgcatcagtcttgtgtctgaccactgtcaagaacgaggacaagcttgagttcagcaagatcttggaggctattaaggcaaacttcaacgacaagttcgatgaggtgaggaagaagtggggaggtggtatcatgggctccaagtcgcaggccaagaccaaggctagggaaaagctgatcgccaaggaggctgctcagcggatgacctagattatccacttctgagtgtgccctgtagttttgacgtggaagaactgataatcgttgtgcactcgtattgtggttttctgaatcaagtttcatatgtttctgtccaccagaccatgtttagaaactttgcaagacagagtttacagtgtttatgcgatgtctcagctagtatattattttgtgccccaggcaaccttgtttt

SEQ ID NO: 26126 - DNA, 453 bp, Zea mays
  Clone ID: LIB4073-021-E4_FLI
cagcactcactggatccccacacgactgtcaaggcacgtttcaacaactatggcatggccagtgcccttgtccagcatgaatggcgtcccaagtcattcatcaccatctctggtgaggtcgacaccaaggccattgaaaagagtacgaaagttggcctgtccttggtgctcaaacactgaaatgctgaatgttttgggctctaggattttattttcggttcaggtggattggaataaacatggcctggagtcatctttgcggcaccattttgatcttgaattactttttttttctcacatgatcaatttgataggcaaatattaggattgaccttatgttttaattctcagcgccctgttaataatttctggtgattgagacctattgttaagcttgtcaaatatgatggtgattattttgtgttcacttctatattcattcattcgtcagtc

SEQ ID NO: 26127 - DNA, 910 bp, Zea mays
  Clone ID: LIB4073-021-E5_FLI
cgcacggcgagctagaactagaatggccaccacagccggcgccggaggcgccgggaagctgaagctgctgggcgcgtggccgagccccttcgtgaaccgcgtgcgcgtggcgctgcacctcaagggcctcgagtacgagaacgtggaggaggacctcaccaacaagagcgaccagctcctcgcctccaaccccgtccacaagaaggtgcccgtgctcctccacggcgacacgcccgtctccgagtcactcgtcatcgtggagtacctcgacgacgccttccccggcgccggccaagccctcctccccgccgacccctatgaacgcgccgtcgctcgcttctgggccgcctacgtcgatggcaagttgcacggcatgatggtgaaggcgatcctgggggcaacggaggaggagagggcggcggcgacagcggacgcgttggcagctatggaaacgctggagggtgcgttcgccgagtgctccggcgggaaagagttcttcgccggcgacgagcccgggtacctggacgtcgtgctggggggcttcatcggctggttgcgcgcctgggacaaggtgggcggcgtcaagctcctggacggcggccggaggaccccgcgcctcgccgcgtgggcggagcggttcgccgcgctcgacgtggccagggacgtcatcccggaccccgaccacatcgccgagttcgccaaggtgctgcaggcacgctccgcggcagcagccgccgccggcaactgagctcgatcacaagtgaatgctgctctgccttcctgagaagtcatggtttgtttggctggcgaggataaaacatggtttgttcactgaaatagctcgttggcttgccatctgttttagcaaaagtatgcatgcttgttatttattcataataattgatcgatg

SEQ ID NO: 26128 - DNA, 739 bp, Zea mays
  Clone ID: LIB4073-021-F10_FLI
tctgccgcgacattatttctcctctggctggcaacaagcagatactaatggggtgcaaggcgtgccagaagcccaaggtgcagtaccgcaagggcctgtggtcgccggaggaggacgagaagctccgcgactacatcctccgctacggccacggctgctggagcgctctgcccctcaaggctgggctgcagcgcaacggcaagagctgcaggctgcgatggatcaactacctgaggccggggctgaagcacggcgtgttctcccgggaggaagaggagaccgtcatgagccttcacgccaagctgggcaacaagtggtctcagatcgcacggcatctgccgggccggacggacaacgaggtgaagaactactggaactcgtacctcaagaagcgcgtcgagggcggcgcgcagggcaagcacggcgcggcggacccggcgacacccggccgttccgacgtccacgggagcccggacgaccccagcgagaacaacggccaggggtccgtcgtcagccggccggcgaactctgactcgtccgagccggcggtggagtcgtcgtcggccgacgactccagctgcctcaccgtcaccgagcctgcgggcgcgcgcgcaagcgcaaccgccgcggtgcgaccgcacgcgccggtgctcccgaaggtcatgttcgcggactggctggacatggactacgggaccagcctggtggcgctgggtccggacgccggtgtcttcgacgt

SEQ ID NO: 26129 - DNA, 955 bp, Zea mays
  Clone ID: LIB4073-021-F5_FLI
ttgagattttagccgccgccgcagctcatctcacttccccgagaagtcgcagccgacgacgtactcctcgccgatacgatggccgtcttctccgacctccacaccgccgacggcctcaagaccctggaggcgcacctagcgggcaagacctatgtttcaggtgatgcgatcactaaggatgacattaaggtctttgctgcggtgccatcaaagcctggcgctgagtttcctaatgctgcccgctggtacgagaccatctctgcggctgtagcctcaagattccctggtaagcctgttggtgtaaatctgcctgcgggatcagctcctgcagcagctgctcctgctgctgaggctgaggatgatgatgaccttgatcttttcggggatgaaaccgaggaggacaagaaggctgctgatgagcgtgccgctgccaaggcctcttccaaaaagaaagaaagtggtaaatcctctgtccttatggatgtcaaaccatgggacgatgaaactgatatgaagaagctggaggaggctgttcgtagtgtccagatggagggtctcacttggggagcatcaaagcttgtgcctgttggatacggcatcaagaagatgactattatgttgacgattgtcgacgatcttgtgtccgtcgacagcctaattgaggaccaccttacggaagagcccatcaacgagtacgttcagagttgcgacattgtcgctttcaacaagatctagagttccaatcactgagattgggcaatggccggcagcgcttaaaagtttgtgctgggatgcgagactttatcccttctagttaccttgttatagaaatgttggttggagtttattgttgagtggtgccagatttttgaatacctgtttatcttaaaaacagcggaactgctgggcaatgttctatgtctaaagttaatgagttttcaatggttctgcatct

SEQ ID NO: 26130 - DNA, 865 bp, Zea mays
  Clone ID: LIB4073-022-A1_FLI
gagacttatgtacagtttatttactacgctcttgtcgctatgtacatgtgcagttgaacgacaagctcggcccgtgctgtaacttttagcacgtacacaacacataggagtacttgtgtttcacatatatggccgctactggagctagcagcagctgaagcctacaggattacacgtacaaccaccagctgggctcgaaggagcagctttgcctcctcttctcatcagttgaggtgctcctttggaccaccctctgaccatgccctttattcttcaaaacaaaccttttttttttctttctctcgagggcctattaacacaccttgtatacgtacgtaatacgtacatgtacacttgtactgttgtacacgccgaacggtgcctctcatatcaccgctcgaacttgttgcccatcacgagcagatccactaacctgccaactggcggcgggacgctgagcggaggagcggcgacgccaggctactgctggccctggacgccgccggcgacgtggccggggacatcgacgacggcgcggcgtgccagctgccgctgctgctgccagagtcgacgacgcagaagagcgccgacgaaccacacggctggtggtggtggtcgccgccgtacagcaggcggcttccgatggcgacctgatgcctcgccttcctgtactccacgatggctcggtacaccaacgggatcaggccttccattgcaatggcgaccgagagcttgctataccttgctgagctcctcgagctcgagcaagaagtgagcctcactcaacgatgctataaaagggggtggtccttcttcatctctggtccctcatgaggctagctagcagctatctgctgcttttcac

SEQ ID NO: 26131 - DNA, 741 bp, Zea mays
  Clone ID: LIB4073-022-A6_FLI
ccaccgctccgtctctccgccgcttgcttggaagacgaagaaaccctccccccaccaacccaatccagccaaatccgggcccggagcagttcgccgccttcgttcgattcgttcgcatcccccaacgcggttcgatcccaccggaaggagcgtgatggccaagacgagctcgttcaagctggagcaccccctcgagaagaggcagtctgaggctaaccggatcagggagaagtaccctgacagaattccagtgattgttgagaaggctgagaggagtgacattcctgacatcgacaagaaaaagtacctcgtccctgctgatcttacagttggacaattcgtgtatgtcgttaggaagagaatcaagctcagtgctgagaaggctatcttcatctttgtgaagaacacccttccaccaacagctgctctgatgtcttcaatctatgaagagaataaggacgaggatgggttcctctacatgacttacagtggtgagaacaccttcggtctgctctagatggatggcgcaacaccacagctcaccgcaatcgggtcgccttgcccttgcttccctaccaatgccctgcccatgcggccatgcctcctgtaaataaggcctgccaagcaactgtgtatattctggtttcctcgttgcaagtgactgcactctactgctaaaacctacctatcagattgtcatcgatgtaatggacatcctttaaaccaaattgattggacctg

SEQ ID NO: 26132 - DNA, 737 bp, Zea mays
  Clone ID: LIB4073-022-B8_FLI
ccggccaaacggtggtatagctacagcagagtcatcatcccttgaggcgcgccctgctgctcgacctgtgagcctgtgaagcaaggtcgccatggcgggaggcaaggtttactcgttcgaggaggtgagcaagcacagcgatcgcaaggattgctggctcatcatcgccggcaaggtgtacgacgtcacgccgttcatggaggagcacccgggcggcgacgaggtcctgctggcgtgcgtcggaaaggacgccaccgccgatttcgaggacatcggccacaccgactccgccaaggagctgatgccgcagtactgcgtcggcgaggtcgacgcggctaccatcccggccaagctcacccacgccgtcgtcaccaaggacgccgccagcaggtccgagaagaccacgacggcgagcgccggcacctgggccacgctcctgcagctcgccctgcccgtcctgctgctggccctggccttcgcgctgcagaactatagcagggccaaggcagcgtagacaagatagatagctaccgtcgttgattccgcctgtgtgagtgataccgtcgttgattccgctgtgccgcgggcctgcggcctcttggaagcatctgaaagctggagcagttgttgatgcgagtgtgacgtactgtgacaaagtatatcctaaagtgctaattaattaagccgctcgtggtatcgttactttcgtataataatggttgaattttgttcctggt

SEQ ID NO: 26133 - DNA, 1955 bp, Zea mays
  Clone ID: LIB4073-022-C9_FLI
cgaatcgcgctgcgtcccctcctccccgcctgcttcatcatggaagccgacgtccccattgccgctgctacccccaggtacggagcaagcctaagccaatagctgcacccggagacacagatttggagtattgagctggctctctgttttgtcggttgtgtgcttctacttcatagaaaagagctgcattttcttcttagtgctttggatgctggccagatgaagagtagtagatttctgttcctttgtgcaatgttctgtcttatggctcggctgggagctgccaatgtcgtgctaatggggaataatctgaccctgtccttcgatgacattgaggcgagcttttctccaggagtgaaagggtctggagtcagtggagtagtttatgcttctgaacctttgaatgcctgcagcccattaacaatcaaaacagtcaatggccctccatctccctttgcgttaattataagaggcgggtgcacatttgatgagaaagtaaaaaatgcacaggatgctggattcaaagctgcaatcgtatacgacaataaaaatagtggggtcctggtttcaatggctggaagctcaagtggcattcatatatatgccgtgttcgtttcaaaggcctcgggagaggtgttgaagaaattctcaggcaatatggatgtagaggtgtggatactacctacttttgagaactcagcctggtcgatcatggcaatctcattcgtatcgctacttgccatgtgtgctgtactgggtacgtgtttctttgtgagaaggcatcgaataaggagggagcaccctagaatcgcagaagatcgagaattccatggaatgagcagtcagttagttaaggctattccaagtcttatttttacaaaagtgcaagaagataactgcacatcttcaatgtgtgccatttgcttggcagactacaatgtcggagaaaagctaagagtgctgccttgccgtcacaagtttcatgcagcttgtgtggacttgtggctgacttcttggcgaacattctgtcctatatgcaagagagatgcaaggagtggagcatcagaagttgttgcgacagaggctacccccttgctttcttctgctgctcggttaccttcattccggtcgagtgtggcagcatcccctccaaggccaataagccggcatccttcatcgcactcggtttctcgtgcttactctgtttctagtacccccaattctcccaacccctttatatcttctcacataagctcacctggcatccgtgcaagcagaagcatcacagaccttggaaatatatcatctctccatcctcgcatctcacatttgtcatcgacgcactccctggttggcagccacttgtctccaccaatcagtataaggtattggtcgtcccatgtggcgcattcagggtatggatcacccagtccacacgtgagttcatcctacatctccaattctgggtatggttcttcaagctactgctatctgggactgggaggctccagccacagccagcatgggacatacctaaggcgctgtggagaatcggggccaagcctgtgtaccatggtgccgcagcagttgcagtgggagactaatgtagcagcaggtgcgtcgtcagcaaagtccctgcggcagtcctcctacctgagacactgtggcgattcagacgccagtttgtctgacatgacgtcagcccagtcgttgccgaggtgctgagggggctctggatttgtgatttgtgcattacacagtgaggagtgtgtgacataacattactacattggctgtggtgtggagagaaacatgcatagcaatagaacatacacatagtagcacatagtagggttttgttctcttgtttctgagatgagatgtgttcttgtgctcgcgatgcgtacatatggcaagtaacatgcatgagggaataatatttatttggttgtcgt

SEQ ID NO: 26134 - DNA, 1288 bp, Zea mays
  Clone ID: LIB4073-022-D5_FLI
gtttgtttttatcttacgcgttggttgggggttgggaatcacaggatgcgcctttctggtccgcgttcttgatttgttgctatctcagttttcaggtcgaacgaacgcgcgtgcattcggcgggggttatctcgggataatatcgtctgcaaagatgagaagatgacggatccgttccacgattgcttcggtccttggaggaattaggcgtcctagtagaatccaaatgcagaaaccagtctcctgacaaagaaagggcagttgcgcacgtggtgttcgtcgaaaagccacaccgcactgagggaaaccgtcacattcgtcacaatgagagattttgcatcttgcctaagtcaaagtgctgttcaggttgcgcattcctcttcctcaagtgggcagaacttggtgcagtgtgcatacctggcacgccttcgtggcaagccttgcgtggtcaccgtcacctggagcaaggtggcgtcggggcaggctttcgccgttgccatccatgactactccaaccgttgcctctgcaagacggaggtgaagccctggctgttctcgaagaggaagggttccaaggtcgtggaattggatagtggcaatgtggagatcatctgggacctgtcagccgcaaagttcgcggctgggccagagccactcgaaggcttccgtgttgctctactctatgatcttgaagttgtccttgttttgggtgacctaagcaaggaggaggatcgccgggttctgtcggatgctttgcattctgatgcagtcatgatagctaggaaggagcacatctatgcgaagaaggtgtattcggcgaaagctcgatttttggacattggtcagattcatcacatctccatagagtgcgacacggcaggggcgagggatcccagcctagagattaggattgacaagaagaaagtgttgcaggtgaagaggctggcatggaaattcagagggaaccagactatctatgtcgatggacttccagtggaggtgctctgggatgtgcatgactggctatttagttcctcgaatggatgcgccgtgtttttgtttcagtcaggccactccatggaaaaatccttgttcagaacatgctcacagaatgaaaaggaggctcaagcacatcgttttggtttcacattgatattaaaagcgtggaagactgagtaagcactaggcagaaacatgatggcaggtttcttcaactactctgctctgaatgttgaatagtaacagtaggaatctaggatctagcaagtctaacaaggccctttgcaag

SEQ ID NO: 26135 - DNA, 815 bp, Zea mays
  Clone ID: LIB4073-022-E3_FLI
atctgaggttggggaaaaaagcctcgcgtgtcgcaaaccgctctccgctgatttgggatttgggaggcgctcgaggtaaaccatagtttgtgactcatggctcgtactaagcaaactgctcgcaagtccactggagggaaggctcctaggaagcaacttgccaccaaggctgcccgtaagtctgcacctacaactggaggagtaaagaagcctcaccgttaccgccctggaactgttgctcttcgtgaaatccgcaagtatcagaagagcactgagctgctcataaggaagcttccattccagaggcttgtcagggaaattgcccaggatttcaagactgatctgcgtttccagagccacgcggtccttgcgctgcaggaggctgcggaagcatacctggtgggtctgtttgaggacacaaacctgtgcgccatccacgccaagcgcgtgaccatcatgcccaaggacattcagctggcaaggaggatccgtggcgagagggcgtagtttctctgttactggattggctctggaagtatggtgtgcatctgttcgatgctttgcttttgtggtgcttaacgtttgtgggtgtttgaactccaatgctcattcgtagtggattagttggtaggaagtgctgcgatcttactatgtttttagagtctataattgttgtcgattagtataattgtctaagtgctggtttcgcccatcaacctgatgggttatctgaacctcgaattgatatgttaagttgtgaacttcgttatattgtgtcagcaacggttgcattttattgtgctgaagttttttgt

SEQ ID NO: 26136 - DNA, 812 bp, Zea mays
  Clone ID: LIB4073-022-G4_FLI
gcaaaaaactcctcccccaacttctccgccggatccctgaaagattcccggagatgtcggactccgaggagcaccacttcgagtccaaggccgacgccggcgcctccaagacgtacccgcagcaggccggcaccatccgcaagaacggctacatcgtcatcaagaaccgtccctgcaaggttgttgaggtctccacttccaagactgggaagcatggccatgccaagtgccactttgttggaattgacattttcactggaaagaagcttgaggatattgttccttcttctcacaactgtgacgttccacatgttaaccgtgttgagtatcagctgattgacatttctgaagatggatttgtcagccttttgactgagagtggcaacactaaggatgacaccaagcttcccagtgatgaagctctgcaagcccagatcaagagtggatatgatgaaggaaaggacatcctcctgaccgtgatgtctgccatgggcgaggaacagatctgtgctgtcaaggagattgggggcaagaactaaagctgctgcttcgctccggctgtttgtgggcaatacctgttgtcttgtgcttggagttgagaagccaagttgagatacatacataggcgtttaagttatctgtggttttgggtttacctggaatgtgttgagatggtgcgagtacttgtggtacttggttattgatctctggtatctttttgaactgagtaatggtgtaactctggtagtgcatcaatgggaattacaatatatatttgttaaattatttgatttggctttggccgccgtgtt

SEQ ID NO: 26137 - DNA, 920 bp, Zea mays
  Clone ID: LIB4073-022-G6_FLI
caaggctaccgtaacaagtgtggatatgaattggtgttgtcttcctagtagaagagccaagaaagaagagaatccttactccaacagcataggcggtatttattctgagaagaacataaggctcttctcctatgctgagttaagatctgccacagacaacttcaaccgcacgaacaaagtaggccgaggtggcttcgggacagtttataagggaaccattcgaaatgggcgggaggtcgcggtaaaagttctttctgctgaatccaggcagggcatcagagaattcttgacagaaattgatgtcattactaacgtgaagcatcccaaccttgttgaattaattggctgttgcgttgaaggaaataacaggattttggtatatgaatatcttaaaaacagcagtcttgaccgtgcacttttgggttctaacagtgagcctgctgacttcacctggagcataagatctgctatatgccttggagttgctcgaggccttgcttacctgcacgaagagatcgcatcaccgattgtacacagagacatcaaggctagcaatatactacttgacagaaattacgtccccaagatcggggattttggtctggccaagctatttcctgataatgtcacccacatcagcacccgagtggctggaacaacaggctaccttgcacctgaatatgcatggcatggtcagctaaccaagaaagcagatatatacagctttggtatccttgtcctggagatagtgagcggcacaagtagttccaggagcatattgatggatgacaaggttctcctggagaagacatgggagctatatgaagcaaagagccttaaggaactggtggatccaacccttgtagattaccctgaggaagaagtcatcaggtacatcaaggtggccctcttctgcttac

SEQ ID NO: 26138 - DNA, 896 bp, Zea mays
  Clone ID: LIB4073-022-G9_FLI
acgattcaaccgttcgccaaatccaaacgcaccgatccagaccagcgcacccgcaccggcccgccgacgaagaccatggcgaccaaggaccccgcggccaccggcggcgagcccgccatcggcatcccctaccacccggcgccgggggcccaggggcactactactacgcgccgccgccgaacccctacgcggcggggatgccgccgcccaacgcgatctacgccggcgcgcccaagggggtgccgctccagcagaccatgttccgcgacacgcccgcgcccttccactgccaggcctgcggtgaggccgccgtctcctccgtccggtcaaagccaagccttgcatccgtcgtggcttgcatgatgcccttcatgctgggggtctgcttcctatgcccttcgatggactgcctctggcacaagtaccattactgccccagctgtggggaaaaggtgggtgagttcaggaagtccgacccgtgcctcgtcgtcgatgcggcccggtggtccgagccgagcttcgctgtgcctgcgtagcgcacatatattgcaccgtttgatatccaaccattgccttcaaaatgagagtttccgttgcagttgtgtagtctgtatgtatatataaaggatgctactggcttcttgttgcatgctgtatatcccgtagctgaactgccgttgcgctctagtctcttactctccacgttagaattcaaactttttttttcttttgggtcagaataaatgtgctgctgttaacagtacgtaattgaacatacatgtgtaaatgtgtaataggagttcttatcaacaagggaagaaaagaggtgtgttatagaattgcaggaccatcactgtagtaactttggtttaataacgttcctactttgtgttgc

SEQ ID NO: 26139 - DNA, 804 bp, Zea mays
  Clone ID: LIB4073-023-D12_FLI
atttctctcgcccttttgcagagacccatccagctctccgccgtcggcccggccatgggacaagcctggggtaatctccaagacaaacttcaagggcggcggtggaaggagcaccaggtgaggaagatcaccgacaaggtgttcgaccgcctcacggaggacgcccagaagcgcgagaaggaggccctcagattcgaggaggtctacatcgccgtcctctgcgtctacaatgacatcaacaagtacttgccagggccgcaccacgatcccccgtccaaggagaagctcaaggccatgatggatgagtacgacgtgaacctggacgggctcctggaccgcgaggagttcgcggagttcatccggaagctgaccgcggactcgctgtgcacgatcagcgtgaagctgctgatcacgctggtggcggcgccggcgctggcgatggcgaccaagcgggcgacggagggcgtccccggcgtgggcaaggtggtgcgcaagatgcccaacgcgctctacgcctccgccatcaccctgggcgtcctgctggcgcagaaatccgccgagggcgtcgagtgactcgcatagctgaactgcactgcaccgtcgagtgctgtatagatgcaatgcaaccagggtgtcttatctattttgaaaacctgggtgtcttatctaggataggtgttgtgatgcttcatttcggcttataagggcataaggcgatatgatctgtgatatctctgggacagatgttcgatgtaatctatcctggatttgggacaggattgtggattgtgttgtcagtgagtc

SEQ ID NO: 26140 - DNA, 956 bp, Zea mays
  Clone ID: LIB4073-023-D6_FLI
agagatcgcatctgcttgcctgcccaacccaccttccctttcctccctccgtccctccctcctcgccccagcgacgcggcacaccggagaccgagcaaagcaagccaccacacagaggcaaggagaggaggaggagcaggaagccggaggcgaacaagatgtcgtcggtgttcagcggcgatgagacggcccccttcttcggcttcctcggcgccgccgccgccctcgtcttctcatgcatgggcgcggcgtacgggacggcgaagagcggcgtgggcgtggcgtcgatgggtgtgatgcggccggagctcgtcatgaagtccatcgtgcccgtcgtcatggctggtgtgctcggtatctacgggctcatcatcgccgtcatcatcagcacggggatcaaccccaaggccaagccatactacctctttgatggatatgcccacctgtcgtccgggcttgcttgtggccttgctgggcttgcggctggcatggccatcggcattgttggtgatgctggagtcagggcaaatgcacaacagccgaagcttttcgtgggcatgatcctcatcctcattttcgcagaagcgcttgctctctatggtctcatcgttggaattatcctttcatcccgtgctggtcaatcccgggcggattaagtgcactaccattctgcgattaccgcactgtttattatgctattcagagagaattgaaactctatgcccttgtctagtttatttttgttaccatgtattaatgaaacaatctgtagctgaaggaaggtgacacttccagtcatgttggttttggtggtgtcaagcagaggttatattttttgggttaaggttggatggatgctcctgggctaagtggatttaattttatccttggtgaataaagaacacggaattgtagccaaataataacgtgatatatatatatttcattgccccttt

SEQ ID NO: 26141 - DNA, 644 bp, Zea mays
  Clone ID: LIB4073-023-E4_FLI
ggggaaggaggaatggaagccgccggcgcagcctcgccgcccacggagccgccgccgactcacccggcggtggcgccgctggccttcctgctggggaagtggcgcggggaaggcgagggcagcttccccaccatctcctccttccggtacggcgaggagctcctcttctcgcatcatccctccaagccggtgatctcgtacacgcagaagacgtggaaggcggcgtctggcgtgccgatgcacgccgagagcgggtactggcggccccgccctgacggctccgtcgacgtggttatcgcgcagagcactggcctcgccgaggtccagaagggttcatatgacgctgaaaagaaaacagtgacactccaaagtgaactagttggaaatgcatcaaaggtgaagcagatcacgagaacttttcaagtggcagatggggagctctcgtacgtcgttcagatggcaacaatcacaactagcctacagccacatctcagggcccttcttaagaggatttgaagacgatcggatctcctatagcgccgtcgctgcggctaaccaaccgagggacacctgtactacacagcataagcttctggtcattactagttaatgaatgaacttacgagttcaataagctcattttc

SEQ ID NO: 26142 - DNA, 539 bp, Zea mays
  Clone ID: LIB4073-023-H5_FLI
gggctacaggaaagggttcgtcctcatggcgccgccgcagccgaagtcgggcctcttcgtgggcatcaacaagggccatgtcgtcaccaagcgcgagctgcctccgcgcccgtcccaccgcaaggggaaagcaacgaagagggtgtccatggtcaggggcctgatcagagaggttgctggctttgctccttatgagaagcgtatcactgagcttctgaaggttggcaaggacaagcgtgctctgaaggttgccaagagaaagcttggaactcacaagagggcaaagaagaagagagaggagatggctggtgtcctcaggaagatgagatcggctggtacgcacacagacaagaagaaatagagcatttcaagtttatgaagctggcggccagagattctgttccggtgtctgtttttcctacttgtagaacgtaatagacatgtcaaagtatctgtcagcgaaatattgtgttgttagttatgtatcgaaccacctcatggggattttgcaacaactttcaatgtatccatggtttgtt

SEQ ID NO: 26143 - DNA, 1165 bp, Zea mays
  Clone ID: LIB4073-023-H6_FLI
cgtcggctccggctccagctccagctctaccccctgctgtgttctgctctgctcttcttcgctcctgttcgccgcagggatccatcgatcggtactcgtgcaggataagacatgggtcaggctttgggtttagtgcaggttgatcagtcaactgtagccatcaaagaaaacttcggcaagttcagtgaggtcctggagcctggttgccacttcctgccctggtgcatcgggcagcagattgctggttacctctccttgcgtgtgcgccagctggatgtccgctgtgaaacaaagacaaaggacaatgtctttgtcactgttgttgcatctgtccaatatcgtgctctcgctgaaaaggcatctgacgccttctacaagctgagcaacactagggaacaaattcagtcgtatgtatttgatgtcatcagagctactgttccaaagctggacttggacgatgcatttgagcagaagaatgacatcgcgaaagcagtcgaagaggagcttgaaaaggcaatgtctatgtacggctatgagatagtgcaaacgctaattgttgatattgagcctgatgaccgtgtcaagagagcaatgaacgaaatcaatgcagctgctagaatgagggtggcagccagtgagaaagctgaggctgagaagatactccagatcaagaaagccgaaggagaggcggaatccaagtacctggctggtgttggtattgcaaggcagcgccaggccattgtggacgggctgagggacagtgtgctcgccttctcagagaacgttccaggcaccactgccaaggacatcatggacatggtcctggtcacccagtactttgacaccatgaaggagattggggcctcctccaagtcctcttcagtgttcatcccccatggccctggagctgtcaaggatgtcgcggcgcagataagggatggcctcctgcaggctaaactgcagtgagaggaccctgagaaaaaggattggttctgattcgcagaggggtgagggcatcggttcaatggtgctataaaattgctaattataatatagctagactttgcatggtttgcaaaagcttagttgtgacctgtgagtgagcctgggtatccaaacctgtcagctatttggtgatattctatgctctatgttctgcgtggat

SEQ ID NO: 26144 - DNA, 1655 bp, Zea mays
  Clone ID: LIB4073-024-A6_FLI
ccaggagaagccgacgcgccgccaccgtatccgcggatcagcggcgagccgtaaccacgccacactgcttgccgcccgacgagcagggtaacagtttccttcagccatggggaaggagaagactcacatcaacattgtggtcattggccatgtcgactctggcaagtcgaccaccactggccacctgatctacaagcttggcggtattgacaagcgtgtgatcgagaggttcgagaaggaggctgcggaaatgaacaagcgttcattcaagtatgcctgggtgcttgacaagcttaaggctgagcgtgagagaggtatcacaattgatattgccctgtggaagttcgagaccaccaagtactactgcacggtcattgatgcccctggccaccgtgacttcatcaagaatatgatcactggcacttctcaggctgactgtgctgttcttatcattgactccaccactggtggttttgaggctggtatctccaaggatggccagacccgtgagcatgctctccttgctttcacacttggagtgaagcagatgatttgctgctgcaataagatggatgccaccacacccaagtactcgaaggcccgttatgatgaaattgtgaaggaagtctcttcctacctgaagaaggttggatacaacccagacaagatccactttgttcccatctctggttttgaaggtgacaacatgattgagaggtccaccaaccttgactggtacaagggcccaaccctgcttgaggctctggacttaatcaatgagccaaagaggccttcagacaagcccctgcgtctcccccttcaggatgtgtacaagattggtggtattggaactgttcctgtgggacgtgttgagactggtatcatcaagccgggtatggttgtcaccttcggtcctagtggccttacaactgaggttaagtctgttgagatgcaccacgaggctctccaggaggcccttcctggtgacaatgttggcttcaacgttaagaatgttgctgtgaaggatctgaagcgtgggtatgtggcctccaactccaaggatgaccctgccaaggaggctgctagcttcacctcacaggtcatcatcatgaaccaccctgggcagattggcaatggctatgccccagtgctggactgccacacctcacacatcgctgtcaagtttgctgagcttgttaccaagattgataggcgatctggcaaggagcttgagaaggagcccaaattcctcaagaacggtgatgctggtatggtgaagatggttcccactaagcccatggtggtggagaccttctctgagtatcctcctcttggtcgctttgctgtccgggacatgaggcaaacggtggctgttggagtcatcaagagcgtggagaagaaggacccaactggagccaaggtgaccaaggctgccgccaagaagaaatgaggtgtctgtctggctggttctgtgttttctcgatggatacctagttgaaacttaaaatatatcgtcattgctgttatcgacgtgagcaactaaactgtgctagcaatgtttgtctggtcgatttagtattgttattttcgttaaaaccagggtactattaagactcaatttctgttatttttgtatcgaacatcgggtgttggcc

SEQ ID NO: 26145 - DNA, 388 bp, Zea mays
  Clone ID: LIB4073-024-B1_FLI
gttcgcttcgcgtgaccgagagctcgtcggcccccgtccacgcgagaagcgagagcatggacacccaggtgaagcttgctgttgtggtgaaggtgatgggcaggactggctccaggggtcaggtgacccaggtcagagtgaagttcttggatgaccagaaccgtctcatcatgaggaacgtcaagggcccagttcgtgagggtgacatcctcacccttcttgagtccgagagggaggccaggaggctgcgctgaagccctggtggtcttagtggttcttgtatggtttcttggatgtcgtcgaatttgtgctatgtttgttgaactcgtgtgacccttgcaacacctgccttaagagtagtaagcctgataagattgcggttttgttt

SEQ ID NO: 26146 - DNA, 945 bp, Zea mays
  Clone ID: LIB4073-024-B8_FLI
ttccctgcctgcgattcctctcccctcgcctcctcgtcttcccctaggggatcgccggagaggaatcgcaaagagggccgtctcatccaagttaaggaagccatggagcacaaggagactggatgccaggcacctgagggacccatcctttgcatcaataactgcggcttcttcggcagcgcagctaccatgaacatgtgctccaagtgccacaaggagatgataatgaagcaggagcaggccaagctggctgcctcctctatcgacagcatcgtcaatggcaacgatgctgtcatggaaccagttgttgctggcaacacagtggtcgctgctgctccaatcgagttgcaaacaatgaacgtgcagcccgctgatgttgctggacctagcgagggggcggcggtgatctccaaagggaaggtagggccgaaccggtgcagcacttgcaggaagagggttggacttacaggattcaactgccggtgtgggaacttgtactgtgcactgcaccgctactccgacaagcacgactgcaagttcgactatcggactgctgctagggatgccattgccaaggctaatccagtggtgaaggcggacaagctcgacaagatctagggtttcctacggttggctcaaggaagattgcaacctgtggtacttcatcatgcggaattgctgcattgcccatgcctttccctttcatgtttgctgctacaatcttgttgttcggcattgcagtgcatggtgcgcacttccgcagcctgcctcaagaattctcgcctctgcatctggtcagttcaaatgatttgcatgttggctatgttgtgtaagcttttatttatggtcgtctcgctcagacggtatttggcttcgcatttagctagctatgtgatgtactattgtccctggtgtgttacactgcaaccagtaatagtaatctgc

SEQ ID NO: 26147 - DNA, 1548 bp, Zea mays
  Clone ID: LIB4073-024-C10_FLI
aaagttcggagccgccgcccagtcctgcctccctctccgcctccggtgcccaaggccaatagttttgaggtggtaatggcggaccaggctaaccaacccactgtccttcataagcttggtggccagttccacctgagctccagcttctctgaaggtgttcgggcccgtaacatctgcccttctgtctcttcgtatgaaaggagttttgccacaaggaactacatgacacagagccttttcagcccttcaatgtctgttactggtggcatcaatgtcccagtgatgcgtaccccgctttttgccaatgctccagctgagaagggaggcaaaaacttcatgattgatttcatgatgggcggtgtttcagctgctgtttcgaagactgctgctgctcccattgagcgtgtgaagctgcttattcagaaccaggatgagatgatcaagtctggtaggctgtcagagccatacaagggtattggtgactgcttcaaacgtaccatcaaggatgagggtttctcttccttgtggaggggtaacactgcaaatgttattcgttacttccctactcaggctttgaactttgcatttaaggactacttcaagaggttgttcaacttcaagaaggacaaggatggttactggaagtggtttgctggcaacctggcctctggtggagctgctggtgcttcctctttgttttttgtgtactccctggactatgccaggacaaggttggccaatgacgccaaggctgccaagggaggaggtgataggcaattcaatggtcttgtggatgtctaccgcaagacactcaaatctgatggtatcgctgggctttaccgtggatttaacatctcttgtgttggaatcatcgtttaccgtggtttgtacttcgggctctatgattctatcaagccagttgtcctcaccggcaaccttcaggacaatttcttcgcaagttttgctctgggttggctgatcaccaacggtgctggtcttgcatcttaccccattgatactgtccgcagaaggatgatgatgacttctggtgaggctgtcaagtacaagagctccttggatgcgttccagcagatccttaagaaggaaggccccaagtccctgttcaagggtgctggtgctaacattcttcgtgccattgctggtgctggtgtgctttctggctatgaccagctccagatcctcttcttcgggaagaagtacggctctggcggtgcttaaatggagaaaaatgatgacgaacaagagcagtttgttcccggtcctgcccaatcaggatctggtgaagtttttgcctttcatatcgaagaaattaataattcatgtagagggaggattcttccaacattcgttttgggcggagactttgatctccaaacactcgtaactatcctactaggtggtggcatcagtccccaaaaacattatggtcatagggtgtgtcgagtctgcccttgctttgtctgtcgggcaattttccttacatactttgccttcgattaagtatcggatgagtaagttgctgcggtt

SEQ ID NO: 26148 - DNA, 575 bp, Zea mays
  Clone ID: LIB4073-024-E7_FLI
ctcttccttcctgccgcggcgatggcgtcgggtgacaacagcaagcagaggagcgaggaggagtggcgcgccgtgctctcccccgagcagttccgcatcatccgccagaagggcaccgagttacctgggacaggagagtacaacaaattctatggcgacggggtttataactgtgctggctgcgggactcccctgtacaagtccaccacaaaatttgattctggctgcggctggcctgcattctttgaggggcttccaggagccataaaccgaacaccggatcctgatggtaggaggacagagattacatgtgcagcttgtggtgggcatctgggccatgtgttcaagggagaaggcttcaagacacctactgatgagcgccactgcgtgaacagtgtttctatcaagttcagtcctagctcctagctagatcatcttccccctggatgagattctcgtgcctggaactgtgggggagcacagcgaaacgatgaataagatctattcagcacatgtgttatctgattgagagatggatctattaccataatcagttgttactctaaaaaaaaagg

SEQ ID NO: 26149 - DNA, 1471 bp, Zea mays
  Clone ID: LIB4073-024-F1_FLI
ggcgcagatccacacgccgcacaggcaggcagacggacaggaccgccgccgcagttttcaaatcccggggcggatttccttccctgcacctgcagagagagagagagacggggcccagcaatagcaccaccgggatctcgccttctcgtcgtccgtccacctgtggcgccggtgaccgaagggtgagggcgctagctagagcctagaggctagagccatgtggaacagcatctaccggttcctgtgcggcctgtgcgcgccgtcgtcgtcggagcacgggctccacggcgcgcaccccgccgtcgccgccctcggccgcgacatcctcagcttccagagcacctcgcaggttccggacgagctgagccggcacgtcgtctcctccaagaaagcgcaggcgaattggtacaagaagctgctggtggcatggaagaaagcccggccgcctccgaagacgcccgaggaagctgcggccttcgttgtgcagacgctcaagaaccatcagaaagcagatgtggagggcctgctgtctttctacggcctgccgcatccgaacgcggcagcaggcacacccgctgctccgccgccgcccaagaagccccagggcgccaagttcgagctgcacacgctccccattgatcccaagtctgtggccgacggcgacaccgtcaacgtgtacgtcgacacggcggacccccgggaggccggcagcgtgccccgcgaggtgcagaaggctgcggcggagcgggccaaggcgcgggccgccaagaactaccagaaggccgacgcgctgcagaagatcatagtcgacgcaggatacaggccggttcctaacgcgagaggcgaggaggtgctagcgaagaagtacaggatcaggctgagggggatcgatgcgcccgagagcgcgatgccgtatggcaaggaggccaaagaggcgctgctcaaacttgtccaggggaagagcttgaaggtctacgtgtacgacgaggaccggtatggtagatgcgtcggagacatctactgcgacggcgtatttgtgcaggagcaaatgctgaagaaaggttttgcctggcactacaccgcctatgatcaacgcccagagctggccaagtgggagaaacaagcacagactgggcggaagggcttgtgggcgtcgtcgaagccacagaaaccatgggagtggaggaaggacaagcgcaacgggacagcatgagcagacccccgaggttcagtatgtgccgtgtgtgttattattattagccatgaacacctgattgattgatttacctgcagactttttagggtggtatatcgatatttcggggctcagtggcggcgtagtatgattgtgtgtgtacactagacgattccttaaagttacagggctgtgaatcaggagggtagagattggtgtatcgcacagttgtatcaaatgcattgtagcaccatttatactgctgtaaagcagagt

SEQ ID NO: 26150 - DNA, 739 bp, Zea mays
  Clone ID: LIB4073-024-G10_FLI
gggattagccactggggaaattaattaaaggagtactctattagggcaagaagaagaagagggcaacgatggcggcggcgatgatgatctccggaggacgggcggcggcgctggtgatggccgccgtcgtgctgtgctcggtggcggccatggcggcggcgcagcaggcgtcgaacgtgcgggcgacgtaccactactacaacccgcagcagaacaactggaacctcaacgccgtcagcgcctactgctccacctgggacgccggcaagccgctggcgtggcggcagaagtacggctggacggccttctgcgggcccgcggggcagaaggggcaggccgcctgcggcaagtgcatccgggtgacgaaccgcgcgacgggggcggccatcacggcgaggatcgtggaccagtgcagcaatggcggcctcgacctggactacgagacggtgttcaagaagatcgacaccaacgggcagggataccagatgggacacctcaacgtcaactaccagttcgtcgcctgctgattgatgatcactttcatcacccactccatcatcaagtactacagtacacatgtaataacaagccatgatatatatgatgcatgcatggcgtgatcgatgaataaaaccgatgggatagatagctctgcctgccgcaactgcgcaagcaagcccggatcatcatggtataaaccgcattggaatgcaataaagtggactacttattatatatt

SEQ ID NO: 26151 - DNA, 582 bp, Zea mays
  Clone ID: LIB4073-024-G11_FLI
cgacccagccagccacccatcagcgtgcgcgaggcgttcggagcatcccgtcccgaggaagaccggccggcgacgagggggaaaacatggggaaggtgccggtgcggatgaaggcggtggtgtacgcgctatcaccgttccagcagaaggtgatgccggggctgtggaaggacatcaccaccaagatccaccacaaggtcacggagaactggatctccgccacgctcctcgtcaccccagtcgtcggcacctaccaatacgccatgtggtacaaagagcaggagaagctttcccacagatactaaatgtgaggctctccaagttgactgcgatagcagttagttctcatgatgggttctgtaatccttcaatgatgatttaacatttgttggatcaaatttagttcaatgcctttttcatatttccaatgcatatacggtatctgtgcctggcatacttattttgaggcttgctaaatatgtaccttttgtctctgaagttgttaaataaagtaaattaactggcagtttctcttgtattttgtttaataattggtaactgggtttgtttgtcagttgtttc

SEQ ID NO: 26152 - DNA, 599 bp, Zea mays
  Clone ID: LIB4073-024-G8_FLI
attttagtgatttagattcacttttgccacttaccaaacttgaaacactttcactactcaccaatcccatcacaacagatgctcactatcgcgaatacgttgcctataaatttccaaagttacgacttttggattttcgtaaaattcggcaaaaagatagacaagccgctgttgaactatttaaaagtagaaaaggaaaagaactgttgaaagagatagcaaagaaggccaaagcagcagccgataatccatctatagatacaaataattcaaaggtttcaaacacatcagctgaagatgtacagagaattcgagatgcaatcaagaatgcaacatcgttacatgaagttgaacggcttacacgaatattgcaatccggtcatattccagagaatctaaatgccgaaaatggaaatggtacctcacatgacgaacatgccatggagatgtaagactaaaactcatcgataagcaaaagctcttcgtaatgatttcataaacaattgcaatgaaaatacaaacttcattaatttttgtgcgaattcacaaagaacgatgtgacaaatatttaataaaacaataaattcattacacaattt

SEQ ID NO: 26153 - DNA, 452 bp, Zea mays
  Clone ID: LIB4073-024-H10_FLI
acaagaagcaagatagcaataagcaccgtatcagttgcactttcaattcgcgaccgacaaccgacgacgatgagctccacggcgacggcggcggattgcggcggcgccaagacgtcgtggccggaggtggtcgggaagagcgtggaggaagcaaagaaggtgatcctcaaggacaagcctgacgccgacatcgtcgtgctgcccgtcggcacgattgtgaccgcagattttgtgcccagccgcgtgcgtatcttcgtcgacaccgtcgcccagacaccccacatcggctgattaattaagaggctgggtgatgcctagctagctttgattccttccttgctccagaactgaatattctgtaaaatgaataagtcggacatgttatatatgtattcatgtccgtacgtgtatctgacgaataatgcatggatgtgtacgtgtgtttcttccct

SEQ ID NO: 26154 - DNA, 632 bp, Zea mays
  Clone ID: LIB4074-001-D7_FLI
gccacactaacgaacgaactcttgctccgatcacgagctagctgaggtcgacgatggcggctgtgctgaacagcaggaagacgccgcaggcggtggtggccgtgctggtggcggcggcgctgctggcttcgtccgcttcggcggcgatcacctgcgggcaggtggggtcgtcgctggcgccgtgcatcccgtacgcgacggggagggccagcgcgctccccgcgtcgtgctgcagcggcgtcaagagcctcaacagcgcggcgcggaccagcgcggaccgccaggcggcgtgccgctgcctcaagagcctcgccaacagcgtcaagagcgtcaacatgggcaccgtcgccaccatccccggcaagtgcggcgtctccgtcggattccccatcagcatgtccaccgactgcaacaagatcagctaagttacgacgaccaagctaataagcctaccgaacgtacacgtacgccccgcgcgctgcacgagtgatgaagccagggaagaaataaaataaagctagctgtattgccaggagcagcatgcattatttatcgatctatatatatatatactgtactgtagtactctattatatatgtatgtgtggcctgcagtgcgagttgcttcgatc

SEQ ID NO: 26155 - DNA, 1111 bp, Zea mays
  Clone ID: LIB4074-001-E12_FLI
tctagcccgagtggacgtaggaagggacgaggggtcttgacgccggcgagccatggcgggggctctcctctcctctccgcacactctcccgagccccacatctcagtccccgttccgccccaggagcaggggaccactccacgctggggcagcgcgtgttctgccaccgaggaggagggcctttgtgctcgcttcgtgctctcgcgagcctgccgctaggaaccgcgggttggaggtggagaggaggcgccttctcatgtccgggctcgtgtcttctttcgcaatcatgctccccatttcagaagcatatgctgtcatggagactgatgaagacgtgaagatgaacacacaaattgatgagatcaatgcatactcttttctttacccggtggaactgccagggaagaaatttgccttcaaatgggtagagtccagaaaaccagagcgatattcctctgcagcgccactatcgcctgatgcaaggcaacgtatcgtatcagagcgagttgacatgatacacaatgttgtcatctcggtctcgattgggccaccgaattcacgttttttgccttcaaaagacaagagctcgtgggatccaaaacatgttgctgattgcattttatctgatagatctaccatgaaggtgacaactggccagcgcatgacagagagttctgtccttgacgcacacgttgcagaggttgatggagaaccatactggtattatgagtatcttgttcggaaatcaccaacaaaatctgcaccagaaccaaatttgtttcggcacaatgtagcctgcactgctgagcgtgatgggtacctgtactcactgaatgcttccactcttagcaaacagtgggaatctatggggccctttctacaaaagaccgtggcatcctttcgccttctccccggtacagaaaactatgttcctccctacaaggatccttggagattttggtgaatggagattcttcttgtagtcatcatttttatcccttcagatgactttatagcttcaggttttagaccatatttttcacgtcagatgtttagtgagtgtctgtcctttcagcttgacagataaaattcagagacccagtttggtatc

SEQ ID NO: 26156 - DNA, 1015 bp, Zea mays
  Clone ID: LIB4074-001-F3_FLI
caatacataggcaatccatctcctcccacatgtacagctcgctttccgatctagcaatgtcaacgggagcaacggagatgatcgtagccaccgccgatgccgccagcagcaccaggtgcatgtcgtcgacggcgagagcagaggacgtgatcgtgtccaccgccgtggccaccgcggccggcaccaagtgccacatgttcaagatcgacggctacaagcggatcaaggccatgtacggcaagggcaggagcatcgactcctgcaggttcgaggtggctggccgcgcatggaagatcctcttcttccccaacggcgactgccgggacaccgcgggccacgtctccctcttcctcaagctggacgacgacgacaccgtcggcggcggccccgacgacaacgacgacggcaaggtcgtggtggtcgagctcaggttctcgctgctgtgccgccccggctgggcgccggacgaccggccccagagctggacccgcacggccaccttcaccaacaagggcaacaagaccatgggctacagccagttcatgaagcgctcggagctggagatgccgaggttcctcggggacgactgcctcgccatccgctgtgacatgtccgtcctcgacgaccccgtcgacgtcaaggaggagcccgcgcagccgctcgacctgcagcggcttggggtgcctctcgactgcaaggtcgtcgacgacggcgcgtgcatcaataccgaacccctcgttcccgttcccctcagctacttcaagttcacggaggcgctcgtcaagctgttcgtcggctgtttcgacgtctgaccgaatggatcctcgccggctgggttttattgttgcgttatatagtttcgacaaccatcatttcgagtatttcaagataaaagtacactgtcatcgttcccccaagttttgtttagatcgatcagggtgctagtttatttaatttatgtgtaaatcatcagaatttccacattattagtgaataaactgaatctagttttttc

SEQ ID NO: 26157 - DNA, 795 bp, Zea mays
  Clone ID: LIB4074-002-A10_FLI
aaagcctcaaaacctgatcatcagagaaacgaaaaggaagaggtgagcgtgggagaaaaaacaaaagaaaggaaaagagatatagccctgagaagaatggcccttacaactgatgaactcaaggccaaggccgaggtatactacggtgacgagatctgccagctgtgtacccagctcctgctcagggaagcaggcctccccaatggtctgcttccattgaaggacctaatcgagtgcggctatgtccaggaaactggattcgtgtggctgaagcaaagcaagagggttgaccacatcttccatagtctaggaaggctggtctcttacggcacggagatcaccggctatgccgagaagggcaggatcaggaaggtcaaagggataaagaccagggagctcatgctgtgggtcccggtggaggagattgctcttgatgatgatccagcgactgggaagcttgtctgcaagagcattgctgggattaccaaaaccttccctgcatcggctttccatatcccggagaaggagaacaatgtgaaggcgaactgtgctgcactcaagccggtggtcctcatggagagagctccacgagttgttaaaaacagctgatccgccttcaattctgcatccactggtatttggagttgacgtacggccgccatatcagcccttaatcctacgtatttaaataatggttgaactagtgctttactgttttccgttcatgtacttgggaaatgataacacaaagttcttccgcctatatatatactgcggttgtacgattgccctggc

SEQ ID NO: 26158 - DNA, 713 bp, Zea mays
  Clone ID: LIB4074-002-C3_FLI
cgactccaatcgcaattcgcaattcccagccccattccccgtcgcccggtcggaagcaccaccagctaccagggatgtctggcgaggaggaggagaacgccgcggagctcaagatcggcgaagagttcctcaaggccaagtgcctgatgaactgcgaggtggcgatcatcctggagcacaagtacgagcagatccagcagcacgcgtcgtcggagtcggacccgtcgtcgcaggtgtcgcaggtgttcgagaagtcgctgcagtacgtgaagcgcttcagccgctacaagaaccccgacgccgtgcgccaggtccgcgagacgctgagccgctacggcctcgccgagttcgagctctgcacgctcggcaacctctgccccgacaccagcggcgaggccaccgcgctcgtcccctccctcaagtccggcggcaggttcgtcggcgaccccggggacgagaagatcgagaagatgctcaacgacctctccctcatcaagaagttcgagtagagcgggagccctctcttctcttatcttcttttctcttggagtagcgagcatccagagaggaggggaattcaacatcaagacgatgtactgataaaattttacttgccttacactactatcgttgaggttcacgtctgcgtattgattagaaccttgtttgatcgataatccaatatactagtagtatgtgtgtggttgatgatc

SEQ ID NO: 26159 - DNA, 635 bp, Zea mays
  Clone ID: LIB4074-002-H7_FLI
cagtcatccacactaacgaacgaactcttgctccgatcacgagctagctgaggtcgacgatggcggctgtgctgaacagcaggaagacgccgcaggcggtggtggccgtgctggtggcggcggcgctgctggcttcgtccgcttcggcggcgatcacctgcgggcaggtggggtcgtcgctggcgccgtgcatcccgtacgcgacggggagggccagcgcgctccccgcgtcgtgctgcagcggcgtcaagagcctcaacagcgcggcgcggaccagcgcggaccgccaggcggcgtgccgctgcctcaagagcctcgccaacagcgtcaagagcgtcaacatgggcaccgtcgccaccatccccggcaagtgcggcgtctccgtcggattccccatcagcatgtccaccgactgcaacaagatcagctaagttacgacgaccaagctaataagcctaccgaacgtacacgtacgccccgcgcgctgcacgagtgatgaagccagggaagaaataaaataaagctagctgtattgccaggagcagcatgcattatttatcgatctatatatatatatactgtactgtagtactctattatatatgtatgtgtggcctgcagtgcgagttgcttcg

SEQ ID NO: 26160 - DNA, 804 bp, Zea mays
  Clone ID: LIB4074-003-D10_FLI
cgttcgatcctcacaatgcagtgaaatcactctgctctcctctgcttccttctataaatctaatagaataactccgtcaagaagcaacgagcatagaacaattcaacagaggaagaatcaggcagggagctctcccattcgcatcccaggccaacctcaaccccaatccaatccgttgcaggtcgcaggatggctccgcgtgagcaccaccagccccaggaggaggaggaggaggacaccgcaggcgtcgtcaagctcatcagcgccgagggcttcgaattcgtcgtcgacaagaaggccgccatggtctccaacaccctacgcaacatgctcacatcgccaggcggtttctccgagacgcgccagggcgaggttcgcttcccggagatccccaccaatatcctcgagaagatctgccagtacttctattggtcgctccattattccagtggcaaggaaacagcagagtttctgatcgaacccgagatcaccctggagctgatgatggccgcaaactacctggacacttgatgaggagcctgagggatctaaccctaggaaccgtttggttgtgaaatttgaaaaggtaatgtaaacgttatccgataacactgtaaattttaaaaagtaagctattacttggattgtttggttcagcgtaagagattatgttgtggcttaaacaaacacgctccaacgtaatcagttactgttgtaatcaaatcaccttacattctactgaaccaaacagcaccatagtgtcttatgaaatatgaaagaacgaagcaatggttactagtgatt

SEQ ID NO: 26161 - DNA, 816 bp, Zea mays
  Clone ID: LIB4074-003-D11_FLI
gcagcccccaactacccccagcctcggaaggaaccttccagaagcgcaagactctaaaggccgtcgccttcccattcttcctcgccgcgggggtcgcctgagatcacataaacaatggtgaaggctgttgctgtgcttggtagcagcgatggtgtcaagggcaccatctttttcacccaagagggagatggccctaccgctgtcaccggaagtgtctctggcctcaagcctggcctccatgggttccatgtacatgcacttggtgacaccaccaatggatgcatgtcaactggaccacactacaatcctgcgagcaaggagcatggggcaccagaagatgagaaccgccatgctggtgatcttggaaacgtgacagctggagcagatggtgttgctaatatcaatgtcaccgacagccagatcccactgactgggccaaactcaatcattggcagagctgttgttgttcacgctgatcctgatgatcttggaaagggtgggcacgagctcagcaagagcactggaaacgccggtggccgtgttgcttgtgggatcattggactccagggctgaaaacgatcgccggacttgggggtgcctgagaggtccgtctcctgccgtccccagcagacgagcctgaacattcggagacatcgtgaaataagagcgtcgctgatctgtgatcatcgtatttgtcattatgcacctgtagcaaccgatggactgaactgtgctggattatgctgttggatcacctgagtatgtgttacatgtcggttttgatgtgacatcctatcgtttcgatgtgttttgtgg

SEQ ID NO: 26162 - DNA, 556 bp, Zea mays
  Clone ID: LIB4074-003-D7_FLI
gcagccgcagccccagcccccacaagacgaggcaacaatggcgctagaagcagccaccgccccccgcgcactcctcgccgcgtgcctcgtcctgctggtcctcggcggcggcaccggcccgtcgtcggtgctgcgcggcgccggggcgcaggccggcgggcagtgcctgccgcagctgaaccgcctcctggcgtgccgcgcgtacctggtgcccggcgcgccggaccccagcgcggactgctgcagcgcgctgagcgccgtgtcgcacgagtgcgcctgcagcaccatgggcatcatcaacagcctgcccggccggtgccacctcgcccaagccaactgctccgcttgaagcagggacctggcacgcgtgctgcaatggatggcaggaggggagaggaataagaagtgtttccatttcacagtgagagcagtcgagctccaacgttgtcgtcgtcgtcgtcttcttcttttgatattcagactctgtcttgcggtctatatcatcagcataataataataaaataagtaaaaccaaaccatgcatgaccatgctat

SEQ ID NO: 26163 - DNA, 779 bp, Zea mays
  Clone ID: LIB4074-003-G11_FLI
gtgctccatggcggactgcaccagccttggctacaagacgtcgtgcgggatgctggacatccgcggcaacgtctcgtacgcgttcaacaactacttccagaagaacgaccaggacgacgtggcctgcgggttccagggcctcgcgacgaccacgggccaggaccccagcaccgggacctgcaggttcggggtcatgatcgaggtcgactccgccttctcgtggaggctgcaggggcttgggagcaacctcctcctgttcctcctgcttggggttctccagctatccctgtccttctcttagatgcagaggttctgcgagggatgggtggggtggcagtgagcgcataaacagtctgacaacagcttgaggatattagatgtgtgttgtcagtgccattcatttagaaactctttcctctatgacccctccgcccctcttttccttttcttctctttggcgaggaaaccgcagaccgcggtttcaggcgttcttgattgattgttgctgttagctttgatccgtcagttccgttgcggcgacagcgacgagtgatgcattgacactgaacctctgcaacttgggcgagctctgcttaggtttctcagcaagtcggcagcatcgtattcgtgatccatcttccatcacgcgccgtaaccttcataagctttcgtgcccagagaagagcttggtccccctcgattatctagggttcgtttggctttaatttgtaccggtttctactatgttggctttaatatgatggacaacggggtcagtc

SEQ ID NO: 26164 - DNA, 906 bp, Zea mays
  Clone ID: LIB4074-004-H4_FLI
gccagcacagcagcatggggaggtcgccgtgctgcgagaaggcgcacacgaacaagggcgcctggaccaaggaggaggaccagcggctcgtcgcctacatcaaggcccacggcgaaggctgctggaggtcgctccccaaggccgcgggcctgctgcgctgcggcaagagctgccgcctccggtggatcaactacctgcgccccgacctcaagcgcggcaacttcacccaggaggaggacgacgtcatcatcaagctccaccaggtcctcggaaacaagtggtcgctgatcgccgcccagctgccggggcggacggacaacgagatcaagaactactggaacacgcacatcaagcgcaagctcatcgcccggggcatcgacccacggacgcaccagtcggcgagtgccgccgcagttgcccccgccgccgccgccgccgcgcaaagcagctatcgccaccatggcgacgacgaggcggtggcgcggcgcagctgctcgcgagacagcggctgcatcgcggcgcacagcagcgacgacgacgacagcacgtccgggtccgtgccacaccaacatgctgtcggcggcatcgacctcaacctgtcgctaagcccaccgacgacgagccaaccgtcatcgccggccgccgccaagggagtcgtagctagcggatatggccaagggagtgagagctagctgtacctcctctgcactgccacgatgatggttgtcaattgttgttagcttagctcctcctcgtcttatgttcttccatgcaggccggaagatcctaaagagaacgtgtgcgtgcgtgtgagaattaaactcgtgtctgttgttcgatcgggcgctctaagatttggccatgccccatgcatgaggaaccctgcaggggccctcctactttttg

SEQ ID NO: 26165 - DNA, 1599 bp, Zea mays
  Clone ID: LIB4074-005-C5_FLI
caggcgtcttcgtactcgcctatctccgcgactcaaagcttcttccatttcctaccgccgccgctgcagctccaccccattccgtcgacaccatgagggagtgcatctcgatccacatcggccaagccggtatccaggtcggaaacgcgtgctgggagctttactgcctcgagcatggcattcaggctgatggtcagatgcccggtgacaagaccattgggggtggtgatgatgctttcaacaccttcttcagtgagactggtgctgggaagcacgtccctcgtgctgtttttgttgaccttgaaccaactgtcatcgatgaggtgaggactggcacctaccgccagctcttccaccctgagcagcttatcagtggcaaggaggatgcagccaacaacttcgcccgtggtcactacaccattggcaaggagattgttgacctgtgccttgatcgcatcaggaagcttgccgacaactgcactggtctccagggcttcctcgtcttcaacgctgttggtggaggaacaggctctggccttggttccctcctcctggagcgtctgtctgttgactacggcaagaagtctaagcttggtttcactgtgtacccatccccccaagtttcgacctcagtggttgagccatacaacagtgtcctgtccacccactccctcctcgagcacactgatgtggctatcctgctggacaacgaggccatctatgacatctgccgccgttcccttgacattgagcgcccaacctacaccaacctcaacaggcttgtgtcccaggtcatctcatccctgactgcctccctgaggttcgatggtgctcttaacgtggatgtgaatgagttccagaccaacttggtgccctacccgaggatccacttcatgctttcctcctatgctccagtcatctctgctgagaaggcctaccacgagcagctgtctgtggccgagatcaccaacagcgccttcgagccatcctccatgatggccaagtgcgatccccgccatggtaagtacatggcctgctgcctcatgtaccgtggtgatgtggtccccaaggatgtgaatgctgctgtggccaccatcaagaccaagcgcaccatccagtttgtggactggtgcccaactggctttaagtgcggcattaactaccagcctccaagtgtggtgcctggtggtgacctggccaaggtgcagcgcgctgtgtgcatgatctccaactccaccagtgttgtggaggtgttctcccgcatcgaccacaagttcgacctcatgtacgccaagcgtgccttcgtgcactggtatgtcggtgagggtatggaggagggcgagttctctgaggcccgtgaggatctggcagcgctcgagaaggactacgaggaggttggtgctgagtttgatgagggtgaggaaggtgatgatggtgatgagtactagaagtatcctgatgcggtcatcgtcaggcttgtgtgctgctcttgtccccgttgtggtttgcaacacctgatgttgtaagactttctggttatgtccgccccgctttgccactgggttattaagaacgtcgttatggatggttgtctacact

SEQ ID NO: 26166 - DNA, 641 bp, Zea mays
  Clone ID: LIB4074-005-E5_FLI
gcgaactcttgctccgatcacgagctagctgaggtcgacgatggcggctgtgctgaacagcaggaagacgccgcaggcggtggtggccgtgctggtggcggcggcgctgctggcttcgtccgcttcggcggcgatcacctgcgggcaggtggggtcgtcgctggcgccgtgcatcccgtacgcgacggggagggccagcgcgctccccgcgtcgtgctgcagcggcgtcaagagcctcaacagcgcggcgcggaccagcgcggaccgccaggcggcgtgccgctgcctcaagagcctcgccaacagcgtcaagagcgtcaacatgggcaccgtcgccaccatccccggcaagtgcggcgtctccgtcggattccccatcagcatgtccaccgactgcaacaagatcagctaagttacgacgaccaagctaataagcctaccgaacgtacacgtacgccccgcgcgctgcacgagtgatgaagccagggaagaaataaaataaagctagctgtattgccaggagcagcatgcattatttatcgatctatatatatatatactgtactgtagtactctattatatatgtatgtgtggcctgcagtgcgagttgcttcgatccacctacttgttcacacagttt

SEQ ID NO: 26167 - DNA, 1039 bp, Zea mays
  Clone ID: LIB4074-005-G4_FLI
gtcaaggccaagatccaggacaaggagggcatccctccggaccagcagcggctcatttttgccggcaagcagctcgaggacgggcgcacgctggccgactacaacattcagaaggagagcaccctccacttggtgctgcgtctcaggggtggcatgcagatcttcgtgaagacacttactggcaagacgatcacccttgaggtggagtcctcagacaccattgacaacgtcaaggccaagatccaggacaaggagggcattccaccggaccagcagcggctgatcttcgccggcaagcagctggaggatggtcgcaccttggctgactacaacatccagaaggagagcaccctccacctggtgctccgcctcaggggtggtatgcagatttttgtgaagacattgactggcaagaccatcaccttggaggtggagtcgtctgacacaatcgataatgtcaaagccaagatccaggacaaggagggcattccaccggaccagcagcgcctgatctttgctggcaagcagctggaggatggccgtaccctcgccgactacaacatccagaaggagagcaccctccacctggtgctccgcttgcgaggtggtatgcagatctttgtgaagaccttgactggcaagaccataaccctggaggttgagagctccgacaccatcgacaacgtgaaggcaaagatccaggacaaagagggcatccccccagaccagcagcgtctgatcttcgctggcaagcagctggaggatggtcgcaccctagcagactacaacatccagaaggagagcactctccacctggtgctccgcctccgtggtggtcagtaagccatggttcatttaagctgctgctgtacctgggtatctgcgtcgtcgtcgtctaataaacatctgtggtttgtgtgtcatgaatcgtggttgtggcttcgttggtttaatggacctgttgtgtcctctgtgttgtacccaaaactcttctgcagcagtatggcttgaatccttgtgaagtttgatgtttgaactt

SEQ ID NO: 26168 - DNA, 1477 bp, Zea mays
  Clone ID: LIB4074-007-E1_FLI
gcaacaaccatttcttcttcctttttctatatcgcgttacgtccctccctacccagcgatctaggccgccgcctctcctactgcatctccctcgctctcgtcgcctcgttcgcttcgcctcctccccgccccgccccgagccgagcagagcgcagccctatccggagctgggatggcggacgcgaagcagcagcagcagcagccacagcaggcggcagcggcagccaccggcgtgtggaagacggtcaagcccttcgttaacggcggggcctctgggatgctcgcgacctgcgtcatccagcctatcgacatggtcaaggtgaggatccaattgggtgagggctccgctggtcaggtcacaaggaacatgcttgcaaatgagggtgtccgttctttctacaagggtttgtctgccggattgctgaggcaagcgacgtacacgactgctcgtcttggatcctttagggttctaactaacaaagcagttgaaaagaatgaagggaagccattgcctctaattcagaaagcttttattggtctgactgctggagcaattggtgcttgttttggtagtcctgctgatctggcactcattagaatgcaagccgactcgaccctgccagctgcacaacgacgcaactataagaatgctttccatgcactctaccgtatcagtgctgatgagggagtccttgcgctttggaagggtgcaggtccaactgtggtgagagctatggcactcaatatgggtatgcttgcttcctatgaccagagtgtcgagctatttagggacaaatttggcgcaggagaaatttctactgttgttggagccagcgctgtttctggattcttcgcctcagcatgcagtttgccctttgactatgtgaagacacagattcagaagatgcaacctgatgctaatggcaagtacccatacacagggtctttggactgtgctgtgaagaccttcaagagcggtggcccattcaagttctacactggtttcccggtgtactgcgtcaggattgcaccccatgtcatgatgacctggatattcttgaatcagatccagaagtttgagaagaagatcggcatataggattcccatcggacggatacagggttgaccgttctatgctattactgctggactctgtaataacattccagctgctttcgcaccatggtagttggttttggtagagacaagtctgttacaatttttttaccttagctttccaattattgtgtcgcaataatcgaattaattgttgctgggggattttttttggggggtgggtgggtggacatgcatttgttggctgggatgtagccatgaggagagggggatactacctagttatgccattgaatggaattggaccatattttatacagatttttaccttcagttcttttgaacttattgcatttgggacattgattttttttgtaatggaaacgatgggaattgatc

SEQ ID NO: 26169 - DNA, 1515 bp, Zea mays
  Clone ID: LIB4074-008-E9_FLI
agcaaaactagagcaatggagcagacactggtgaaggtcaggaaaattcatgatggctgctcaagtgctgtgaataggctccatactgtccttcactcaacagagcagcaactcgaatcaaacaaaagacaagctaactatctagcacaagtggctgcaaaatctctacccaagggtctccattgccttacactgcggcttacaaatgagtactatttcactaactcaaagaataaagactttccctacgtggagaagctggaagaccccaaactctatcattatgccttgttttcagacaatgtattggctgctgcagtggttgttaactcaactcttgtccatgctaagaaaccagaaaaacatgtattccacattgtgacagatagtcttaactatgctgcaatgaaaatgtggttcctggctaatccctttggtaaagccgctattcaggttcagaacattgaagagtttacatggttaaactcaagctacagtccagtgctgaagcagttggaaacgcggtttatgattgattactacttcagaactgggcatgctaggcacgatgaaaatcccaagtttcggaaccccaagtacttgtcaattctcaaccatctgaggttctatctccctgagatcttcccaagacttaacaaggtgttatttctggatgatgatactgtagtgcagcgagacctaagtgcgctttggttggtagatctcaaaggcaaggttaatggtgctgtcgagacctgtagacaggacttccataggtttgataagtacctcaacttctcaaaccctcttattgccaagaattttgatccacatgcttgtggttgggcatatggcatgaacatgtttgatttgtccgactggagaaagcaaaacatcactgaggtctaccatacctggcagaagttgaatgaaaacaggctattgtggaagctaggtaccctccctgctggccttgtaaccttttggaaccgcacgttccctctcgatcgttcgtggcatcaattaggacttgggtacaacccaaatgtcaacgttaaggatatcaggcgagcggctgtcatccactacaacggaaacctgaagccctggcttgagattggattgccgaaataccgcaagtactggtcagcacacgtcaattacgatcaagtgtttctacgggagtgcaacataaacccctgaacagcaaatagtggtgcatggtttatatccttttcttttcaatgatttcttagaccaattctttgtgctctaggtaatttaaattgcctagagtgcttattctttgtaactgatgtctttcctgatgtaaaggtgccagcaggttggcggtaggcttggatcatacaaacagttagtagccaaaggcatatcccgttttgtgcttataaatgctaatatggtagataatttttgactgtatgtatgaattgaatgctatgttagatgccctcgcaaacagtacagtttgcgacgacccatttccactactgc

SEQ ID NO: 26170 - DNA, 344 bp, Zea mays
  Clone ID: LIB4074-009-C9_FLI
tggcagggcagcagcaagcagatcgcgagttcaagacaatggcagcagcggggagcgtccagggccacggcgcgcggttcgcggcggcgtgcggcgtgctcagccggtacgtaaaagcagcagcggtggcgactacgacgacggtggagctgcggccggcgggcacggtaggggtactccctctgatgcctggtgcggacctgtccacgcaagaggagcgcgaggcgggggcggggccggggccgtcgccgtcgccgagcgcgcagctgaccatctcgtacggcgggcgggtggtggtgctggacgacgtcccggcggacaaggccgccgaggtggtccggctc

SEQ ID NO: 26171 - DNA, 857 bp, Zea mays
  Clone ID: LIB4074-009-F1_FLI
gtgcgtggacagatggctctgtgtggtgcgtgcgtgcatgtgccgcgtacgtccgcgtgtaaagctggagctctgaccggggcagtcaccggcgcggtggcgggcagggcttccgacagcggcggcgtcctgcggggagctggactgggggcggtcgccggagctatcctctccattgaggtccttgaggcttctcgcgcttactggtgctcgtcggaccggctgggctcgcacggcggagcatcgtccatggctgatttcattgagcagcttcttcgtgcccggtttgtgcaagagcaatttactgcttcaggatatgcatcatatcgctggcagctcagcatatcatattttggtcaggatgacctatacgacatctttggggacatttcatctgaagggctctcgcaagagtcactgaagaaactaccacatcatgtggtcagtgaccagacgcgggacttactcggcgaaatcctgtgttgtcctatctgtctacaggacattgtggccggtgagacagcgaggaggctgcccggctgctctcacgccttccaccagccttgcgtggacagatggctcgtcggccatggctcgtgccccgtctgcaggcaacgcgtgtaaaagatatataggcgacctgcgtacgtacgtagacgaagaaatagctgggtggagtgaagagaaatgtttgctcgggcacttcgtattagaggtacatacgaatctgcctgttttcactaccggcggaaacggccgtgcgcatctggcaatctcacttcgtttcttgcaccccggttccaacgtgtaatggcaatggaataagattgctgtcggagcagttcctgtttctgtag

SEQ ID NO: 26172 - DNA, 177 bp, Zea mays
  Clone ID: LIB4074-009-H12_FLI
cctgaataatgtaggcgcagttaaacagcagcagcactgccgatctctttatttttcaatattgttatctagtggttcaggaccaaataagtaggccaggtgctgactgttgtatggtttgtggcctattgtcgttgctaaaaactagaaatgcgcgtactaatgttgcattgctgc

SEQ ID NO: 26173 - DNA, 726 bp, Zea mays
  Clone ID: LIB4074-010-E6_FLI
tgagggactaactagagacgacggaggacctcgctcccccttttataccatccttgagtgaggccgggggctcacttcgtgctcgagctccagctcagcagcaaggcgccaaggtagcaagctctgggtcgccactactgcaatggaaggcctgattccgttggtgtaccggaccatcgtggagtacaggaaggcgaggcaccaggtcgccatcgcaagccgcctgctgtacggcgaccaccaccagcagccgtgtggttcgtcggcgctcttccgcgtcgttgaccctgcagcaagcagcagcagctggcacgccgcgtcgtcgtcgatgtccccggccacgtcgccggcggcagccagggccagcggcagcctggcatcgccgctcctccgctcggcgtcgcgccgccagctcgcaggttagtctgctgctcgtgatgggcaacaagttcgagtggtgctttgtggtatgcgaggcacttcttggcgtgtacaagactacaagtgtacgtattacgtacttataccaggtatattaataagccgtagagagagagaaaagggtttattttgaagaataagggcatagtcagagggtggtccaaaggagcgcctcaactgatgagaagagaaggcaaagcttctgcttcaagcccagctggtggttgtatactgtgcctgtactgtaatactatcctgtagctgctgctctagtagcggccatgt

SEQ ID NO: 26174 - DNA, 626 bp, Zea mays
  Clone ID: LIB4074-010-F4_FLI
ggccacccaggaccgcgtcttcttcaaccgtccacggaatttgcgagcagctccgtgcccgccccaaatcacgcgccccaactaccgatctcctctggccatggttcgggggttcggccatataaatgcggcgcttcctttaccatagctcaccaggtcaggaacccccttcttgtatcgcaacaccaccaccgtctgggcgctgtgctgtgtgcgcagccgccaccgtcgatccgcgcttggggtgaccatccggctggggcgtgccatctagaagcccggcgggatcatcaggagcaggttcatcagagtcgtgggccggggaagcccacggaatttgtcgccagcgccgttggtacactgaatcgtagcagtgaggtcacgaggatttgaagaatcatcctggtacctacaatctcaagtgctaggagaagaacaggtggttcaagaggagccacatagcgaggtgttcgattccatctaggtggcgtctcccagttgactttgtggtgccaaggatggactttagttcgatctatatttatcttttattttgtaagacttccactatataataagtactctgattatattgtgacatttatctttatacactccgttattat

SEQ ID NO: 26175 - DNA, 165 bp, Zea mays
  Clone ID: LIB4074-012-D3_FLI
agaaataatgcaaaaggagccatatatggatgcaggacataaagccacgtttccacctaacacttgggtgcgtaagggttgatcgggtgcggcggatagcgtgtccaactggcttgttcgtttcaccgtcccgtggattaataaatgaacaaactatcgacaatc

SEQ ID NO: 26176 - DNA, 537 bp, Zea mays
  Clone ID: LIB4074-012-G8_FLI
aaagcagccgcagccccagcccccacaagacgaggcaacaatggcgctagaagcagccaccgccccccgcgcactcctcgccgcgtgcctcgtcctgctggtcctcggcggcggcaccggcccgtcgtcggtgctgcgcggcgccggggcgcaggccggcgggcagtgcctgccgcagctgaaccgcctcctggcgtgccgcgcgtacctggtgcccggcgcgccggaccccagcgcggactgctgcagcgcgctgagcgccgtgtcgcacgagtgcgcctgcagcaccatgggcatcatcaacagcctgcccggccggtgccacctcgcccaagccaactgctccgcttgaagcagggacctggcacgcgtgctgcaatggatggcaggaggggagaggaataagaagtgtttccatttcacagtgagagcagtcgagctccaacgttgtcgtcgtcgtcgtcttcttcttttgatattcagactctgtcttgcggtctatatcatcagcataataataataaaataagtaaaacc

SEQ ID NO: 26177 - DNA, 741 bp, Zea mays
  Clone ID: LIB4074-012-H9_FLI
gctctaacgactagattggctagagagatcgcgatcgtggtagctgctggcttgtgatcgagacgagcaatggcgtccaaggcgtttgcgctgttcctggccgtgaacctggtggtgctgggcgtagccagcgcctgctcgccctactgcccgaccccgaccccgaccccctcgacgccgacgacgcccacgcccacgccgtcgtcgttcggcaggtgcccccgcgacgcgctcaagcttggcgtgtgcgccaacgtgctgggcctcatcaaggcgaaggtgggcgtgccgcccgcggagccgtgctgcccgctgctggagggtctcgtcgacctggaggccgccgtctgcctctgcaccgccatcaagggccaaatcctcggcatcaacctcaacctgcctatcgatctcagcctcatcctcaactactgcggcaggaccgtgcccaccggcttcaagtgctgagctgagcgcgttcgcctcccttgcatgcatatgcacgcacacgatgatgagtgaatgagtgatgcatattatggtttggttgcatttccacgtacgcgcgacgactagtccgcatcatgcatgtacgcatggccgtgatttgtattctccccgcctggctgctgcctctttatttgctccccgtgcatttgtcatgttgcaaagagttagccggctgtcacttgtatgccggtgatacataagttccaatcaagtttgtcttgcgctttatatttc

SEQ ID NO: 26178 - DNA, 619 bp, Zea mays
  Clone ID: LIB4074-013-A3_FLI
ggaggaaaaatcagccgtggactctcttccgtaagccctagcccctagcccctagccgccagtgtcatgcattcgtgctgaggctcaactgctgatccgtcttccaagctctggtatcatccctgagcactgatttaagatgtatctccagtactacatcaacgagaagggggacaaggtctacaccaccaagaaggagtcacctcttggggtgccaacgcagtctgctcacccagctcggttctcacctgatgacaagtactctcgccaacgatacctgttgaagaagagatttggacttctgccaacgcagaatccaggaccgaagtactgaagcttcaagtcaactgtccaacctgcgatgttctttttgtgtcaatgcttgttggttggaatgtactatcttcgttctcgaatatttgtggtccgctagttcaattttgaactaaaccgcgacaaataaaaaagagcggagggagtagaatataggtatttctgagaactgaaatcaaacactggtaggcactactatgtcatcctgcatcacattctgtcactacatgtaatgctatgtgtttttggactgttgacatgctttattagttactgcttattcacc

SEQ ID NO: 26179 - DNA, 617 bp, Zea mays
  Clone ID: LIB4074-013-C3_FLI
gccaccgccctcgcgaagcacctcggacacggcgactgccgactgacccggtcagcttgattaggcaatatggttatccctccaccagctagggctcctgcaatcaccaagttcctcaagccgtatattttgaagatgcatttcacaaacagttttgtgagcgctcaggtcatccacacaccgacagccacggtcgcatgctctgcaagctctcaggagaaactcctgaggccaagcatggagtcgacacgggatgttgctgcggctgcaaagattgggaagttgcttggagagcgcttgctgttcaagggtatccctgcagtatctgtctccatgtcaagagaccagaagtaccatggcaaggtgaaggccgtgatagattctctaagaggtgttggtgtgaaattgctgtagggaaaactgactgttttatgagaggttatgttcgggcctcatgtttacctccgaagctgcttggcggtccattagtttcgtgactgaatttttttatgggtgctgctgaacaatatcttgaaccatgtaagtccttgttcagttgttcctatgcaccatggattggaaaagaaaatatgaaagattttgacttggtatggatt

SEQ ID NO: 26180 - DNA, 503 bp, Zea mays
  Clone ID: LIB4074-013-H4_FLI
ctgatgagatgttgagtagaggctttaaggatcagatttacgatgtctacagatatctccctccagaacttcaggtggttttgatctctgcaactcttcctcatgagatcttggagatgactagtaagttcatgaccgaaccggttaggatccttgtgaagcgtgatgagctgaccctggagggcatctttgtgctgttcaaggagggaagtactcttctaaactgagatcgaaatcctggtcgttgaagatgaaccttggagtagttatactgcttatgctttccttttcttatagtagtatactccgtcccaaagtaagtcagtttctagaatcacataaagccaaactatcttaagttcgatcaattttatagaaaaggtaacgtcatctatgaagatatatttcatgacgtgttactgatactaattgagtgtctaaatattgtccactacttatacaaatgtcaagtatatccatctaaataccattacaaaatttct

SEQ ID NO: 26181 - DNA, 750 bp, Zea mays
  Clone ID: LIB4074-013-H7_FLI
ccttcctatccatcccttcctcgccacgggggtcgcctgagatcacataaacaatggtgaaggctgttgctgtgcttggtagcagcgatggtgtcaagggcaccatctttttcacccaagtgggagatggccctaccactgtcaccggaagtgtctctggcctcaagcctggcctccatgggtttcatgtgcatgcgcttggtgacaccaccaatggctgcatgtcaactggaccacactacaatcctgcgagcaaggaacatggagcaccagaagatgagaaccgccatgccggtgatcttggaaatgtgacagctggagcagatggtgttgcaaacattaatgttaccgacagccagatcccactgactgggccaaactcaatcattggcagagctgttgttgttcacgctgaccccgatgatcttggaaagggtggacacgagctcagcaagagcaccggaaacgctggcggccgtgttgcttgtgggatcatcggactccagggctgaactgaaacgaatggtcgctggacttcgggggcgcctgggagtgccgtcaccactcaccagcaggctagaataacatcccgagacatcgtgaaataataataataagagcgcctgatatgtgatcagtggtgtactcgccattaagcacctgtggcaaccgatgagctgaactgtgttggactgttggataatgctggttcgcctgagcatgtgttacaagtctgtcggttttgatggc

SEQ ID NO: 26182 - DNA, 660 bp, Zea mays
  Clone ID: LIB4074-014-A2_FLI
ggtgggttggcttctcctcccccaccggttcgtgttcaggttctggttcgtgggcgagagggaagagatggcggcgtcggacgttgagtaccgttgcttcgttggcggcctcgcctgggccaccgacgaccactccctcaacaacgccttcagcacctacggcgaggtcctcgagtcgaagatcatcctggatcgggagacgcagaggtcccgcggcttcggcttcgtcaccttctccacggaggacgcgatgcgcagcgccatcgagggcatgaacggcaaggagctcgacggccgcaacatcaccgttaacgaggcccagtcccgcggcggccgtggaggcggcggtggcggatacggtggcgggcgccgtgatggaggcggctacggcggtggcggtggaggctacggcggtggtcgtggaggctacggcggcggtgggggatacggtggtgcaaaccgcggcggcggctacggcaacaacgacgggaactggaggaactgagcggtggggtccgctgaggcctagttatcttgttcgcttctgctaccgtgttcaccctagtctagagggggtttatcttcgtctgtggtcgtctcgtgtccgtatgtttcgtttcgtgttcgttgttgttgttgcccatctgtgtttttgaccgc

SEQ ID NO: 26183 - DNA, 711 bp, Zea mays
  Clone ID: LIB4074-014-A8_FLI
ccgccatggggaggggaaagttcaagggaaagcccaccggccgccgcaacttctccacaccggaggagatcgctgctggtacttcaggtcgccctcgcacctttaagaagaaggaggaagaggaagaggaggaagaagaaagagaagagtcagaggaggaagaatctgaagacgagtctgatgacaaacctaaacataaaggtactgagggtattattcagattgaaaatccgaacttagtaaaagtgaagaatataaaggccaaggaagttgatcttggaaagacaactgaactctcaaggcgtgaaagggaggagcttgagaaacaaaaagctcatgaacgttatatgaaacttcaggagcaaggaaaaacagaacaagcacggaaagatttggaacgtcttgctttaataagacagcaaagggctgatgctgcaaagaaacgcgatgaggagaaagctgccaaggagcagaggaagtcggaagcacggaagtaactgcaatatcatggacgatgagaccacgaaggcatgatctgcgttagttggatatttatttctaatgcatcagttatcttgttataaacctggtccctattctgtatccccataaaatatgcattgacaaaattagtaacagtcttgtgggcgtgtcttcctgtaaacttgagcttgacaaaattagaaagtagtattaaggtcagcttatgcg

SEQ ID NO: 26184 - DNA, 1056 bp, Zea mays
  Clone ID: LIB4074-014-F10_FLI
aaacttaattaaatttataaaaaagacaccgaattgtttgcaggttcaagcagcctcgcacggtcacacacacactttgcacgcttgtctcacgtgttgaggagccaaccggctgtccggccatgtcgtcgccggctgcaggcacggcagcggagccgcacgtcgtggaggactgcctcggcttcgtgcagctgctgagcgacggcacagtgaggcggtccacggactactccatgctccgtcccatcggccgcgtgccgtcggacacggacctgcccgtgcagtggaaggacgtggtgtacgaggacacgcgcggcctccgcctccgcatgtaccggcccactggcgccgcagccggggagacgaagctgccggtgctggtgtacttccacggcggcggcttctgcctgctcagcttcgaggtggccagcttccatgccggcgcgctccggctcgccgccgagctcccggcgctcgtgctgtccgcggactaccgcctggcgccggagcaccgcctccccgccgcgctggacgacgccgagtccgccttcgcctggctccgcgcccaggccgcgccgccctccgccgcgggcgcggagtcggacccgtggctcgccgagtcggccgacttcgcccgcgtgttcgtcgccggcgactcggccggcggcaacatctcgcaccacgtcgccgtgcgtcacgccagctccggcggagggctctccgtcgccccgctccgactcgccgggtgcgtcatgctctggccatacttcggcggcgaggagccgacgccgtccgaggcggcgttcccggccgaccagcccatggacacggcgctgttcgaccagatgtggcgcctggcgctgccggcgggcgcgaccaaggaccacccgttcgcgaacccgttcgcggcggggagcgtcccgctccgcgacctcggcgcggccttcccgccgctgctcgtcgtggaccccgaccaggacccgctgcacgaccgcgtggtcgactacgtcgccaggctcaaggcggccgggaaggccgtcgagctcgtcgtgttcg

SEQ ID NO: 26185 - DNA, 945 bp, Zea mays
  Clone ID: LIB4074-014-F5_FLI
ctccctctcatcaccaaagaactgcaactaggaacggttcgccacaaaaaaagaacgtacggctatgaagacgaggcgcggtgcctgccacgcggcggcggcggccacggcgccgggcgaggggccggaggcgcaacgccggaagcggcgcaggacggcggcggccgaggggtcgccagcggcggccggcactccaggtgtccgcccggtgggcagagacatgttcgaagagctgcctgacgatctcgtcgtctccatactacgggacgtcgccgcgtccgccagttcgccggccgatctcgccggcgccatgctcacgtgcaagaggttcagggagctcgggcagagcaaggtggtgctggcgcgggcgtcgccgcggtgcctggcggtgcgcgccaaggcctggtcggaggaggcgcaccggttcctgcagcgctgcgccgacgcgggcagcctggaagcctgctacctccttggcatgattcggttctactgcctggggatccgcggctcgggcgctgcgctgatggcggcggcggcggtgggcgggcaccgcgaggcgctctactcgctggccgtggtccagttcaacggcagcggcgggggcaaggacgaccgcgacctccgcgccggagccgcgctgtgcgcgcgcgcggcgtcgctgggccacgtgggcgcgctccgcgagctggggcactgcctccaggacggctacggcgtgcggcggtccgtgctggacgggcggcgcctcctgatccaggcgaacgcgcgcgagctcgcggcggtcgccgccgcctcgccgctgcagccgccgccgcagccgctcggcaaggcggcgccccacccgactcggcgtcactcgtgcctcctgagcgacttcgggtgccgcgccgcggccggggagccgcacgcggccaaccggttcctggcggactggttcgcgtc

SEQ ID NO: 26186 - DNA, 537 bp, Zea mays
  Clone ID: LIB4074-015-C5_FLI
aaagcagccgcagccccagcccccacaagacgaggcaacaatggcgctagaagcagccaccgccccccgcgcactcctcgccgcgtgcctcgtcctgctggtcctcggcggcggcaccggcccgtcgtcggtgctgcgcggcgccggggcgcaggccggcgggcagtgcctgccgcagctgaaccgcctcctggcgtgccgcgcgtacctggtgcccggcgcgccggaccccagcgcggactgctgcagcgcgctgagcgccgtgtcgcacgagtgcgcctgcagcaccatgggcatcatcaacagcctgcccggccggtgccacctcgcccaagccaactgctccgcttgaagcagggacctggcacgcgtgctgcaatggatggcaggaggggagaggaataagaagtgtttccatttcacagtgagagcagtcgagctccaacgttgtcgtcgtcgtcgtcttcttcttttgatattcagactctgtcttgcggtctatatcatcagcataataataataaaataagtaaaccc

SEQ ID NO: 26187 - DNA, 791 bp, Zea mays
  Clone ID: LIB4074-015-F4_FLI
ctctcagaaccgagatcctcaaaacccttttccctcctcccttctcccctctcggatcgagtgcttgagctccgaccaaatctcgcagcggctgcaattccgagcccgaagagcggatcaggcgaggacgacgccttcgattctgatctgcggtcggcgcgacccagagagaaccggagatgcagcagggcgacggcacggaggcgcaggtgacgtgggaggaccagcagaacatcaaccgcttcggtcgcctcaacaaccgcctccacgagctccaggaagagatcaagctcgcaaaggagacgaatgagaaccttgatgatgctgggaatgaactcatcttgtccgatgaagacgttgtacgcttccaaattggggaagtgtttgctcacatgccaagggatgacgtcgagactaggctggagcagatgaaagaggatgcggctaagaagctggagaggttagaggaggaaaaggaatccatcctggcccagatggccgagctgaagaagatactgtacgggaagttcaaggatgccatcaacctggaggaagattagcagtactggagtcgtggcgatttgaggtgatgtttctttctagttcaggtgatgtttttttcccttgctctccggctctcccacaaacatcagtcttgtgatgctggcctggttgtgttagcagttctttcaaaacctctattacccagaagaacccagaaaatagttccattcattccgcgggtgtatatgcattgaagttaatggacctgagccgatgaatcccttttc

SEQ ID NO: 26188 - DNA, 1261 bp, Zea mays
  Clone ID: LIB4074-015-G1_FLI
actagttcatcgagccgagaggatagatagatagggtaagtctccctccgtctagaacgggaaccccacgccgatcgaatccgccaaccaaacaatggcgtccgacggcagtggcgtggtgacggtgtacggcaacaacggcgcggcgctgctggagccgccgaagcagcccaagtcgtcgactttctccgtgaaggtgggcctggcgcagatgctccgcggcggtgtgatcatggacgtggtgaccccggagcaggcccgcctggccgaggaggccggcgcctgcgccgtgatggcgctggagcgtgtccccgccgacatccgcgcgcagggtggcgtggcgcgcatgtcggacccgggcctgatccgtgacatcaagcgcgccgtgaccatccccgtcatggccaaggcccgcatcgggcacttcgtggaggcgcagatcctggaggccgtgggcgtggactacgtggacgagagcgaggtgctgaccccggccgacgacgcccaccacatcaacaagcacaacttccgcgtgcccttcgtgtgcggctgccgcgaccttggcgaggcgctgcgcagggtccgcgagggcgccgccatgatccgcaccaagggggaggccggcacgggcaacgtcgtggaggcggtgcgccacgtgcgctccgtcgcgggcgccgtccgcgcgctccgcggcatggacgacgacgaggtgttcgcctacgccaagcgcatcgccgcgccctacgacctggtcatgcagaccaagcagctggggcggctccccgtcgtgcagttcgcggcggggggcgtggccacgcccgccgacgccgcgctcatgatgcagctcggctgcgacggcgtcttcgtcggctccggcatcttcaagagcggcgaccccgcgcgccgcgcccgcgccatcgtccaggcggtcacccactacagcgaccccaccatcctcaccgacgtcagcgcggggctcggggaggccatggtcggcatcaacctcaacgacccaaaggtggagcgatacgccgccagatccgagtgaacactcccctttcctactccacttatatttatcagtatcatctccgctccgccggctctgccaacaaatttttttgcactgcatgcagtagcttaagtaataatggaatgagtgaatgaaatggtgagaaacgaagctatggcactatgcagaagctctgtaattttgtgccgttcttataaagtttgcataggctcccctggattatgaatc

SEQ ID NO: 26189 - DNA, 1334 bp, Zea mays
  Clone ID: LIB4074-016-C3_FLI
gcgcagcagcccaggaagcaacacccagccgcctaatcccgcaacaactcgccctcttctacccccagcggctcctctgcatccgcctaccggtggcctacaggtttgctggagtgcagtgcacgggcggtggagcagcaaatctgcaactgattcaggatggatcaggaggcgaaggactcgaggccctcaaggtctcccagcgagccaaacctcttcctgcaatggggtagccgtaagaggctgcgatgtgtcaagacgcgtgatgatggctcaccatcgccgtcgccgtctcaaggtcttagacgtgccataccccgtgctactcggcccctccttggagctgacattgcaacatttcgttcaccgcggcgccctagcacccttaaccgcaggaaatccgatttgctggtgaatgagtacaagcacacgatggcgctatcgccagagaaggacaagtattacacaacgagaggttcaccatttccctttgaaggaaatgggtttgactttggtaccataacagaggataagggaaccacatcattgccgagattcttcattgcattgtcaaacaaggagaaggaggaggacttcatggcgatgaagggctccaagctgccacagaggccaaagaagaggcccaagttgatgcagaagtgcttgcttatggtgagcccaggagcttggttatcagatctatctcatgagagatatgaagttagagagaagaagagttctaaaaaggtaccctgcatatagatatctttgttttgcttaaagaaagaagtacattttgtacctgagacctctcaattcaactccaaattgacattctcttaatgcctgttgctgatatgagtgaaacaacctgcagagggctagaggcttgaaggctttgagcatggagagtgattcagaatagagtttgaggcgaatggatttttggacttgactttagctggtggcaagaatctgtagttaggtggcactgccttctgcctgtcagacaaacctcagcatctaatttggtgctatgagtgctctgatcaagatctattggttgatgtcaacagcaaagatgatattagattcctgatctagtgaggtgcagctccatctttctgggtagtgggcgcctttgtgagagaaaaaatggaggtgggatacaatagatggtttctcaaaaccacagaggaagtaatgttcaactgttgggaaacaacgaaagctggatgttcgctgagaaccaatgattcatgatgtttaattgtcataaacttgtagctgtaagactcatggtgaccattcaatcaagactgaccaaaattttc

SEQ ID NO: 26190 - DNA, 321 bp, Zea mays
  Clone ID: LIB4074-016-E5_FLI
atcgagggagtcaccgagtcgctcaaacactacgttccctttaagaccaagtcgtgatgactgactgagcttaaattctccggtcactgtacaatgcaatggcttaccaccttgcagtgctcgctaagggttatagtccacatgaaaaactgatgcacatagaaaatcctgaccttcaaaaacagatctggtgtgtgattgttttgcaccgttatatctgattttgaagactaggattttatatgtgtacatgtataccaaacctccatgtgtaccaaataccatgggctagtgaaaaactgatgcaattgagtcccgtgc

SEQ ID NO: 26191 - DNA, 504 bp, Zea mays
  Clone ID: LIB4074-017-B1_FLI
tctctcccatccgagtgtctcctcctcctccgccgccgccgccgccgcttccctcgtctccgcccgccgaagccatgccgtcgcacaagaccttccggatcaagaagaagctggccaagaagatgcgccagaaccgccccatcccctactggatccgcatgcgcaccgacaacaccatcaggtacaacgccaagcgcaggcactggcgtcgcaccaaactcggattctgagcggtggaagaaatgctggctaaagacgcctagagggtatagggctctgcaagctaggaagctcttgtttaattttttttgcttgtgttatttgtcattgtagtaccatgttttgtctgatggttaaagaaccgcctttatgctatggtgaatttatttaaccttgcagcgccttaatcagttgatctctagccaattatttctccagctcgctatgcttctctgattgtacatggttgcccattcctcggttaattgtctggtttcaacactt

SEQ ID NO: 26192 - DNA, 777 bp, Zea mays
  Clone ID: LIB4074-017-C7_FLI
gccgaaccgtagagcccgagcctcgcggtcgaggatccgtcctgcaaatctcctctcatacttctccaccggatccctgtaagattcccggagatgtcggacgaggagcaccagttcgagtccaaggccgacgccggcgcctccaagacctacccgcagcaggccggcaccatccgcaagaacggctacatcgtcatcaagggacgtccctgcaaggttgttgaggtctccacttccaagactgggaagcatggccatgccaagtgccactttgttggcattgacgttttcactggaaagaagcttgaggatattgttccttcttctcacaactgtgatgttccccatgttgatcgcactgagtatcagctgattgacatcactgaagatggatttgtgagccttttgactgacagtggcaacactaaggatgacctcaggcttccgactgatgaagctctggaaggccagatcaagagcggatatgatgatggaaaggacctcctcctgacggtgatgtcttccatgggcgaggaacagatctgcgctgtcaaggagatcgggggcaagaactaaagccgctgctgctgtctcgtgtgcttagagttgagatgcatagataaagcgtataagttatctgtggttttgggtttacctggaaatttgtcgaggtggttggtgttactactctacttggttagcgatctgtggtattcttttcaacttagttatggtcaatatgtattcagttgaaatatttggtttaaattcttgcct

SEQ ID NO: 26193 - DNA, 1298 bp, Zea mays
  Clone ID: LIB4074-017-D11_FLI
gtacaagtttgatccgcacggggagtacgtccggcgatggctaccggagctggcaaggctgccaacggaatggatacaccatccctgggatgcacccgagtctgtgcttcaggctgcaggagttgagctaggatctaactacccacgccccattgtcgagttagatgcagccaattccaggttgcaggatgccctgtcagagatgtgggagcttgaggcagcctctcgtgctgccatggagaacggaatggaagaaggcctcggcgattccacggatgagccaccgatcgacttccctcaagaactacggatggaagtggaccgacagccggttcaacctgctatccacgcaccgggagtgactggtcggagacgagaggatcagatggtgcctagcatgacttcctcgttcattagagctgagaccgaactcactgcagattttggccacaccagtgaggacagtaggccagaagtgccatcaaacatccaccatttgcaggctcgcccggagagggaagagacagttgacggtggcactggcaatgctgtcagggtgcatggcaaccatcaccagcagaaccttcagaacaacatgcaccgcgtgctaggtatcgctccatcgatttcagaggcatcaagcagttggacgggcagggatggtggagtggtaccagtctggtcgcctccggcagcttcgggacactctgattcttatgctgccgatgaggctgacatttccagtaggggttatctggacaggcatccacagtcacatacgatgatgaactggagccagctctctcagtcattgtgagttcagttgcacggtaacttgtttttttcacagagaaatgcattgtcataaattggaaattcgcagtgtgtcgcaacagagtagtcgtgttaagccattgttagtgtggtagttaaaatgaactgacaacttgaatttgatgatgtgtagtagctgagtagaacattccaaatgcctactaatgatgtttttttaatgaatgaatctctttgcaggacaacagggtgggaagtggataattagcgctgtgtgtccggatttaattgcttaggatttcggcagagagaattatacatatgtaaattatcagattttgttcgtctatatagccttggtgtgcatgcaagtcatcaatcatgcagcttcctggatgcaataatggttatgtgaagctagttgtacagaaccttgtggtataggttgctaggtgtccacaagatatatgtattattcgtcagaagagttttctagcatcaggttc

SEQ ID NO: 26194 - DNA, 570 bp, Zea mays
  Clone ID: LIB4074-017-F7_FLI
caaggggcaggagtgcaccaacacgacgggcgccaacaccgtcatcggcaccgagcagcagttcccggactaccccaggtacctggaccgctgccacctcaacgcgtcggtgaccgaggacggccaggtgatgccggcgtgcgtgccgggcctcgcccccgccgtcgtcctcgccaactacaccaagtcgcagtacaaccggttcctcaacgacagccagttctccggcgccgggatcgcgagcgagggcgactgggtcgtggtcgtgctcagcaccagcacgggatccggcgactactcgccggctccgccgggctccaactgggcggtctcggcggctcggccgttcggcttcggccagctggtccttttgttggtggggtttgtagttttgctggtgaagtgagtgtttagtacgcatgcaccaacatcttcgtggcttatgttgtcacgttcaggtctcgttggctttattaagcttttttcacttgaaaagattgattacgaaacaaacatgtgatttattgttaaaaaaagtaaatcaatctatcgcaatagttaatggaggtc

SEQ ID NO: 26195 - DNA, 895 bp, Zea mays
  Clone ID: LIB4074-017-G10_FLI
cgcctcgggtcaaaccctaagcagggagttgatttatccgctgcagccatgagtaagttgcagtctgagtctgtcaaggatgccatctcccagattgttgggggatgccaaggagaagaataggaagttcactgagactgtggaacttcagattggtctgaagaattatgatccacagaaggacaagcgtttcagtggctctgttaagttgccccatatccctcgtcccaagatgaaggtgtgcatgcttggtgatgcccagcatgttgaggaggccgagaagatgggacttgactacatggatgttgaggctctcaagaaaatgaacaagaacaagaagcttgttaagaggcttgccaagaagtaccatgctttcttggcatcagaggccatcatcaagcagattccccgtctccttggtcctggtctcaacaaggcaggcaagttcccgaccctggttactcaccaggaatccctcgaatccaaggtgaacgagactaaggcaaccgtcaagttccagctcaagaaggtcctttgcatgggcgtcgccgtcggcaacttggcgatggaggagaagcagatccagcagaacatccagatgagcgtgaacttccttgtttcccttctgaagaagaactggcagaatgtgagatgcctctacgtcaagagcaccatggggaagccatacagggtgttctaagtatgctcttttgtgaagtctgctaggttctggcaccgaggttttattgaattaaactcttgttaaggatatgtttttggacgatcctatatttcgtcctggcgctactatgtttcagaatggtggtactactataagtatcctggcgctctaagtattgcttgaaaggatcaatataatttgcgtgtcataccc

SEQ ID NO: 26196 - DNA, 1368 bp, Zea mays
  Clone ID: LIB4074-017-G11_FLI
gaagaagggcccccttcaacagacagatcctccatcaatacctgttgatgagcttttcccctcaggagaatttccagagggcgaaatccaacaatacaaggatgacaatctgtggagaacaactagtgaggaaaagagggacctggaacgactgcaaaagccaatatacaactctgttcgtcaagcagcagaagttcatagacaggtgcggaaatatatgaggagcatcataaaacctggaatgttaatggttgatctatgtgagacattggaaaacatggtccagaaacttatcaaggagaatggactgcaagctggcattgcttttccgactggatgctccttgaattgggttgcagctcactggactccaaatgcgggcgacaaaactgtgctacaatatgatgatgtgatgaagcttgattttggaacacatatagatggttacattgttgattgtgcatttactgttgcattcaatcctatgtttgatccattgcttcaagcaacgagagatgccacaaataccggaatcaaggaagctgggatagatgcacggcttggtgatgtcggtgctgcaatccaagaagttatggaatcctatgaggttgaaatcaatgggaaagttttccaagttaaaagtgttcggaacctcaatggacacagcatcgggccatatcaaatccatgctgggaaatcagttccaatagtgaaaggtggagagcaaacaaaaatggaggaaggggagttttatgccattgaaacttttggatctacgggaaagggatttgtcagggaggacttggaatgcagtcattacatgaagaactttgatgtcggacatgtgcctttaaggttagcaaaggccaagcaactgcttgggaccatcaaccacaacttcggaacgctcgccttttgccgccggtacttggaccgccttggtgagaccaagtacctcatggctctgaagaatctttgtgacaatggcatcgttcagccgtaccctcccctgtgcgatgtgagagggagctatgtctcgcagtttgagcacacaatcttactccggccaacttgcaaagaggtcatttccagaggcgatgactactgattgcggctggaggaggctccctgtaccaggttgtgtgtgtggagcgccatccgtttatggatggactataggacgtgtcacactcggataaatggtttggtcctccagagttcaggatgttgtatgagttttataataactcgctaaagattgtggatgtacaagtagcagtaatacgttttctgggaacatggacattgctaggctatttccagcggggatttcgtccgagtttcaatctcgattaaatgtgttgccac

SEQ ID NO: 26197 - DNA, 534 bp, Zea mays
  Clone ID: LIB4074-018-A2_FLI
gcagccgcagccccagcccccacaagacgaggcaacaatggcgctagaagcagccaccgccccccgcgcactcctcgccgcgtgcctcgtcctgctggtcctcggcggcggcaccggcccgtcgtcggtgctgcgcggcgccggggcgcaggccggcgggcagtgcctgccgcagctgaaccgcctcctggcgtgccgcgcgtacctggtgcccggcgcgccggaccccagcgcggactgctgcagcgcgctgagcgccgtgtcgcacgagtgcgcctgcagcaccatgggcatcatcaacagcctgcccggccggtgccacctcgcccaagccaactgctccgcttgaagcagggacctggcacgcgtgctgcaatggatggcaggaggggagaggaataagaagtgtttccatttcacagtgagagcagtcgagctccaacgttgtcgtcgtcgtcgtcttcttcttttgatattcagactctgtcttgcggtctatatcatcagcataataataataaaataagtaaaacc

SEQ ID NO: 26198 - DNA, 1072 bp, Zea mays
  Clone ID: LIB4074-018-B1_FLI
atgcgccggcgccggagacggcggcagcgcagacggtctggtacgaccccatgacttcgccgcaggcgccggcgccgcagcagcagccggcgatagaggctgcgatgcggggggcctcgccgtcggtgagctcgaacgcgcggcctctcagggtgtacgccgacggcatctatgatctcttccacttcggccatgcgcgcgcgctcgaacaggccaagaagtcatttcccaacacctacttgctggtaggttgctgcagcgacgagatcacccacatgtacaaaggaaagaccgtcatgaccgaggacgagcgctacgaatcgcttcggcattgcaagtgggtcgacgaggtcataccggacgctccatgggtgatcaaccaggaattcatcgacaagcacgacatcgactacgtcgctcacgacgcgctcccatacgctgacacgagtggagctgccaatgatgtctatgaatttgtgaaagccatcgggaagttcaaggagacgaagcgcaccgagggcatctcgacgtcggacatcatcatgaggatcttgaaggactacaaccagtacatcatgcggaacctcacccgcgggtacagccgcaaagatctcggcgtcagctacgtcaaggagaagcagctgagagtcaacatggggatcagcaagctacgggagaaggtgaaggagcaccaggagaagttccacagcgcggcgaagatcgctgggaccaaccctgtggagtggatggagaacgcggaccgctggatcgttggcttccttgagaagttcgaggaaggctgccacatgatggaaactgccattaaaggtcggattcaggaggggttgaagcggcaaggcaggtcggagtcaaacctttctggagaggagtccgactcgtagttctgtgatctcctccaaatgaaactagacaaaaggagaactggagatcatttcccagtctgtgtaacagtatgagattggttaattagcatgttattgtaggatgccatggatcattgtttagttgtacctggagatcatgtagttttgaagaacaatcgtgtttctgt

SEQ ID NO: 26199 - DNA, 429 bp, Zea mays
  Clone ID: LIB4074-019-A1_FLI
gcatggagatactactttggcagggagtttgctaaatggcatccattctgctttagtgcaatgtgcaaggcaaattgttttatagaaggaaaaagctccgatggttcctatgcaaagggatatagatgtgattcacatggatttcattctatgtgtatttgccttttgtgtaaaagttagttatcttaagacaagcggggatatattctatgttcatatccgtcatttagggtgttgttcaaataattttatgggataataattaactagtttgtttacttctagatatatgtaatactacttaaataatccttatttctttaatttcttagctctatagctagaaacatgtttttagttgccaaccactttagtaatatatgtttcttctcctttattataaacctcaatacttgttgtgagcttctc

SEQ ID NO: 26200 - DNA, 1003 bp, Zea mays
  Clone ID: LIB4074-019-A12_FLI
gcgcgagagagaaagagagcagcttctccatctagctagtagttagagagatgtagtactagctagctagctagtaccaccggcgacaaggtagttaggtttctcctctttctctctctagatctgtgctgctaggaaggatcggagatggggagagggaagatagagatcaagaggatcgacagcgcgacgagccggcaggtgaccttctccaagcgccgcagcgggctgttcaagaaggccaaggagctcgccatcctttgcgatgccgaggtcggcctcgccgtcttctccagcaccggccgcctgtatgacttcgctagcaccagcatgaaatgtgtgattgaaagatacagcgaggcaagagaggaacaccgtcagactatgagcgcaagtgctgaggccaaggcagttgttgggtcagcagctttctggcctgaacgtgggagatttgcagaatttagagaataagctggagacgagcctaagaaatattcgtctgaaaaaggaccaacttattttttatcagattcaagaattaaacaggaagggaagcctcatgcaccaggaaagcatagaactatacaacaaagttaaccttcttcatcaacataacactgaattacagagaaaggtgtatggacaaggagtaaataatgagcaaacaagtactactgttagacacagtacccgggatacagagaatcttccgatcaatcttgagctaagtgtgcaaagggacaaatcagaaacaccaagtgtaggcctgtagggtgagatttttgtccaaacttcaggataacacagagtcagtaaaccagatgatttaataaagaacactgaaagtgccataagactttaaatgcagtgaggatactaagccgagtgataagaaatggatatcgttggtggaattgtaagacctaacagctaaactttaagctgctagatgcgattgtttatgtatgaagaagaatgttgattttaatttagcttttcatat

SEQ ID NO: 26201 - DNA, 496 bp, Zea mays
  Clone ID: LIB4074-019-C1_FLI
caaatcactcccaccgtctccacagcaaccagcacacatttccctttggcggatcgaaggagggaaggaggagatgggtggcggcatggaggtgcacaaaaaccggtggatcgaagagtggaacgccggccgggagaacctcgagttcaacttccgctggacccgccgcagcctcgccgtcgtcggcctcttcggcctcgctgtccccatcctcgtctacaagggcatcgtccgcgaattccatatgcaggacgaggatgcaggtcggccatacaggaagttcctgtaagcggcgtccagggctgcagaatacgtcgattcctcgaccggggctgcgaggaggggagtttctattcagtttgtatcggtattgttttagtctgaatctgatgaagcaatttggaatgctgaattattgtgcctgatccaaatgaataaggtgtaatgactcgtcttttcaattactgaaactggagatgtttgaatttatttggtc

SEQ ID NO: 26202 - DNA, 688 bp, Zea mays
  Clone ID: LIB4074-020-F12_FLI
cgcagaagctgcactgcatacatcgagctaactatctgcagcgatgtctcgctcctgctgcgtcgccgtgtcggtgcttctcgctgtcgccgcgacagccagcgccaccgcgccggcatggctgcacgaggaggccatggccacgggcccgctggtcgcagagggtgcaagggtggcgccctccgcgtccacctgggctgccgacaaggcgtcgccggcgaggccgagcggcggcatggccacgcagggcgacgaccagagctcgtcgggcggcagtggcagcagcggtgagcacggcaaggaggagggcgagaagcagggcaagagctgcctcaccaaggaggagtgccacaagaagaagatgatctgcggcaagggctgcacgctctcggcgcacagcaagtgcgccgccaagtgcaccaagtcctgtgtccccacctgctaggagccgaggccggagcttgccggcggcgagacctcgatcgatcgagtgcttcacttcacttctttgttatagttcttgtgtgttgccgttgcgttgcgttgcgtagacgaagggaataaggaagggtaattggattacctgttccagatctctgtgtaagcgtgttgtcgtgacaagtcatttgatccagagcgagcgatggatagatcgcgctcgcagttttaattgcaatgctagttcaat

SEQ ID NO: 26203 - DNA, 1072 bp, Zea mays
  Clone ID: LIB4074-020-F7_FLI
aggaggacgtccgcctgggcgccaacaagttctcggagcgccagcccatcggcacggcggcgcagggcacggacgacaaggactacaaggagcccccgccggcgccgctcttcgagcccggggagctcaagtcctggtccttctaccgcgccggcatcgccgagttcgtcgccaccttcctcttcctctacatctccatcctcaccgtcatgggcgtctccaagtccacctccaagtgcgccaccgtcggcatccagggcatcgcctggtccttcggcggcatgatcttcgccctcgtctactgcaccgccggcatctccggcgggcacatcaacccggcggtgaccttcgggctgttcctggcgaggaagttgtccctcaccagggcggtgttttacatcatcatgcagtgcctgggcgccatctgcggcgcgggcgtcgtcaaggggttccagcaggggctgtacatgggcaacggcggcggcgccaacgtcgtcgcgcccggctacaccaagggcgacggcctcggcgccgagatcgtcggcaccttcatcctcgtctacaccgtcttctccgccaccgacgccaagaggaacgccagggactcccatgtgccgatcctcgcccctcttccaatcgggtttgccgtgttcctcgtccacctggccaccatccctatcaccggcaccggcatcaaccccgcgcggagccttggcgccgccgtgatttacaaccagcaccatgcctgggctgaccactggatcttctgggtcggccccttcatcggcgctgcgctggctgccatctaccaccaggtgatcatcagggcaatcccgttcaagagtaggtcttaagggagccgatgctgctgcttcgagatgatgccggtcttaaaaggatggattcgtggctgtttcaaatgatcccctactatgttacgtgcagttccattccattccattcctctttcaaagttcggagctgcttttatccgaacccagacttgtaattcatctgtaccaattgtgtaatatgccgcgcctctgttatgtgcaattgaaaattatgagac

SEQ ID NO: 26204 - DNA, 334 bp, Zea mays
  Clone ID: LIB4074-021-A12_FLI
cctgagaaacggctaccacatccaagcaaggcggcgcggcgggcaagatgtttgacgatcaagacctgggcttctttgccaatttcctgggcatcttcatctttgtcttggttattgcgtaccacttcgtgatggcagacccgaagtacgaaggaaactgatgtcctctagtgcaaagatcctattatctgcaggccgaaatagggctatactgttagctaatgctagtgagatcgcttgacactttgagtgcatatcatggaagctggacatgcagttcctggcattttggttttgcccatgttttaatctgctgaattagtaaatcctggag

SEQ ID NO: 26205 - DNA, 961 bp, Zea mays
  Clone ID: LIB4074-021-B12_FLI
cgcatcgtcgtctcccacaacacggtccactaaccctagcgacagcctcggctcgtttgatccccgcggggagctctagttccgccaagcgtgcgtaccggcgtccggatccgggaccgaagatgacggagtccctggtgcggaacaagccggggatggccagcatcaaggagatgccggtggtgcaggacgggccgccgccgggcggtttcgcgcccgtgcgcttcgcccgccggatccccacctcggggcccagcgccaccgccatcttcctcaccaccttcggtgctttcgcatatggcatgtaccaggtcggtcaggggaacaaggtccgccgggcgctcaaagaagagaaaattgctgctcgcagtgctatactgccgatgctccaagcagaagaggatgaaaggtactaagcaattactgtctgccattatcgttggtgttatattttctctggcattcacgtaacacttaaggtccatggtgcgcatgtagatttgtcaaagagtggaagaagtatcttgaggaggaggcgaggatcatgaaagatgttccagggtggaaggtcggcgagagcgtgtacaactccgggaaatggatgcccccggctactggtgagctccgccctgaggtttggtaagggcctgttgcaggcactgaatgccatcatgtcacgggggcacggataaggcttcatttttcattaaggatcagctgtttaaagacctgtatttgttgtacttgaaatctggctggttaataattggacatgtaaagacgacgtttacattgatgtaacgtgttcttgtctgctattgcttcccagcctctggtgtttcttcatgtaagtcagtctgaacatgaatccttgttattgaagaaagtatgaaatataagcagacacgcgcgtagcgcggtggcggcgcctcctgtcatggagcgcccgctttccattccc

SEQ ID NO: 26206 - DNA, 1304 bp, Zea mays
  Clone ID: LIB4074-021-D1_FLI
gcttcccgccgtcgtggagaggtcacgcggctggttcccgccgcttccggacgggttccgagggaggaggatcagctgccgcgatgttcctcaggatctctcgtctcggggcgcggcttctgcgcgagtctggagcggagacgagagctggaaatttgctaagcagtccaggcattttgtatcaagctcatcttaaccagcattcgaccagagtggtgacttctactgtattatcgttgttaagaactaaagattggtagtgaataatctatttagatgaacatgttcccaattaccattcattcttgctaatagtaaatgtatcactagttattgattcacttaatgatctacattgatttggactatatctattattttcatgatttggtttctattcgatgaatctatctatacattccccattctgaaacggctgttgcaaaagaagatcggcattatttttcctcagcaagttagcttttttagagaactacaagcaaagcctttgtacttttgtactgcaggagtgatggtttctatctcaagtttatttgtattaattttttgtttatatattttcagcggaatgtccttttctcaactgcaacaagtggtgatcaggatgaaagcagtcaggcaaaggataaaatctcggtaacatttgttaacaaggatggctcagaaaagacaatacgtgttccagttggaatgtccatgttagaagctgctcatgaaaatgacatagagcttgaaggagcatgtgagggttcacttgcgtgttctacttgtcatgtaatagtaatggatgtaaactactataacaaattagaagatccagcagatgaagaaaatgatatgcttgaccttgcatttgggctcacagagacatctcgcctcggctgccaagtgatcgcgaagcctgaactcgatggtattcggctggcattacctgtagccacaagaaacttcgcggtagatggctatgtaccgaaaccacactgaagacagttatgtacaccacactgaagacagttatgtacaccacactgaggcagtcatcttggggggcacggattcgtacaagtcaattttgtagtttataacctgtataacctaactacacctttgctacttgtagtcggggtagcttaggactaccttgttgagggagggttcgttcattgatgaacccctccattactcccagataacagtgcttccttcatctgggcgaataaacatctttcgttttgtgcgagagtatgtagtgtactcagaaatatttgcattgtagtgctccc

SEQ ID NO: 26207 - DNA, 564 bp, Zea mays
  Clone ID: LIB4074-021-H5_FLI
gctgaacagcaggaagacgccgcaggcggtggtggccgtgctggtggcggcggcgctgctggcttcgtccgcttcggcggcgatcacctgcgggcaggtggggtcgtcgctggcgccgtgcatcccgtacgcgacggggagggccagcgcgctccccgcgtcgtgctgcagcggcgtcaagagcctcaacagcgcggcgcggaccagcgcggaccgccaggcggcgtgccgctgcctcaagagcctcgccaacagcgtcaagagcgtcaacatgggcaccgtcgccaccatccccggcaagtgcggcgtctccgtcggattccccatcagcatgtccaccgactgcaacaagatcagctaagttacgacgaccaagctaataagcctaccgaacgtacacgtacgccccgcgcgctgcacgagtgatgaagccagggaagaaataaaataaagctagctgtattgccaggagcagcatgcattatttatcgatctatatatatatatactgtactgtagtactctattatatatgtatgtgtggcctgcagtgcgagttgcttc

SEQ ID NO: 26208 - DNA, 1205 bp, Zea mays
  Clone ID: LIB4074-022-C11_FLI
gaacaagtccgaacgaactgaaggagaggaggaggaggaggaatggcggacgcagccagaggcctcgggtcttcgtctctcccggtggctaacgtgcaggcgcttgcggagtcttgcaacgacaacggagccgatgcgccggtgcccgggaggtacctcatcaaggatcctagcgccgaggaggtcgtagccgccggcgacagcgcctgcacgattccggtcatcgatttccgcaagctgctcgatccggggtcgtccgaggaggagtgcgccaggctgggagccgcgtgccaccactggggattcttccagctcatcaaccatggcgttccggccgaggtgactgggaacctgatgaaggacgtagctgggttcttcaggcagccgctggaagccaagaaggagtgcgcgcagcaggccggcagcatcgaaggctacggccaggccttcgtcgtgtcggaggaccagaagctggactgggcggacatgctcttcctcatcgtgcggccgagggaggccagggacatgcgcttctggccgacgcgccctgagtccttcagggattccgtggacgcgtactccttggaagcttcgaagctagcgtaccgcctgctggagttcatggcaaggggcgtgggtgccgacccggcgtcgctgcagagcatgttccaagggcaggtgcagggcatgcgggtgaactactacccgccgtgccagcaggcggcggaccaggtgctgggcctgtcgccgcacagcgaccccaacgggctcaccctgctcctgcagatgagccacgacgtgcacgggcttcaggtcagcaaggacggcaggtggttccccgtgcaggctctccccggcgccttcgttgtcaacgtcggtgacgcgctcgagatcgttagcaacggagcgttcaggagtgtcgagcacagggccgtgatacacccgaccaaggagcggatttcggcggcgctgttccacttcccggaccaggatcggatgcttggtcctctgccggagctggtgaaggaaggcgacacagtgcggtacgcaacgacgacttaccaagagttcatgaagcgattcttcgctgcaaagctcgatggaaagaagctcatagagagattcaagctacagtagtagctacgacctctcagctcgaacaaaaaataaattcacttgtaactattaataatggccagttattg

SEQ ID NO: 26209 - DNA, 1169 bp, Zea mays
  Clone ID: LIB4074-023-B1_FLI
agccaaaaggcatcaccgccgcgacgacgatggcagcctcgctccaagccgcggccaccctgatgcagccggccaagatcggcggccgggcgccctttgcctcgctgccgtcccgcccgtcgtcgcaactcgcctgcagggcgttcggcgtcgacgccggcgccgccaggatcacgtgctccctgcaggacgtcgccagcaggtgcgtcgacgccgcgaagctcgccggcttcgcgctcgccacctcggcgctcctcgtctcgggcgcgagcgcggagggcacgcccaagaggctgacctacgacgagatccagagcaaaacgtacatggaggtgaagggcacgggcacggcgaaccagtgcccgaccatcgacggcggcgtggagtcgttcccgttcaaggccggcaagtaccagatgaagaagctgtgcctggagccgacgtccttcaccgtcaaggcggagggcatcgccaagaacgccccgcccgagttccagaagaccaagctcatgacccgcctcacgtacacgctggacgagatcgagggcccgctcgaggtcggctccgacggcacgctcaagttcgaggagaaggacggcatcgactacgccgccgtcaccgtgcagctcccggggggcgagcgcgtgccgttcctcttcaccgtcaagcagctcgtcgccaccggcaagcccgagagcttcggcgggcccttcctcgtgcccagctaccgtggctcctccttcctcgaccccaagggccgcggcggctccaccggctacgacaacgccgtcgcgctccccgccgggggcagaggtgacgaggaggagctccagaaggagaacatcaagaacgccgcctcctccaccggcaacatcacgttgagcgtcaccaagagcaacccggagaccggcgaggtcatcggcgtcttcgagagcgtgcagccgtccgacaccgacctcggggccaaggcgcccaaggatgtcaagatccagggggtctggtacgctcagctcgagtgattcgagtgtctaactgctaggtgtccgaccgccgtcatggatcttgggaaggtgtatgtataccatggaaaactttggagagcagaggaggaatcgtgtatgtaatgtacttgttaatgcaaattcgggctgtcgcttttttactccgct

SEQ ID NO: 26210 - DNA, 815 bp, Zea mays
  Clone ID: LIB4074-023-C4_FLI
ccccctcccttccactcccatcgtcgtttctctctctccggcggctgcgcggcggcttggatcacatcctcgtcggagctaccatggctgggaagcttattgcaaacctgattgtcatgggctctacgattataggaagagctatgcttcaggcatatcgtaaagcacttgataatgcaaataaaactggtgtggcccatgaggcaataaacaatattcgtagagtaagcaaaacaatgaccgaacaggaagcgaggcagatactgggtgtctcagagaattcgacgtgggaagagatcgtacagcgatacgataccttgtttgaaaggaacggcaaatctgggagcttttacctccaatcgaaggttcaccgggccaaggaatgcctagaaacagtgtaccaaaagaacaaacaagatgagcctcctaactgaaatcccgcccctttaggccttgttcgtttgtgccggattggtgggtcggaacgattcctaaccggattgcttctctaatttatataaactttgattagctggaacgatttcgggtacaattcgacacaaacgaacaagaccttagtcagctgttgacattcttttccccctcataagagaactgtacataccaacaacggtcgctgctgttgtactaccagtagtatgcaatgtggaaccaataagctttgtatgcagcgactgaaactcctacatgtgtaagactgatcagtaaggtctcgctgggctctggctcggtggcgcttacaactttgttattttgccatatgatgattgtgccaaaccattattcttgatgct

SEQ ID NO: 26211 - DNA, 1048 bp, Zea mays
  Clone ID: LIB4074-024-D12_FLI
ccagatgcgtccaaattcctcatattttctctcctcccctggtcccttctcgttctcgcccgcgtaattcctctctggcgtctaccaaaagcggagcaaccgaggcaagaaaaaggggtgggcgaggaaaagcgattaggcttctcttccagttcctgattcagtctgaggtgagaaacaatggatatctgaagcatgaaaagtcaacccacctcactcttttaaacagctcggttaacacacttaatggctgcggtgtttgcatgacattctctttgagcttatatgggtggctgtattggtaatttaagcagatctcagtcacttccagattctaaaccgaagcgatctttgagaaagaaatatcaggattcatcgactggaaacagaagacgatggcaatcgggtctagaagcaatggagaagaatgttagcatatctgtttctcttgaggggaatatctcttctattcccaattcaatagccaacgactctaaaacgtcaatggaaaacaggctagatacatcatttatcaaccatgcggctgaagcatgggctgagatgagaagacaatgggttggacgccaggcagaagttctgagaaagaccccccgagagccagtgataagttggtccacaacatatgatgatctcttgtcgacaagtgagcgttttccacaacgaatcccattatctgagatggttgattttttggttgacatatggcacgaagaagggctctatgattagctgacctctgcctttctttacgccttgcttttagaatgtggtcaacttcctccccacaaaatatgtgaccttcagaagaaatgaaaaaactacatactctatgaattagtcgcaacatttgaattagtcgcaacatttgaaattgaaaaaaaaactctcatgtgaaaaggtacaacagtgggttggtatatttggtgatgagttgtcaacggtttcttcatgttgaaggactcgatgacctgtcattcctgaatgaacgattgcttaagaatataagggggaagggcatttttttctc

SEQ ID NO: 26212 - DNA, 3040 bp, Homo sapiens
  Clone ID: LIB4115-001-H8_FLI
cgcagcggccgaggagggaagacggcagtttggcgacatttctcggccgaagggccatttgcttttgcggagatgcggcattccaaaagaactcactgtcctgattgggatagcagagaaagctggggacatgaaagctatcgtggaagtcacaagcggaagaggagatctcatagtagcacacaagagaacaggcattgtaaaccacatcaccagtttaaagaatctgattgtcattatttagaagcaaggtccttgaatgagcgagattatcgggaccggagatacgttgacgaatacaggaatgactactgtgaaggatatgttcctagacattatcacagagacattgaaagcgggtatcgaatccactgcagtaaatcttcagtccgcagcaggagaagcagtcctaaaaggaagcgcaatagacactgttcaagtcatcagtcacgttcggtatgattggttttgttttcaatttgagtggagttttatttgtgtgtactcttaacgagctgataagtttctaattttttatatatatatatataaaatactatttggatatattataattgtatttatattacttaaatccttaaaggaaacctccaaattcttgtagctgatctgtatatttattagctagccctcatttgcccacatttcctcatattctgcagaccagataatgagtttattgattttaataataaaactatttttttatttgtaacatattcttatgaaaaaatcatgcacccatatcttttctttcatcttaagcattttttttttcttagaaaccctttatctggtacttgaaaataaatgtgaaatattgcactggtggacacctgaatgttactaacctgcatagagcatagttccatagtccagtgcatcattgtctgcaatgaattcttttgaagttgtgaaaatgggtgctgaatgggaaacatccaaaaagtctgcccccccctttttttttttaacactcagacatcttcacctgcttgaacagtgaactttgaattagtttctccccaagttttcttcagtaaaactagtttttattagattgaacattgaaattaactagcctttattttccccttttattttaatcatgtatattttaaaatattgctaaattagaataatttcaaatagtcttgacattttaaaacatttttctgaaaaactagacatctcaattcacagcatatgctgtttatagcaagagataagtaaatcatgacattgcattctttaaatttcagacttcaattaaatcagtattttaaagagacaattgtgttgtttttttctattgccactttaagtatcttatctgaaaatctgttccttgccatgtttttcttctgtaacataaactgtgccctgtgaatttctggggactgaatttgaaattgctcctgccaactgttcgtggcctggtgcttatctgaatgcctgaatatctccccgctgaatgaattgcgtattctgccctgaattcactctgatatattgattggctggacgatcttggtgctgcccacttgccgttccagaagagccaccgaaggaaaagatccaggagtatagaggatgatgaggagggtcacctgatctgtcaaagtggagacgttctaagagcaagatgtatagaatatttttcaacactttttaaactttgcagaaagaataatctttttaagaatagtttgtcagcggggggctaaagaactcttcattgcttttttattttgctttttgtgggtttgtttgttcttttatatttcttcttttctgtagaatttaaatatttctattctaaagttccaaaataatcagtggaatttgagattagagcaagaaagatagctctatctaattgtttttgtagcagctgaaactaaaataatttgagtgctgaaaccttagttatgctttgttagagatcatttgaaaatattccacacttaagcattcattgtttgaagaactagacagtttgtactcaggtacttacacctctttttccctcctcactctagatgaaatcgtggacactttgggtgaaggagcctttggcaaagttgtagagtgcattgatcatggcatggatggcatgcatgtagcagtgaaaatcgtaaaaaatgtaggccgttaccgtgaagcagctcgttcagaaatccaagtattagagcacttaaatagtactgatcccaatagtgtcttccgatgtgtccagatgctagaatggtttgatcatcatggtcatgtttgtattgtgtttgaactactgggacttagtacttacgatttcattaaagaaaacagctttctgccatttcaaattgaccacatcaggcagatggcgtatcagatctgccagtcaataaattttttacatcataataaattaacccatacagatctgaagcctgaaaatattttgtttgtgaagtctgactatgtagtcaaatataattctaaaatgaaacgtgatgaacgcacactgaaaaacacagatatcaaagttgttgactttggaagtgcaacgtatgatgatgaacatcacagtactttggtgtctacccggcactacagagctcccgaggtcattttggctttaggttggtctcagccttgtgatgtttggagcataggttgcattcttattgaatattaccttggtttcacagtctttcagactcatgatagtaaagagcacctggcaatgatggaacgaatattaggacccataccacaacacatgattcagaaaacaagaaaacgcaagtattttcaccataaccagctagattgggatgaacacagttctgctggtagatatgttaggagacgctgcaaaccgttgaaggaatttatgctttgtcatgatgaagaacatgagaaactgtttgacctggttcgaagaatgttagaatatgatccaactcaaagaattaccttggatgaagcattgcagcatcctttctttgacttattaaaaaagaaatgaaatggg

SEQ ID NO: 26213 - DNA, 1949 bp, Homo sapiens
  Clone ID: LIB4115-003-B2_FLI
gaaaggcagaaaccaggaaagctaagacaaacaaaactacaatggaagaagaaaacgtcctcaactagacatctgccaaaaatgaacatgagcagctgacctactcttccacaaggtccaaagcccccagtgtcatcatcacaggtcttaagccagccaccaaatatgtatttcacatccgagtgagaactgcgacaggatacagtggctacagtcagaaatttgaatttgaaacaggagatgaaacttctgacatggcagcagaacaaggacagattctcgtgatagccaccgccgctgttggcggattcactctcctcgtcatcctcactttattcttcttgatcactgggagatgtcagtggtacataaaagccaagatgaagtcagaagagaagagaagaaaccacttacagaatgggcatttgcgcttcccgggaattaaaacttacattgatccagatacatatgaagacccatccctagcagtccatgaatttgcaaaggagattgatccctcaagaattcgtattgagagagtcattggggcaggtgaatttggagaagtctgtagtgggcgtttgaagacaccagggaaaagagagatcccagttgccattaaaactttgaaaggtggccacatggatcggcaaagaagagattttctaagagaagctagtatcatgggccagtttgaccatccaaacatcattcgcctagaaggggttgtcaccaaaagatccttcccggccattggggtggaggcgttttgccccagcttcctgagggcagggtttttaaatagcatccaggccccgcatccagtgccagggggaggatctttgccccccaggattcctgctggcagaccagtaatgattgtggtggaatatatggagaatggatccctagactcctttttgcggaagcatgatggccacttcacagtcatccagttggtcggaatgctccgaggcattgcatcaggcatgaagtatctttctgatatgggttatgttcatcgagacctagcggctcggaatatactggtcaatagcaacttagtatgcaaagtttctgattttggtctctccagagtgctggaagatgatccagaagctgcttatacaacaactggtggaaaaatccccataaggtggacagccccagaagccatcgcctacagaaaattctcctcagcaagcgatgcatggagctatggcattgtcatgtgggaggtcatgtcctatggagagagaccttattgggaaatgtctaaccaagatgtcattctgtccattgaagaagggtacagacttccagctcccatgggctgtccagcatctctacaccagctgatgctccactgctggcagaaggagagaaatcacagaccaaaatttactgacattgtcagcttccttgacaaactgatccgaaatcccagtgcccttcacaccctggtggaggacatccttgtaatgccagagtcccctggtgaagttccggaatatcctttgtttgtcacagttggtgactggctagattctataaagatggggcaatacaagaataacttcgtggcagcagggtttacaacatttgacctgatttcaagaatgagcattgatgacattagaagaattggagtcatacttattggacaccagagacgaatagtcagcagcatacagactttacgtttacacatgatgcacatacaggagaagggatttcatgtatgaaagtaccacaagcacctgtgttttgtgcctcagcatttctaaaatgaacgatatcctctctactactctctcttctgattctccaaacatcacttcacaaactgcagtcttctgttcagactataggcacacaccttatgtttatgcttccaaccaggattttaaaatcatgctacataaatccgttctgaataacctgcccct

SEQ ID NO: 26214 - DNA, 1254 bp, Homo sapiens
  Clone ID: LIB4115-010-A12_FLI
ctcagagctgggcgcgggcaacggcggggtggtcaccaaagtccagcacagaccctcgggcctcatcatggccaggaagctgatccaccttgagatcaagccggccatccggaaccagatcatccgcgagctgcaggtcctgcacgaatgcaactcgccgtacatcgtgggcttctacggggccttctacagtgacggggagatcagcatttgcatggaacacatggacggcggctccctggaccaggtgctgaaagaggccaagaggattcccgaggagatcctggggaaagtcagcatcgcggttctccggggcttggcgtacctccgagagaagcaccagatcatgcaccgagatgtgaagccctccaacatcctcgtgaactctagaggggagatcaagctgtgtgacttcggggtgagcggccagctcatagactccatggccaactccttcgtgggcacgcgctcctacatggctccggagcggttgcagggcacacattactcggtgcagtcggacatctggagcatgggcctgtccctggtggagctggccgtcggaaggtaccccatccccccgcccgacgccaaagagctggaggccatctttggccggcccgtggtcgacggggaagaaggagagcctcacagcatctcgcctcggccgaggccccccgggcgccccgtcagcggtcacgggatggatagccggcctgccatggccatctttgaactcctggactatattgtgaacgagccacctcctaagctgcccaacggtgtgttcacccccgacttccaggagtttgtcaataaatgcctcatcaagaacccagcggagcgggcggacctgaagatgctcacaaaccacaccttcatcaagcggtccgaggtggaagaagtggattttgccggctggttgtgtaaaaccctgcggctgaaccagcccggcacacccacgcgcaccgccgtgtgacagtggccgggctccctgcgtcccgctggtgacctgcccaccgtccctgtccatgccccgcccttccagctgaggacaggctggcgcctccacccaccctcctgcctcacccctgcggagagcaccgtggcggggcgacagcgcatgcaggaacgggggtctcctctcctgcccgtcctggccggggtgcctctggggacgggcgacgctgctgtgtgtggtctcagaggctctgcttccttaggttacaaaacaaaacagggagagaaaaagca

SEQ ID NO: 26215 - DNA, 3859 bp, Homo sapiens
  Clone ID: LIB4115-013-G12_FLI
gtgcaaccctaacaaggccatcttcacggtggatgccaagaccacagagatcctggttgctaacgacaaagcttgcgggctcctggggtacagcagccaggacctgattggccagaagctcacgcagttctttctgaggtcagattctgatgtggtggaggccctcagcgaggagcacatggaggccgacggccacgctgcggtggtgtttggcacggtggtggacatcatcagccgtagtggggagaagattccagtgtctgtgtggatgaagaggatgcggcaggagcgccgcctatgctgcgtggtggtcctggagcccgtggagagggtctcgacctgggtcgctttccagagcgatggcaccgtcacgtcatgtgacagtctctttgctcatcttcacgggtacgtgtctggggaggacgtggctgggcagcatatcacagacctgatcccttctgtgcagctccctccttctggccagcacatcccaaagaatctcaagattcagaggtctgttggaagagccagggacggtaccaccttccctctgagcttaaagctgaaatcccaacccagcagcgaggaggcgaccaccggtgaggcggcccctgtgagcggctaccgggcatctgtctgggtgttctgcaccatcagtggcctcatcaccctcctgccggatgggaccatccacggcatcaaccacagcttcgcgctgacactgtttggttacggaaagacggagctcctgggcaagaatatcactttcctgattcctggtttctacagctacatggaccttgcgtacaacagctcattacagctcccagacctggccagctgcctggacgtcggcaatgagagtgggtgtggggagagaaccttggacccgtggcagggccaggacccagctgaggggggccaggatccaaggattaatgtcgtgcttgctggtggccacgttgtgccccgagatgagatccggaagctgatggaaagccaagacatcttcaccgggactcagactgagctgattgctggaggccagctcctttcctgcctctcacctcagcctgctccaggggtggacaatgtcccagaaggaagcctgccagtgcacggtgaacaggcgctgcccaaggaccagcaaatcactgccttggggagagaggaacctgtggcaatagagagccccggacaggatcttctgggagaaagcaggtctgaaccagtggatgtgaagccatttgcttcctgcgaagattctgaagctccagtcccagctgaggatgggggcagtgatgctggcatgtgtggcctgtgtcagaaggcccagctagagcggatgggagtcagtggtcccagcggttcagacctttgggctggggctgccgtggccaagccccaggccaagggtcagctggcggggggcagcctcctgatgcactgcccttgctatgggagtgaatggggcttgtggtggcgaagccaggacttggcccccagcccctctgggatggcaggcctctcgtttgggacacctactctagatgagccgtggctgggagtggaaaacgaccgagaagagctgcagacctgcttgattaaggagcagctgtcccagttgagccttgcaggagccctggatgtcccccacgccgaactcgttccgacagagtgccaggctgtcaccgctcctgtgtcgtcctgcgatctgggaggcagagacctgtgcggtggctgcacgggcagctcctcagcctgctatgccttggccacggacctccctgggggcctggaagcagtggaggcccaggaggttgatgtgaattcgttttcctggaacctcaaggaactctttttcagtgaccagacagaccaaacgtcatcaaattgttcctgtgctacgtctgaactcagagagacaccctcttccttggcagtgggctccgatccagatgtaggcagtctccaggaacaggggtcgtgtgtcctggatgacagggagctgttactactgaccggcacctgtgttgaccttggccaaggccgacggttccgggagagctgtgtgggacatgatccaacagaaccgcttgaggtttgtttggtgtcctctgagcattatgcagcaagcgacagagaaagcccaggacacgttccttccacgttggatgctggccctgaggacacgtgcccatcagcagaggagccaaggctgaacgtccaggtcacctccacgcccgtgatcgtgatgcgcggggctgctggcctgcagcgggagatccaggagggtgcctactccgggagctgctaccatcgagatggcttacggctgagtatacagtttgaggtgaggcgggtggagctccagggccccacacctctgttctgctgctggctggtgaaagacctcctccacagccaacgcgactcagccgccaggacccgcctgttccttgccagcctgcccggctccacccactctaccgctgctgagctcaccggacccagcctggtggaagtgctcagagccagaccctggtttgaggagccccccaaggctgtggaactggaggggttggcggcctgtgagggcgagtactcccaaaagtacagtaccatgagcccgctgggcagtggggccttcggcttcgtgtggactgctgtggacaaggaaaaaaacaaggaggtggtggtgaagtttattaagaaggagaaggtcttggaggattgttggattgaggatcccaaacttgggaaagttactttagagatcgcaattctatccagggtggagcacgccaatatcatcaaggtattggatatatttgaaaaccaagggttcttccagcttgtgatggagaagcacggctccggcctagacctcttcgctttcatcgaccgccaccccaggctggatgagcccctggcgagctacatcttccgacaactagtgtcagcagtgggatacctgcgcttgaaggacatcatccaccgtgacatcaaggatgagaacatcgtgatcgccgaggacttcacaatcaagctgatagactttggctcggccgcctacttggaaaggggaaaattattttatactttttgtgggaccatcgagtactgtgcaccggaagttctcatggggaatccctacagagggccggagctggagatgtggtctctgggagtcactctgtacacgctggtctttgaggagaaccccttctgtgagctggaggagaccgtggaggctgccatacacccgccatacctggtgtccaaagaactcatgagccttgtgtctgggctgctgcagccagtccctgagagacgcaccaccttggagaagctggtgacagacccgtgggtaacacagcctgtgaatcttgctgactatacatgggaagaggtgtttcgagtaaacaagccagaaagtggagttctgtccgctgcgagcctggagatggggaacaggagcctgagtgatgtggcccaggctcaggagctttgtgggggccccgttccaggcgaggctcctaatggccaaggctgtttgcatcccggggatccccgtctgctgaccagctaaacaccaatttcttcctgcttttctccacttggtttggaaaatcacacagttttcaggctccatctgtttggagaaaatacattctgaagcatccccaattcaccttctaaaaactcatgtgcaggtttgataaacaccagaacagaagacagtgatgctgtattattttagatttattacatagatttggaattcacttttttcatgacctagaaaaaaacattccagtgttcaactgttttatattattaaagggcttttaatttg

SEQ ID NO: 26216 - DNA, 1879 bp, Homo sapiens
  Clone ID: LIB4117-004-F7_FLI
gtttgttgactctgctgctctggaatctgcatttcttgccaagaactttaagaataggtttagaacaccagtgttacttcactcccctttgtggacaccaaggggaagaagaatacggtaagcttcccacacattagcaagaaagtcctgctgaagtcatccctgctgtatcaggagaatcaagctcacaatcagatgccggcctcagagctcaaggcttcagaaatacctttccaccctagcattaaaacccaggatcccaaggcagaggagaagtcaccaaagaagcaaaaggtgactctgacagcggcagaggccctaaagctttttaagaaccagctgtctccatatgaacaaagtgaaatcctgggctacgcggagctgtggttcctgggtcttgaagccaagaagctcgacacggctcctgagaaatttagcaagacgagttttgatgatgagcatggcttctatctgaaggttctgcatgatcacattgcctaccgctatgaagttctggagacaatcgggaaggggtcctttggacaggtggccaagtgcttggatcacaaaaacaatgagctggtggccctgaaaatcatcaggaacaagaagaggtttcaccagcaggccctgatggagctgaagatcctggaagctctcagaaagaaggacaaagacaacacctacaatgtggtgcatatgaaggactttttctactttcgcaatcacttctgcatcacctttgagctcctgggaatcaacttgtatgagttgatgaagaataacaactttcaaggcttcagtctgtccatagttcggcgcttcactctctctgttttgaagtgcttgcagatgctttcggtagagaaaatcattcactgtgatctcaagcccgaaaatatagtgctataccaaaagggccaagcctctgttaaagtcattgactttggatcaagctgttatgaacaccagaaagtatacacgtacatccaaagccggttctaccgatccccagaagtgatcctgggccacccctacgacgtggccattgacatgtggagcctgggctgcatcacggcggagttgtacacgggctaccccctgttccccggggagaatgaggtggagcagctggcctgcatcatggaggtgctgggtctgccgccagccggcttcattcagacagcctccaggagacagacattctttgattccaaaggttttcctaaaaatataaccaacaacagggggaaaaaaagatacccagattccaaggacctcacgatggtgctgaaaacctatgacaccagcttcctggactttctcagaaggtgtttggtatgggaaccttctcttcgcatgaccccggaccaggccctcaagcatgcttggattcatcagtctcggaacctcaagccacagcccaggccccagaccctgaggaaatccaattcctttttcccctctgagacaaggaaggacaaggttcaaggctgtcatcactcgagcagaaaagcagatgagatcaccaaagagactacagagaaaacaaaagatagccccacgaagcatgttcagcattcaggtgatcagcaggactgtctccagcacggagctgacactgttcagctgcctcaactggtagacgctcccaagaagtcagaggcagctgtcggggcggaggtgtccatgacctccccaggacagagcaaaaacttctccctcaagaacacaaacgttttaccccctattgtatgacctttgctgagggtatgtcctgctcctttccaccagtgatttgtattaagacagcacttatattgtacaatacttcagactgttttttttaaatacataaaactttatgttaaaaaactct

SEQ ID NO: 26217 - DNA, 2936 bp, Homo sapiens
  Clone ID: LIB4117-012-G11_FLI
agaatagcacaggaaagactggcccccatgattcaattacctcccccgggtccctcccacaacacatgggaattctgagagataccatttaagttgagatttcagtggggacacagccaaaccatatcattctacccctggcacctccaaatctcatgtcctcacatttcaaaaccaatcatgccttcccaacagtcccccaaagtcttaactcatttcagcattaacccaaaagtccgcagtccaaagtttcatctgagacaaggcaagtcccttccacttatgaacctgtaaaatcaaaagtaaactagttacttcctagatacaatgggggtacaggtattgggtaaatacagccattccaaatgggagaaattggccaacacaaaagggtaacagggcccatgcaagtccaaaattcagcagggcagtcaaattttaaacctccaaaatgatcacctttgactccacgtctcacaatcatctctctcaagttcgaagttccacaaatctctaaggcaagggaaagatgctgccagtctctttgctaaaacacagcaagagtcacctttactccagttcccaacaagtttttcatctccatctgagaccacctcagcctgaattttattgtcaatattgctatcagcattttgggcaaagccattcagcaagtatctaggaagttccaaactttcccacattttcctgtcttcttctgagcccttcaaactgttccaacctctgcctgttacccagttccaaacttgctttcatatttttggctatcttttcagcaatgccccactctactgttagcagtttactgtattagtctgttttcacactgctgataaagacattcctcaagattgtgaagaaaaagaggtttaattggactcacagttccacatggccggggaggcctcagaatcatggcgggaggtgaaaagcacttcgtacatggtggtggcaagagaaaatgaagaagaagcaaaagtggaaacccctgataaacccatcagatctcatgagacttactatcatgagaatagcacaggaaagactggcccccctgattcgatgacctccccctgggtccctcccacaacatgtgggaattccagaagataaattcaagttgcaatttcagtggggacatagccaaaccatatcactggtgatgccacttcttcagtattagggattctcagtcagaagagaccccctgtgtggcctgagtcccctcaggaggaaggtggacaacagagaaatgagagttttgatattttctgaaagaggaacatgtgttagagatgaagaatcttccaaggctcatgcagttgcttagaataatcattactgttatatgagaaacattttagtaatttaataaaaggataatgtttatttaaaaaacctgacttttccagagtaattttgttttgcacattcatgtttattgaagtggactaatttctataatgcaaatcagagttaaatattaaaaattgtgtaaatacaattgacataggaattacattaaaatattaggaagaaacaaggacaaatttagaccttgaatccgaagagataaagcttacttgactttcaaatggagagatgatgaaaacccactcattcagtctttcagaacaaaaagacagtcatctgataagagtatgacatggatgaaatgccctacaggggccttggacatctttaatttctgcgattatgtgaaagaggtggactttacagataatggagcagaagccaacattagtaaaaggaatcccaacttcttcccatagaattagaaacatgtgaaagtacaataaacttcttgttcaaattaccagcatcagagagcttcccatttgcatctagaccttgaatttatatttattgatcaagttctaatttgtatgtatattttgtgcatattcaccaataacagttaaaattaattatgtgttatagttaatatatgcacctaccttcttccgttagtgcatcagtaaatgtgttattttgtcatttttccaaagagagtgttgtaggttttccctgtagttcttcctttatagcttttcttctgataaccatgacttcaggagctttaaaactatctatcttgcatttgtgtctggcggagaactagccatcagcctcctgaagcctgccatcattgttaatttgaggactgggctgtcttggggctcagaaggtaaagaactatttgagcagatgtgtgtgggtggcactggattccacccaactgccaagttagtattgttagagatttccttttacaacacaaaaataagcctgtgtcaaagattttaaaatcatggaaagttaaaatctagaaagaccttagagaaccagccaaccaactctctcattttaaaagtgaaggattcatagcacagattacttgcctaagatcatccaggaacgaagacaagaatccaaatgtacttggggacaagaattagtccccaaattcagtgttcttcctagtattaaacattgcccctttcgacaaattttggatttcattcttgttatatttcagtactcttgctgatttattttaggtttaactggtaaagaatgaacatttcagaagtgttaggattagtcagtgtcatcgcttatgtatatgaatcacttgccaaagacactggctctcctcagctgtaaccagcatgtcaaatgtgaagattattgtgtgggatcctttggtttcattgttatgatgtattttataaatgtactagttatatccttgtttatgtatttttgctgatctttcataaagcagaatggtatgtatcggattgttttaatgttatatattggattgtattcgttgttacaaaaccaatattctatggagaatgaaaaaaataaaggactaaattaactgg

SEQ ID NO: 26218 - DNA, 4438 bp, Homo sapiens
  Clone ID: LIB4117-013-G9_FLI
ctttggaaacagccactggtggctttgtcttgttgtatgagtgggtccttcagtggcagaaaaaaatgggtccattccttaccagtcaagaaaaagagaagattgataagtgcaaaaagcagattcaaggaacagaaacagaattcaactcactggtaaaattgagccatccaaatgtagtacgctaccttgcaatgaatctcaaagagcaagacgactccatcgtggtggacattttagtggagcacattagtggggtctctcttgctgcacacctgagccactcaggccccatccctgtgcatcagcttcgcaggtacacagctcagctcctgtcaggccttgattatctgcacagcaattctgtggtgcataaggtcctgagtgcatctaatgtcttggtggatgcagaaggcaccgtcaagattacggactatagcatttctaagcgcctcgcagacatttgcaaggaggatgtgtttgagcaaacccgagttcgttttagtgacaatgctctgccttataaaacggggaagaaaggagatgtttggcgtcttggccttctgctgctgtccctcagccaaggacaggaatgtggagagtaccctgtgaccatccctagtgacttaccagctgactttcaagattttctaaagaaatgtgtgtgcttggatgacaaggaaagatggagtccccagcagttgttgaaacacagctttataaatccccagccaaaaatgcctctagtggaacaaagtcctgaagattctggaggacaagattatgttgagactgttattcctagcaaccggctacccagtgctgccttctttagtgagacacagagacagttttcccgatacttcattgagtttgaagaattacaacttcttggtaaaggagcttttggagctgtcatcaaggtgcagaacaagttggacggctgctgctacgcagtgaagcgcatccccatcaacccggccagccggcagttccgcaggatcaagggcgaagtgacactgctgtcacggctgcaccatgagaacattgtgcgctactacaacgcctggatcgagcggcacgagcggccggcgggaccggggacgccgcccccggactccgggcccctggccaaggatgaccgagctgcacgcgggcagccggcgagcgacacagacggcctggacagcgtagaggccgccgcgccgccacccatcctcagcagctcggtggagtggagcacttcgggcgagcgctcggccagtgcccgtttccccgccaccggcccgggctccagcgatgacgaggacgacgacgaggacgagcacggtggcgtcttctcccagtccttcctgcctgcttcagattctgaaagtgatattatctttgacaatgaagatgagaacagtaaaagtcagaatcaggatgaagattgcaatgaaaagaatggctgccatgaaagtgagccatcagtgacgactgaggctgtgcactacctatacatccagatggagtactgtgagaagagcactttacgagacaccattgaccagggactgtatcgagacaccgtcagactctggaggctttttcgagagattctggatggattagcttatatccatgagaaaggaatgattcaccgggatttgaagcctgtcaacatttttttggattctgatgaccatgtgaaaataggtgattttggtttggcgacagaccatctagccttttctgctgacagcaaacaagacgatcagacaggagacttgattaagtcagacccttcaggtcacttaactgggatggttggcactgctctctatgtaagcccagaggtccaaggaagcaccaaatctgcatacaaccagaaagtggatctcttcagcctgggaattatcttctttgagatgtcctatcaccccatggtcacggcttcagaaaggatctttgttctcaaccaactcagagatcccacttcgcctaagtttccagaagactttgacgatggagagcatgcaaagcagaaatcagtcatctcctggctgttgaaccacgatccagcaaaacggcccacagccacagaactgctcaagagtgagctgctgcccccaccccagatggaggagtcagagctgcatgaagtgctgcaccacacgctgaccaacgtggatgggaaggcctaccgcaccatgatggcccagatcttctcgcagcgcatctcccctgccatcgattacacctatgacagcgacatactgaagggcaacttctcaatccgtacagccaagatgcagcagcatgtgtgtgaaaccatcatccgcatctttaaaagacatggagctgttcagttgtgtactccactactgcttccccgaaacagacaaatatatgagcacaacgaagctgccctattcatggaccacagcgggatgctggtgatgcttccttttgacctgcggatcccttttgcaagatatgtggcaagaaataatatattgaatttaaaacgatactgcatagaacgtgtgttcaggccgcgcaagttagatcgatttcatcccaaagaacttctggagtgtgcatttgatattgtcacttctaccaccaacagctttctgcccactgctgaaattatctacactatctatgaaatcatccaagagtttccagcacttcaggaaagaaattacagtatttatttgaaccataccatgttattgaaagcaatactcttacactgtgggatcccagaagataaactcagtcaagtctacattattctgtatgatgctgtgacagagaagctgacgaggagagaagtggaagctaaattttgtaatctgtctttgtcttctaatagtctgtgtcgactctacaagtttattgaacagaagggagatttgcaagatcttatgccaacaataaattcattaataaaacagaaaacaggtattgcacagttggtgaagtatggcttaaaagacctagaggaggttgttggactgttgaagaaactcggcatcaagttacaggtcttgatcaatttgggcttggtttacaaggtgcagcagcacaatggaatcatcttccagtttgtggctttcatcaaacgaaggcaaagggctgtacctgaaatcctcgcagctggaggcagatatgacctgctgattccccagtttagagggccacaagctctggggccagttcccactgccattggggtcagcatagctatagacaagatatctgctgctgtcctcaacatggaggaatctgttacaataagctcttgtgacctcctggttgtaagtgttggccagatgtctatgtccagggccatcaacctaacccagaaactctggacagcaggcatcacagcagaaatcatgtacgactggtcacagtcccaagaggaattacaagagtactgcagacatcatgaaatcacctatgtggcccttgtctcggataaagaaggaagccatgtcaaggttaagtctttcgagaaggaaaggcagacagagaagcgtgtgctggagactgaacttgtggaccatgtactgcagaaactgaggactaaagtcactgatgaaaggaatggcagagaagcttccgataatcttgcagtgcaaaatctgaaggggtcattttctaatgcttcaggtttgtttgaaatccatggagcaacagtggttcccattgtgagtgtgctagccccggagaagctgtcagccagcactaggaggcgctatgaaactcaggtacaaactcgacttcagacctcccttgccaacttacatcagaaaagcagtgaaattgaaattctggctgtggatctacccaaagaaacaatattacagtttttatcattagagtgggatgctgatgaacaggcatttaacacaactgtgaagcagctgctgtcacgcctgccaaagcaaagatacctcaaattagtctgtgatgaaatttataacatcaaagtagaaaaaaaggtgtctgtgctatttctgtacagctatagagatgactactacagaatcttattttaaccctaaagaactgtcgttaacctcattcaaacagacagaggcttatactggaataatggaatgttgtacattcatcataatttaaaattaaattctaagaagaggctgggtgcagtggctcacacctttaatcccagcactttgggaagccaaggcaggaagactgcttgaaaccaggagtttgagaccagcctgagcaacaaagcaagaccccatctctataaaaactaaaaaaattagttgggcatggtggcacatgcctgtagtcccagctactccagaggctgagatggatcatctgagcctcaggaggttgaggctgcagtgagctgtgactgcgccactgcactccagtctgggacaacagagcaagaccctgtctt

SEQ ID NO: 26219 - DNA, 977 bp, Homo sapiens
  Clone ID: LIB4118-021-A9_FLI
gcaaaagtttgctgcaggggcagggccctcatggagaacctttgctagagcaaactggaaggaaggaaaatgtgggtttggagcccccacacagagttcctagtgggcactgcctagtgcagctatgagaagagggccaccatctttcagaccccagaatggtagatccactgacagcttgcactgtgttgctggaaaagctgcagacactcaatgccagcctgtgaaagcagctgggtgagggctgaatcctacaaagccataggggcagagctgcccaagaccatgggaacccatctcttgcatcagtgtgatgtggctgtgagacctggagtcaaaggagatcattttggagctttaaaatttgactgcctcactgaacttcagacttgcatgggccctataacccctttgttttggcctatctctctttcggaatggctgtatttacccaatacctgtacttccattgtatctaggaagtaactagctttcttttgattttacaggctcataggtagaagggacttgccttgtctcagatgagacttttgactggatttttgggttaatgctgaaatgagttaagattttgggggactgttgggaaggcatgattagttttgaaaagtgaggacacgagatttggaggggccaggggcagaatgatgtggtttggctgtgtccccacccaaatctcaacttgaattttatctcccagaattcccacatgttgtgggaggggtccagggggaggtaattgaatcatgagggccaggccttcccatgctattcttgtgatagtgaataagtctcacgagatctaatgggtttatcaggggtttccgcttttgcttcttcctcatttttctcttgccaccaccatataaaaagtgcctttcacctcctgccatgattctgacacctccccagccatgtggaactgtaagtgcaattaaacctcttttggttcccag

SEQ ID NO: 26220 - DNA, 1018 bp, Homo sapiens
  Clone ID: LIB4118-027-G4_FLI
gaagaacatgccagattttactctgcagaaatcagtctagcattaaattatcttcatgagcgagggataatttatagagatttgaaactggacaatgtattactggactctgaaggccacattaaactcactgactacggcatgtgtaaggaaggattacggccaggagatacaaccagcactttctgtggtactcctaattacattgctcctgaaattttaagaggagaagattatggtttcagtgttgactggtgggctcttggagtgctcatgtttgagatgatggcaggaaggtctccatttgatattgttgggagctccgataaccctgaccagaacacagaggattatctcttccaagttattttggaaaaacaaattcgcataccacgttctctgtctgtaaaagctgcaagtgttctgaagagttttcttaataaggaccctaaggaacgattgggttgtcatcctcaaacaggatttgctgatattcagggacacccgttcttccgaaatgttgattgggatatgatggagcaaaaacaggtggtacctccctttaaaccaaatatttctggggaatttggtttggacaactttgattctcagtttactaatgaacctgtccagctcactccagatgacgatgacattgtgaggaagattgatcagtctgaatttgaaggttttgagtatatcaatcctcttttgatgtctgcagaagaatgtgtctgatcctcatttttcaaccatgtattctactcatgttgccatttaatgcatggataaacttgctgcaagcctggatacaattaaccattttatatttgccacctacaaaaaaacacccaatatcttctcttgtagactatatgaatcaattattacatctgttttactatgaaaaaaaaattaatactactagcttccagacaatcatgtcaaaatttagttgaactggtttttcagtttttaaaaggcctacagatgagtaatgaagttatcttttttgttt

SEQ ID NO: 26221 - DNA, 1246 bp, Homo sapiens
  Clone ID: LIB4118-101-H1_FLI
tcgcccttttcggctggagtcgggctttacggcgccggatggctctggacgtgaagtctcgggcaaagcgttatgagaagctggacttccttggggagggacagtttgccaccgtttacaaggccagagataagaacaccaaccaaattgtcgccattaagaaaatcaaacttggacatagatcagaagctaaagatggtataaatagaaccgccttaagagagataaaattattacagaagctaagtcatccaaatataattggtctccttgatgcttttggacataaatctaatattagccttgtctttgattttatggaaactgatctagaggttataataaaggataatagtcttgtgctgacaccatcacacatcaaagcctacatgttgatgactcttcaaggattagaatatttacatcaacattggatcctacatagggatctgaaaccaaacaacttgttgctagatgaaaatggagttctaaaactggcagattttggcctggccaaatcttttgggagccccaatagagcttatacacatcaggttgtaaccaggtggtatcgggcccccgagttactatttggagctaggatgtatggtgtaggtgtggacatgtgggctgttggctgtatattagcagagttacttctaagggttccttttttgccaggagattcagaccttgatcagctaacaagaatatttgaaactttgggcacaccaactgaggaacagtggccggacatgtgtagtcttccagattatgtgacatttaagagtttccctggaatacctttgcatcacatcttcagtgcagcaggagacgacttactagatctcatacaaggcttattcttatttaatccatgtgctcgaattacggccacacaggcactgaaaatgaagtatttcagtaatcggccagggccaacacctggatgtcagctgccaagaccaaactgtccagtggaaaccttaaaggagcaatcaaatccagctttggcaataaaaaggaaaagaacagaggccttagaacaaggaggattgcccaagaaactaattttttaaagagaacactggacaacattttactactgagggaaatagccaaaaaggcaaataatggaaaaatagtaaacattaagtaaatgctgtagaagtgagtttgtaaatattctacacatgtaaaatatgtaaaactatgggttatttttattaaatgtattttaaaatgt

SEQ ID NO: 26222 - DNA, 1286 bp, Homo sapiens
  Clone ID: LIB4118-109-E6_FLI
gtaaatgaggacaatgcctgctggcccacatgacggggggatgtagacggcagcggcgccagtcgctcctggcaccatggacgatgccacagtcctaaggaagaagggttacatcgtaggcatcaatcttggcaagggttcctacgcaaaagtcaaatctgcctactctgagcgcctcaagttcaatgtggctgtcaagatcatcgaccgcaagaaaacacctactgactttgtggagagattccttcctcgggagatggacatcctggcaactgtcaaccacggctccatcatcaagacttacgagatctttgagacctctgacggacggatctacatcatcatggagcttggcgtccagggcgacctcctcgagttcatcaagtgccagggagccctgcatgaggacgtggcacgcaagatgttccgacagctctcctccgccgtcaagtactgccacgacctggacatcgtccaccgggacctcaagtgcgagaaccttctcctcgacaaggacttcaacatcaagctgtctgactttggcttctccaagcgctgcctgcgggacagcaatgggcgcatcatcctcagcaagaccttctgcgggtcggcagcatatgcagcccccgaggtgctgcagagcatcccctaccagcccaaggtgtatgacatctggagcctgggcgtgatcctgtacatcatggtctgcggctccatgccctatgacgactccgacatcaggaagatgctgcgtatccagaaggagcaccgtgtggacttcccgcgctccaagaacctgacctgcgagtgcaaggacctcatctaccgcatgctgcagcccgacgtcagccagcggctccacatcgatgagatcctcagccactcgtggctgcagccccccaagcccaaagccacgtcttctgcctccttcaagagggagggggagggcaagtaccgcgctgagtgcaaactggacaccaagacaggcttgaggcccgaccaccggcccgaccacaagcttggagccaaaacccagcaccggctgctggtggtgcccgagaacgagaacaggatggaggacaggctggccgagacctccagggccaaagaccatcacatctccggagctgaggtggggaaagcaagcacctagcatgacaatggccccgttgtgtgtggtgggggtcggggttggggggcatggtgcagtcggccttcacgtaaactaagtaggcaggtaggatctgaagaaggcacaggtgcaagtaaaattcgtcaattaaacc

SEQ ID NO: 26223 - DNA, 890 bp, Homo sapiens
  Clone ID: LIB4118-140-F2_FLI
aacatgaacacgatccgcacgtaccaggtgtgcaacgtgtttgagtcaagccagaacaactggctacggaccaagtttatccggcgccgtggcgcccaccgcatccacgtggagatgaagttttcggtgcgtgactgcagcagcatccccagcgtgcctggctcctgcaaggagaccttcaacctctattactatgaggctgactttgactcggccaccaagaccttccccaactggatggagaatccatgggtgaaggtggataccattgcagccgacgagagcttctcccaggtggacctgggtggccgcgtcatgaaaatcaacaccgaggtgcggagcttcggacctgtgtcccgcagcggcttctacctggccttccaggactatggcggctgcatgtccctcatcgccgtgcgtgtcttctaccgcaagtgcccccgcatcatccagaatggcgccatcttccaggaaaccctgtcgggggctgagagcacatcgctggtggctgcccggggcagctgcatcgccaatgcggaagaggtggatgtacccatcaagctctactgtaacggggacggcgagtggctggtgcccatcgggcgctgcatgtgcaaagcaggcttcgaggccgttgagaatggcaccgtctgccgagagagacaggatctcactatgttgtccaggctggtcttgaactcgtggccacaaatgatcctcccacctcagcctcccaaagtgttggaattataggcatgaaccaccatgcccaggaggagaatttttgataataatattttgtggacatctttgcatatcatgtcagagctataacatcattgtggagaagctcttaggatcccatagaataaatgtaccgtaatttattt

SEQ ID NO: 26224 - DNA, 3195 bp, Homo sapiens
  Clone ID: LIB4118-152-A2_FLI
ggcggtgcagggcggggagcacacccctgcgaagtgccgggcaccctttgggcggctcccgccggcgagctggacagcggcgcgcgccaggcgtggctttctcggccggtgggctaggattggacgcagtagacaccatggccgagcctctgaaggaggaagacggcgaggacggctctgcggagccccccgggcccgtgaaggccgaacccgcccacaccgctgcctctgtagcggccaagaacctggccctgcttaaagcccgctccttcgatgtgacctttgacgtgggcgacgagtacgagatcatcgagaccataggcaacggggcctatggagtggtgtcctccgcccgccgccgcctcaccggccagcaggtggccatcaagaagatccctaatgctttcgatgtggtgaccaatgccaagcggaccctcagggagctgaagatcctcaagcactttaaacacgacaacatcatcgccatcaaggacatcctgaggcccaccgtgccctatggcgaattcaaatctgtctacgtggtcctggacctgatggaaagcgacctgcaccagatcatccactcctcacagcccctcacactggaacacgtgcgctacttcctgtaccaactgctgcggggcctgaagtacatgcactcggctcaggtcatccaccgtgacctgaagccctccaacctattggtgaatgagaactgtgagctcaagattggtgactttggtatggctcgtggcctgtgcacctcgcccgctgaacatcagtacttcatgactgagtatgtggccacgcgctggtaccgtgcgcccgagctcatgctctctttgcatgagtatacacaggctattgacctctggtctgtgggctgcatctttggtgagatgctggcccggcgccagctcttcccaggcaaaaactatgtacaccagctacagctcatcatgatggtgctgggtaccccatcaccagccgtgattcaggctgtgggggctgagagggtgcgggcctatatccagagcttgccaccacgccagcctgtgccctgggagacagtgtacccaggtgccgaccgccaggccctatcactgctgggtcgcatgctgcgttttgagcccagcgctcgcatctcagcagctgctgcccttcgccaccctttcctggccaagtaccatgatcctgatgatgagcctgactgtgccccgccctttgactttgcctttgaccgcgaagccctcactcgggagcgcattaaggaggccattgtggctgaaattgaggacttccatgcaaggcgtgagggcatccgccaacagatccgcttccagccttctctacagcctgtggctagtgagcctggctgtccagatgttgaaatgcccagtccctgggctcccagtggggactgtgccatggagtctccaccaccagccccgccaccatgccccggccctgcacctgacaccattgatctgaccctgcagccacctccaccagtcagtgagcctgccccaccaaagaaagatggtgccatctcagacaatactaaggctgcccttaaagctgccctgctcaagtctttgaggagccggctcagagatggccccagcgcacccctggaggctcctgagcctcggaagccggtgacagcccaggagcgccagcgggagcgggaggagaagcggcggaggcggcaagaacgagccaaggagcgggagaaacggcggcaggagcgggagcgaaaggaacggggggctggggcctctgggggcccctccactgaccccttggctggactagtgctcagtgacaatgacagaagcctgttggaacgctggactcgaatggcccggcccgcagccccagccctcacctctgtgccggcccctgccccagcgccaacgccaaccccaaccccagtccaacctaccagtcctcctcctggccctgtagcccagcccactggcccgcaaccacaatctgcgggctctacctctggccctgtaccccagcctgcctgcccaccccctggccctgcaccccaccccactggccctcctgggcccatccctgtccccgcgccaccccagattgccacctccaccagcctcctggctgcccagtcacttgtgccaccccctgggctgcctggctccagcaccccaggagttttgccttacttcccacctggcctgccgcccccagacgccgggggagcccctcagtcttccatgtcagagtcacctgatgtcaaccttgtgacccagcagctatctaagtcacaggtggaggaccccctgccccctgtgttctcaggcacaccaaagggcagtggggctggctacggtgttggctttgacctggaggaattcttaaaccagtctttcgacatgggcgtggctgatgggccacaggatggccaggcagattcagcctctctctcagcctccctgcttgctgactggctcgaaggccatggcatgaaccctgccgatattgagtccctgcagcgtgagatccagatggactccccaatgctgctggctgacctgcctgacctccaggacccctgaggcccccagcctgtgccttgctgccacagtagacctagttccaggatccatgggagcattctcaaaggctttagccctggacccagcagctctgaccgggagtcagctcctcggggataccatcccccgacctcaccttccacctaccgcagcctgctagcctttccgggagaaaaggcatccttacctctggttgaaggtctcggggcctccccctctgcatccggaccctctccccatcccagcctcccatgccaaggcccgccttgtcagtcacttccttttgtcatcggcttggcaaacgggagagaaaacagagcttcatgggaaacagcggcaacagttggtcccatacacctttccccaagttggagctaggcctggggccccagcccatggcgccccgggagctccctacctgctccatctgcctggagaggttgcgcgaccccatctcgctggactgtggccacgacttctgcatacggtgcttcagcacacaccgtctcccgggctgtgagccgccctgctgtcctgagtgccggaagatatgcaagcagaagaggggcctccggagcctgggcgagaagatgaagctcctgccgca

SEQ ID NO: 26225 - DNA, 2767 bp, Homo sapiens
  Clone ID: LIB4118-163-G11_FLI
ccccagcccgcagaggggacactgaggcccacggtaggtggtcctctcctcacccgagtctccacacagacaccatggccgagcctctgaaggaggaagacggcgaggacggctctgcggagccccccgggcccgtgaaggccgaacccgcccacaccgctgcctctgtagcggccaagaacctggccctgcttaaagcccgctccttcgatgtgacctttgacgtgggcgacgagtacgagatcatcgagaccataggcaacggggcctatggagtggtgtcctccgcccgccgccgcctcaccggccagcaggtggccatcaagaagatccctaatgctttcgatgtggtgaccaatgccaagcggaccctcagggagctgaagatcctcaagcactttaaacacgacaacatcatcgccatcaaggacatcctgaggcccaccgtgccctatggcgaattcaaatctgtctacgtggtcctggacctgatggaaagcgacctgcaccagatcatccactcctcacagcccctcacactggaacacgtgcgctacttcctgtaccaactgctgcggggcctgaagtacatgcactcggctcaggtcatccaccgtgacctgaagccctccaaccttattggtgaatgagaactgtgagctcaagattggtgactttggtatggctcgtggcctgtgcacctcgcccgctgaacatcagtacttcatgactgagtatgtggccacgcgctggtaccgtgcgcccgagctcatgctctctttgcatgagtatacacaggctattgacctctggtctgtgggctgcatctttggtgagatgctggcccggcgccagctcttcccaggcaaaaactatgtacaccagctacagctcatcatgatggtgctgggtaccccatcaccagccgtgattcaggctgtgggggctgagagggtgcgggcctatatccagagcttgccaccacgccagcctgtgccctgggagacagtgtacccaggtgccgaccgccaggccctatcactgctgggtcgcatgctgcgttttgagcccagcgctcgcatctcagcagctgctgcccttcgccaccctttcctggccaagtaccatgatcctgatgatgagcctgactgtgccccgccctttgactttgcctttgaccgcgaagccctcactcgggagcgcattaaggaggccattgtggctgaaattgaggacttccatgcaaggcgtgagggcatccgccaacagatccgcttccagccttctctacagcctgtggctagtgagcctggctgtccagatgttgaaatgcccagtccctgggctcccagtggggactgtgccatggagtctccaccaccagccccgccaccatgccccggccctgcacctgacaccattgatctgaccctgcagccacctccaccagtcagtgagcctgccccaccaaagaaagatggtgccatctcagacaatactaaggctgcccttaaagctgccctgctcaagtctttgaggagccggctcagagatggccccagcgcacccctggaggctcctgagcctcggaagccggtgacagcccaggagcgccagcgggagcgggaggagaagcggcggaggcggcaagaacgagccaaggagcgggagaaacggcggcaggagcgggagcgaaaggaacggggggctggggcctctgggggcccctccactgaccccttggctggactagtgctcagtgacaatgacagaagcctgttggaacgctggactcgaatggcccggcccgcagccccagccctcacctctgtgccggcccctgccccagcgccaacgccaaccccaaccccagtccaacctaccagtcctcctcctggccctgtagcccagcccactggcccgcaaccacaatctgcgggctctacctctggccctgtaccccagcctgcctgcccaccccctggccctgcaccccaccccactggccctcctgggcccatccctgtccccgcgccaccccagattgccacctccaccagcctcctggctgcccagtcacttgtgccaccccctgggctgcctggctccagcaccccaggagttttgccttacttcccacctggcctgccgcccccagacgccgggggagcccctcagtcttccatgtcagagtcacctgatgtcaaccttgtgacccagcagctatctaagtcacaggtggaggaccccctgccccctgtgttctcaggcacaccaaagggcagtggggctggctacggtgttggctttgacctggaggaattcttaaaccagtctttcgacatgggcgtggctgatgggccacaggatggccaggcagattcagcctctctctcagcctccctgcttgctgactggctcgaaggccatggcatgaaccctgccgatattgagtccctgcagcgtgagatccagatggactccccaatgctgctggctgacctgcctgacctccaggacccctgaggcccccagcctgtgccttgctgccacagtagacctagttccaggatccatgggagcattctcaaaggctttagccctggacccagcaggtgaggctcggcttggattattctgcaggttcatctcagacccacctttcagccttaagcagccacctgagccaccaccgagccatggcaggatcgggagaccccaactccccctgaacaatccttttcagtattatatttttattattatt

SEQ ID NO: 26226 - DNA, 2071 bp, Homo sapiens
  Clone ID: LIB4118-182-A12_FLI
cgcggtccccgcgggccttccgggcccactgcgccgcgcggaccgcctcgggctcggacggccggtgtccccggcgcgccgctcgcccggatcggccgcggcttcggcgcctggggctcggggctccggggaggccgtcgcccgcgatgctgctctccaagttcggctccctggcgcacctctgcgggcccggcggcgtggaccacctcccggtgaagatcctgcagccagccaaggcggacaaggagagcttcgagaaggcgtaccaggtgggcgccgtgctgggtagcggcggcttcggcacggtctacgcgggtagccgcatcgccgacgggctcccggtggctgtgaagcacgtggtgaaggagcgggtgaccgagtggggcagcctgggcggcgcgaccgtgcccctggaggtggtgctgctgcgcaaggtgggcgcggcgggcggcgcgcgcggcgtcatccgcctgctggactggttcgagcggcccgacggcttcctgctggtgctggagcggcccgagccggcgcaggacctcttcgactttatcacggagcgcggcgccctggacgagccgctggcgcgccgcttcttcgcgcaggtgctggccgccgtgcgccactgccacagctgcggggtcgtgcaccgcgacattaaggacgaaaatctgcttgtggacctgcgctccggagagctcaagctcatcgacttcggttcgggtgcgctgctcaaggacacggtctacaccgacttcgacggcacccgagtgtacagccccccggagtggatccgctaccaccgctaccacgggcgctcggccaccgtgtggtcgctgggcgtgcttctctacgatatggtgtgtggggacatccccttcgagcaggacgaggagatcctccgaggccgcctgctcttccggaggagggtctctccagagtgccagcagctgatccggtggtgcctgtccctgcggccctcagagcggccgtcgctggatcagattgcggcccatccctggatgctgggggctgacgggggcgccccggagagctgtgacctgcggctgtgcaccctcgaccctgatgacgtggccagcaccacgtccagcagcgagagcttgtgaggagctgcacctgactgggagctaggggaccacctgccttggccagacctgggacgcccccagaccctgactttttcctgcgtgggccgtctcctcctgcggaagcagtgacctctgacccctggtgaccttcgctttgagtgccttttgaacgctggtcccgcgggacttggttttctcaagctctgtctgtccaaagacgctccggtcgaggtcccgcctgccctgggtggatacttgaaccccagacgcccctctgtgctgctgtgtccggaggcggccttcccatctgcctgcccacccggagctctttccgccggcgcagggtcccaagcccacctcccgccctcagtcctgcggtgtgcgtctgggcacgtcctgcacacacaatgcaagtcctggcctccgcgcccgcccgcccacgcgagccgtacccgccgccaactctgttatttatggtgtgaccccctggaggtgccctcggcccaccggggctatttattgtttaatttatttgttgaggttatttcctctgagcagtctgcctctcccaagccccaggggacagtggggaggcaggggagggggtggctgtggtccagggaccccaggccctgattcctgtgcctggcgtctgtcctggccccgcctgtcagaagatgaacatgtatagtggctaacttaaggggagtgggtgaccctgacacttccaggcactgtgcccagggtttgggttttaaattattgactttgtacagtctgcttgtgggctctgaaagctggggtggggccagagcctgagcgtttaatttattcagtacctgtgtttgtgtgaatgcggtgtgtgcaggcatcgcagatgggggttctttcagttcaaaagtgagatgtctggagatcatatttttttatacaggtatttcaattaaaatgtttttgtacat

SEQ ID NO: 26227 - DNA, 2463 bp, Homo sapiens
  Clone ID: LIB4118-190-H1_FLI
ggccgatgtgtcgcccgcgaggggccggggtcggggccgccggggccatgcgcgcgggctgggcagggggccggcggggcgcagagcggagccgcctcggagcctgagccgcccggggccggggccggggagccgcgcggggccggccggccggggggaggggagcgatgcggcgccggcgggcggcagtggccgcgggtttctgcgcctccttcctgctgggctccgtcctcaacgtgctcttcgctccgggctcggagcctccgaggccaggccagtcccctgagccttcgccggccccgggtccgggccgtcgcgggggccgcggggagctggcccggcagatccgggcgcgctacgaggaggtgcagcgctattcccgcgggggccccgggcccggggcgggccggccggagcggcggcgcctgatggacctggctccgggcgggcccggcctgccgcgcccccggcccccttgggcccggcccctgtccgacggcgccccaggctggcccccggctcccggcccaggctcccccggcccgggcccgcggctgggctgcgccgcgcttcgcaacgtgtccggcgcgcagtacatgggctcaggctacaccaaggccgtgtaccgggtccgcctgcccggcggtgccgcggtggcgctcaaggcggtggactttagcggccacgatctgggcagctgcgtgcgcgagttcggggtacggaggggctgctatcggctggcggcccacaagctgcttaaggagatggtgctgctggagcggctgcggcaccccaacgtgctgcagctctatggctactgctaccaggacagcgaggacatcccagacaccctgaccaccatcacggagctgggcgcccctgtagaaatgatccagctgctgcaaacttcctgggaggatcgattccgaatctgcctgagcctgggccgcctcctccaccacctggcccactccccactgggctccgtcactctgctggacttccgccctcggcagtttgtgctggtggatggggagctcaaagtgacggacctggatgacgcacgtgtggaggagacgccgtgtgcaggcagcaccgactgcatactcgagtttccggccaggaacttcaccctgccctgctcagcccagggctggtgcgagggcatgaacgagaagcggaacctctataatgcctacaggtttttcttcacatacctcctgcctcacagtgccccgccttcactgcgtcctctgctggacagcatcgtcaacgccacaggagagctcgcctggggggtggacgagaccctggcccagctggagaaggtgctgcacctgtaccggagcgggcagtatctgcagaactccacggcaagcagcagtaccgagtaccagtgtatcccagacagcaccatcccccaggaagactaccgctgctggccatcctaccaccacgggagctgcctcctttcagtgttcaacctggctgaggctgtggatgtctgtgagagccatgcccagtgtcgggcctttgtggtcaccaaccagaccacctggacaggtcggcagctggtctttttcaagactggatggagccaagtggtccctgatcccaacaagaccacatatgtgaaggcctctggctgacctatctgagggctcggctgaccagctgactatcctcagcagctgggcttgcctgtggagggagtgacttgcactggcagcactgcatgtcacctgggaacccctgcagacaaagctaacatcccagacagacagatgtgaccaggacaaacgtgcaataatgccaaatgttaaaatgtgagtttaccagcctagctatgggactgctggctcctagtccaggaatcatgggggtatgactgcctctccaaccctgtgggctgtaagcaagctcaggctagtctccccactgggggctgtgcccctccctgggacggttccgtgggcagccccatcactgtgttcaatagtgtgagaatgtagctaaagcccctgctgctgctgctgcacatgccacagcaggcggtgggggctgcgtggggacaatccatcgtggagtgttctctcagcttaggtctggacaggagacttggcgggagatgctccaggatgtgggtgattctgtacctggggaggctatctctgacctcccgacaggggacactcccaggccagcccaggggtcaggggcagaggtgcacacctcagcatgagccaagactggggtcagggagcaggtgtggtttgagccaggacctggggcgggggtggggccggggcctttctgcctcatttgctttcaatgaaagcctcaaagcagccaaaaccaggctttcccccttcctcgagtttgaatatccagaatcttttgtacttcttgttggttaaattgtttatttttgtaaaaaataaaataaaattagttaataaaatg

SEQ ID NO: 26228 - DNA, 3274 bp, Homo sapiens
  Clone ID: LIB4119-002-G2_FLI
gatttactggagttgcaagtgggagcactggaagtacgggcagttgcagtgttggagctaaagcctcaacaaataacgaaagctctaatcacagttttggaagcttgggatctttaagtgacaaagaatcagagacaccggagaagaaacaatcggaatcatccaggggaagaaagagaaaagcagaaaaccagaatgaaagtagtcagggaaaaagtattgggggacgtggccacaaaattagcgactattttgaataccagggtggaaatggctcaagtccagtaagaggcatacctcctgcaatccgttctcctcaaaattcacattcacattccactccttcctcatctgttcgaccgaatagcccttctcctactgcattagcatttggggaccaccctattgtacaaccaaagcaattatcctttaaaattattcagactgatctcacaatgctgaaattagcagcattagaaagtaataaaatccaagacctggaaaagaaggagggacgtatagatgatttgctcagggctaactgtgatctcagacggcaaatagatgaacaacaaaaattacttgaaaaatacaaagaacgattaaataagtgcatatcaatgagcaagaaacttcttattgaaaagagtacacaagaaaagctgtcaagcagagagaagagtatgcaagatcgattacgcctcgggcactttacaacagttagacatggcgcttcatttactgaacaatggacagatggttttgcatttcagaatcttgtgaagcaacaagaatgggtgaatcagcaaagggaagatattgaaaggcaaaggaaacttctagccaaacgcaaacctcccacagctaataattctcaggcaccctctaccaattctgaaccaaaacaaaggaaaaacaaagcagtcaatggagcagagaatgatccctttgttagaccaaatttaccacaactgttgactttggcagaatatcatgaacaggaagaaattttcaaacttagactaggacatctcaaaaaggaagaggcagaaatccaggcagaacttgaacgtttggaaagagtcagaaatcttcacatacgtgagctgaaaagaataaacaatgaagataattcacagttcaaagatcacccaacattaaatgaaagatatttattacttcatctgcttggtagaggtggctttagtgaagtgtataaggtaatgtatgttttattctgttttttttacactaatgtagcaaggatataggagtatgtggttaagaagtacttacgttgtctgggcatggtggctcacacatgtaaccccagggctttgggagatgggagggtgcctgaggccaggagtttgagaccaacctgggcaacatagtgagaccttgtctctacttaaaaaaaagtcagccaggtgtggtggcgcacacatgtagccccagctactcaggaggctgaggtgggagtattgcagagtccaggaattcatggttgcaataagctatgattgcaccactgcactctagtatgggtgacagagcaagaccctgtctcaaaaacaaaaaaaagaagtacttgtcttttgtttattgattatatgtcctcattataaaaaagggtttgttgtggcttctgttgtcttatttccagaatccaaagactgtccttgccacctgcacagtccctgtgatatttgatacctagtcaccattaaccagtccaatacaaagagtaacagctatttaaatcaagataggcaggtagccatttaatacagtacacttatagaaagattgtaccccttaattaaaaaatgtctgaagtattaacatgtcctgaatttatccaaatttctacctatgtcaagtccgtttctcaaatgcatatgtataaatgtagcatttttactccccatgttcactattttatgcctgccttttttttttttttttgtactttatgttgtatcttttagcctaacctttaaatattggattcctaaggtcccttttatcattctgtattctcccttaagaaggtttttatcccctctcattcactgggttatctatttggtgtcacccccaggtaatatctagctcacactttcttcctgagttcaatacctcaaagtatgtttgtatacatgacttacctcatgtgggtgcttcataggtactggaaactcacatttgaaatagaagttatcttcctctcctctaaaatgtcttttaacactgcttctgacttccctgacctcagtatataacattgccattcatctgcctggtccctcaagtgaaaaaacacaaaaaccatcgtatgctcttcctttccctttgttcccctcccctcacatattataagcccctagttcctgctattattaatgtcattaagttctcctaaattcagccatgacccttcccttctgtctcttagctcaaggcttcttccggaacctcatagctgattgtcttcttttgggcattgcttttctcaagtcattttgtacactgcaactagagtgaactttttataaaaggcagcctgatcatctgtcctacttgaaagccccagtagcttcccatttgctcttgggatgaagtcctagtgaagggttatatgctcatctttagttcctctaaacagcttccctgaccctctgcatcttctctgatagatttggtgtgcctttttataagctcctttgtgcttcattacgtactggcatagttggttaaaagctttggttctgaagccagacagctaggtttaaatcctgactgctatttactaattttattaatttgggcttcttatttaaatccctgtctgactcattggctccttctgagaataataacaatacctacattatagggttgttgcagtgattaactgagttatcacatgtaaatcatatagaacataggtgctgagataagctgataagattattagaaatcctgcttgttggccatggctcacacctgtaatcctagcacttggtggggccaaggcaggcagattgcctgaactcaggagttcaagaccagtctgggcaacatggcgaacccgtttctactaaaaatacaagaaaaaaattagctaggcatgatggcacatgcctgtagttccagctactcggaggctgaggcatgataatcgcttgaaccttggtggtgggaggttgcagtgagccaagattgtgctactgcactccaccctgggggacagagggagacattttctctc

SEQ ID NO: 26229 - DNA, 4722 bp, Homo sapiens
  Clone ID: LIB4119-007-G1_FLI
ccccgcacccacccacgtcttcccgggagtcgtatcccgagcatggaggttactgagaccgttatttcttcatggcctgcctagcttaagcagtagctggaaaagatgtctcgggctgttcgtcttccagtcccctgtcctgttcaacttggtaccttaagaaatgactccctggaagctcagcttcatgagtatgtcaaacaagggaactatgtgaaagtgaagaaaattcttaagaaaggaatttatgttgatgcagttaactccttgggccaaacagcactttttgttgcggcgttattgggccttaggaaattcgttgatgttctggtggattatggatcagatccaaatcaccgctgctttgatgggagcacccctgtccatgcagcagcattttcgggcaatcagtggatccttagcaaactgctggatgcaggaggtgacctgcgactccacgatgagaggggtcaaaacccgaagacttgggctttgacagcaggaaaggagcgtagcacccagatagtggagttcatgcagcgctgtgcctcacacatgcaggccatcatccagggcttctcttacgacctcctgaagaagatagactccccgcagcggcttgtctacagcccgtcctggtgtgggggcctcgtgcagggaaaccctaatggctctcctaaccgactgcttaaagctggagtcatttctgctcaaaatatctacagctttggttttgggaagttttatcttactggggcgacacagatggcctatctaggatctcttccggtcattggagaaaaggaagtgattcaagctgatgatgagcccaccttctctttcttcagcggcccctacatggtcatgaccaacctagtgtggaatgggagcagggtcacagtgaaagagctgaatctccccacccacccacactgcagcaggctgcggctggccgacttgttaattgccgagcaggaacacagcagcaagctgcggcacccctacttgctacagttgatggctgtgtgtctctcccaggacctagagaaaacccgccttgtgtacgagcgcatcactatcggcacattgttcagtgtccttcatgaacgacggtcccagttcccagtgctgcacatggaggtgattgtgcacctgctgctccagatatctgatgccctgagatacctgcatttccaggggtttatccaccgctccctcagctcctatgctgtccatatcatctccccaggtgaagcgaggctgaccaacctggagtacatgttggaaagcgaggacagaggtgtacagagggacctgactcgagtgccccttcctacgcagctatacaactgggccgcaccagaagtgatcttacagaaggcagccacagtgaaatcagacatctacagcttttctatgatcatgcaggagattttaacagatgacataccctggaagggcttagatggctcagttgttaaaaaagccgtagtctcggggaattatttagaagctgatgtcaggcttccgaaaccttactatgatattgttaagtcaggcatccacgtcaagcagaaagaccgaactatgaaccttcaagatatccggtatattctgaagaatgacttaaaggattttactggagcccagagaactcaaccaaccgagagccccagagtgcagagatacggactccatcccgatgtcaatgtctatctaggactgacttcagaacaccccagagagacacctgacatggaaatcatagaactaaaggaaatgggcagtcaacctcattcaccaagggttcactctttattcactgaggggacactagatcctcaggccccagatccatgtctgatggccagggagactcagaatcaagatgctccttgccctgctccatttatggcagaagaggccagcagccccagcacaggtcagccaagcctctgcagtttcgaaatcaacgagatctactcaggctgcttgattttggaagatgacatagaagagcctccaggagctgcttcatctttggaggcagacggacctaaccaggtagatgaactgaaatccatggaagaagagctggataagatggagagagaggcgtgttgttttggcagtgaggatgagagctcttcaaaagctgagacagagtactcttttgatgactgggactggcaaaacggttcactcagttcactcagccttcctgagtcaaccagagaagccaagagcaatttgaacaacatgtccacgactgaggagtatctcatcagtaagtgtgtgctggatctaaagattatgcagacaataatgcacgagaatgatgataggctgaggaatatcgagcagatattagatgaagtcgagatgaaacagaaggaacaggaagagcgcatgtctttatgggccacttcaagagagtttacaaatgcctacaagttacctctggccgtgggccctccatctttaaactatattcctcctgtcctacagctttcagggggtcagaagccagacaccagtggcaactacccaaccctaccaagatttccaagaatgctgccgactctttgtgaccctggaaaacagaacacagatgaacaatttcagtgcactcaaggagccaaggacagtttggaaacaagcaggatccaaaataccagtagccagggaagacctagagagtccactgcccaagccaaagccacacagtttaatagtgcactcttcactctgtcaagccaccggcagggaccttctgcatcacccagctgtcactgggactctaccaggatgagtgtggaacctgtttcttctgaaatctataatgcagagtccagaaataaagatgatggaaaggtacacttaaaatggaaaatggaggtgaaagaaatggcaaagaaagcagctactggacagctcacagtacctccttggcatcctcagagtagtctgactttagagagcgaggctgaaaatgagcccgacgccctgctgcagccccccattaggagcccagaaaacacggattggcagcgagttattgagtatcatagggaaaatgatgagcccagaggaaatggcaagtttgacaagacgggcaacaatgactgtgacagtgaccagcatggcagacagcccaggcttggaagcttcaccagtatcaggcacccatctcccagacaaaaggagcaaccagagcatagtgaagccttccaagcaagttctgacacattggtggctgtagagaaatcttacagtacctcgagtcccatagaagaggactttgaaggaatacaaggtgcatttgcccaacctcaagtctctggtgaggaaaagttccaaatgagaaaaattcttggaaagaatgctgagattttgcccaggtctcaatttcaacctgtacgaagtactgaagatgaacaagaagagacatcaaaggagtcaccaaaggaactgaaagagaaagacatatcattgacggatattcaagacctgtctagtatctcctatgaaccagacagctcttttaaggaagcttcatgcaaaacacccaaaataaaccatgcacctaccagtgtcagcactccactcagcccagggtccgtttcttcagctgccagtcagtataaagactgccttgaaagtatcacatttcaggttaagacagagtttgcctcttgctggaacagtcaagaatttattcaaactttgtctgatgactttataagtgtccgagagagagcaaagaaactggattctctccttacttcctctgaaactcccccttcaagactgactggtcttaaaagattgtcttcatttattggggctggatcccccagccttgttaaggcatgtgactcatcaccaccccatgccacccagagaaggagcctgcctaaagagctcttgaaacagcagcagggctcatccacggtgttgcatgagaacacagcaagtgatggaggaggcactgcaaatgatcaaaggcacttagaagaacaagaaactgacagtaaaaaagaagatagtagtatgcttttgtccaaagaaactgaagatcttggagaggacacagagagagctcactctactctggatgaggacctggaaagatggctgcagccacctgaggagagcgtggagctacaagaccttcccaagggctctgaaagggagacaaatatcaaggatcaaaaagttggtgaagagaaaagaaaaagggaagatagcattacaccagagagaaggaaatcagagggtgttctagggacttctgaagaagatgaactaaaatcctgtttttggaagcgactaggttggtccgaatcatccaggataatcgtgctggatcagagtgacttgtcagactgattggaattggatcatagacggactcctggcctgagtttgagtgtcctggttgtaagctcctttcttctctttctgcttcagttgctgtcagggcagcagttccagttctgtaagtctcactttgttcagctgccacaatagacatcatcgtttggccctctctgttagcagcacattcaaccatttgttttcagtcagatttctgaaaagtgagaggtagttttgatagtaaaaatttttggttgtgcctagaatggctttggttttgttgatgttaattttcaaaaactttaactcttgttatataataaaatgtttaattttaataac

SEQ ID NO: 26230 - DNA, 2944 bp, Homo sapiens
  Clone ID: LIB4119-011-A2_FLI
caggcgcgggggtggcgcgtcagttgcttcagcgtcccggtgtggctgtgccgttggtcctgtgcggtcacttagccaagatgcctgaggaaacccagacccaagaccaaccgatggaggaggaggaggttgagacgttcgcctttcaggcagaaattgcccagttgatgtcattgatcatcaatactttctactcgaacaaagagatctttctgagagagctcatttcaaattcatcagatgcattggacaaaatccggtatgaaagcttgacagatcccagtaaattagactctgggaaagagctgcatattaaccttataccgaacaaacaagatcgaactctcactattgtggatactggaattggaatgaccaaggctgacttgatcaataaccttggtactatcgccaagtctgggaccaaagcgttcatggaagctttgcaggctggtgcagatatctctatgattggccagttcggtgttggtttttattctgcttatttggttgctgagaaagtaactgtgatcaccaaacataacgatgatgagcagtacgcttgggagtcctcagcagggggatcattcacagtgaggacagacacaggtgaacctatgggtcgtggaacaaaagttatcctacacctgaaagaagaccaaactgagtacttggaggaacgaagaataaaggagattgtgaagaaacattctcagtttattggatatcccattactctttttgtggagaaggaacgtgataaagaagtaagcgatgatgaggctgaagaaaaggaagacaaagaagaagaaaaagaaaaagaagagaaagagtcggaagacaaacctgaaattgaagatgttggttctgatgaggaagaagaaaagaaggatggtgacaagaagaagaagaagaagattaaggaaaagtacatcgatcaagaagagctcaacaaaacaaagcccatctggaccagaaatcccgacgatattactaatgaggagtacggagaattctataagagcttgaccaatgactgggaagatcacttggcagtgaagcatttttcagttgaaggacagttggaattcagagcccttctatttgtcccacgacgtgctccttttgatctgtttgaaaacagaaagaaaaagaacaatatcaaattgtatgtacgcagagttttcatcatggataactgtgaggagctaatccctgaatatctgaacttcattagaggggtggtagactcggaggatctccctctaaacatatcccgtgagatgttgcaacaaagcaaaattttgaaagttatcaggaagaatttggtcaaaaaatgcttagaactctttactgaactggcggaagataaagagaactacaagaaattctatgagcagttctctaaaaacataaagcttggaatacacgaagactctcaaaatcggaagaagctttcagagctgttaaggtactacacatctgcctctggtgatgagatggtttctctcaaggactactgcaccagaatgaaggagaaccagaaacatatctattatatcacaggtgagaccaaggaccaggtagctaactcagcctttgtggaacgtcttcggaaacatggcttagaagtgatctatatgattgagcccattgatgagtactgtgtccaacagctgaaggaatttgaggggaagactttagtgtcagtcaccaaagaaggcctggaacttccagaggatgaagaagagaaaaagaagcaggaagagaaaaaaacaaagtttgagaacctctgcaaaatcatgaaagacatattggagaaaaaagttgaaaaggtggttgtgtcaaaccgattggtgacatctccatgctgtattgtcacaagcacatatggctggacagcaaacatggagagaatcatgaaagctcaagccctaagagacaactcaacaatgggttacatggcagcaaagaaacacctggagataaaccctgaccattccattattgagaccttaaggcaaaaggcagaggctgataagaacgacaagtctgtgaaggatctggtcatcttgctttatgaaactgcgctcctgtcttctggcttcagtctggaagatccccagacacatgctaacaggatctacaggatgatcaaacttggtctgggtattgatgaagatgaccctactgctgatgataccagtgctgctgtaactgaagaaatgccaccccttgaaggagatgacgacacatcacgcatggaagaagtagactaatctctggctgagggatgacttacctgttcagtactctacaattcctctgataatatattttcaaggatgtttttctttatttttgttaatattaaaaagtctgtatggcatgacaactactttaaggggaagataagatttctgtctactaagtgatgctgtgataccttaggcactaaagcagagctagtaatgctttttgagtttcatgttggtttattttcacagattggggtaacgtgcactgtaagacgtatgtaacatgatgttaactttgtgtggtctaaagtgtttagctgtcaagccggatgcctaagtagaccaaatcttgttattgaagtgttctgagctgtatcttgatgtttagaaaagtattcgttacatcttgtaggatctactttttgaacttttcattccctgtagttgacaattctgcatgtactagtcctctagaaataggttaaactgaagcaacttgatggaaggatctctccacagggcttgttttccaaagaaaagtattgtttggaggagcaaagttaaaagcctacctaagcatatcgtaaagctgttcaaaaataactcagacccagtcttgtggatggaaatgtagtgctcgagtcacattctgcttaaagttgtaacaaatacagatgagttaaaag

SEQ ID NO: 26231 - DNA, 2591 bp, Homo sapiens
  Clone ID: LIB4119-017-A4_FLI
gttgcaataaaaataattgacaaaactcagttgaatccaacaagtctacaaaagctcttcagagaagtaagaataatgaagattttaaatcatcccaatatagtgaagttattcgaagtcattgaaactgaaaaaacactctacctaatcatggaatatgcaagtggaggtgaagtatttgactatttggttgcacatggcaggatgaaggaaaaagaagcaagatctaaatttagacagattgtgtctgcagttcaatactgccatcagaaacggatcgtacatcgagacctcaaggctgaaaatctattgttagatgccgatatgaacattaaaatagcagatttcggttttagcaatgaatttactgttggcggtaaactcgacacgttttgtggcagtcctccatacgcagcacctgagctcttccagggcaagaatatgacgggccagaagtggatgtgtggagtctgggggtcattttatacacactagtcagtggctcacttccctttgatgggcaaaacctaaaggaactgagagagagagtattaagagggaaatacagaattcccttctacatgtctacagactgtgaaaaccttctcaaacgtttcctggtgctaaatccaattaaacgcggcactctagagcaaatcatgaaggacaggtggatcaatgcagggcatgaagaagatgaactcaaaccatttgttgaaccagagctagacatctcagaccaaaaaagaatagatattatggtgggaatgggatattcacaagaagaaattcaagaatctcttagtaagatgaaatacgatgaaatcacagctacatatttgttattggggagaaaatcttcagagctggatgctagtgattccagttctagcagcaatctttcacttgctaaggttaggccgagcagtgatctcaacaacagtactggccagtctcctcaccacaaagtgcagagaagtgtttcttcaagccaaaagcaaagacgctacagtgaccatgctggaccagctattccttctgttgtggcgtatccgaaaaggagtcagaccagcactgcagatagtgacctcaaagaagatggaatttcctcccggaaatcaagtggcagtgctgttggaggaaagggaattgctccagccagtcccatgcttgggaatgcaagtaatcctaataaggcggatattcctgaacgcaagaaaagctccactgtccctagtagtaacacagcatctggtggaatgacacgacgaaatacttatgtttgcagtgagagaactacagctgatagacactcagtgattcagaatggcaaagaaaacagcactattcctgatcagagaactccagttgcttcaacacacagtatcagtagtgcagccaccccagatcgaatccgcttcccaagaggcactgccagtcgtagcactttccacggccagccccgggaacggcgaaccgcaacatataatggccctcctgcctctcccagcctgtcccatgaagccacaccattgtcccagactcgaagccgaggctccactaatctctttagtaaattaacttcaaaactcacaaggaggcttccaactgaatatgagaggaacgggagatatgagggctcaagtcgcaatgtatctgctgagcaaaaagatgaaaacaaagaagcaaagcctcgatccctacgcttcacctggagcatgaaaaccactagttcaatggatcccggggacatgatgcgggaaatccgcaaagtgttggacgccaataactgcgactatgagcagagggagcgcttcttgctcttctgcgtccacggagatgggcacgcggagaacctcgtgcagtgggaaatggaagtgtgcaagctgccaagactgtctctgaacggggtccggtttaagcggatatcggggacatccatagccttcaaaaatattgcttccaaaattgccaatgagctaaagctgtaacccagtgattatgatgtaaattaagtagcaattaaagtgttttcctgaacactgatggaaatgtatagaataatatttaggcaataacgtctgcatcttctaaatcatgaaattaaagtctgaggacgagagcacgcctgggagcgaaagctggccttttttctacgaatgcactacattaaagatgtgcaacctatgcgccccctgccctacttccgttaccctgagagtcggcgtgtggccccatctccatgtgcctcccgtctgggtgggtgtgagagtggacggtatgtgtgtgaagtggtgtatatggaagcatctccctacactggcagccagtcattgctagtacctctgcgggagatcatccggtgctaaaacattacagttgccaaggaggaaaatactgaatgactgctaagaattaaccttaagaccagttcatagttaatacaggtttacagttcatgcctgtggttttgtgtttgttgttttgtgtttttttagtgcaaaaggtttaaatttatagttgtgaacattgcttgtgtgtgtttttctaagtagattcacaagataattaaaaattcactttttctcagt

SEQ ID NO: 26232 - DNA, 2475 bp, Homo sapiens
  Clone ID: LIB4119-019-H6_FLI
ggccgatgtgtcgcccgcgaggggccggggtcggggccgccggggccatgcgcgcgggctgggcagggggccggcggggcgcagagcggagccgcctcggagcctgagccgcccggggccggggccggggagccgcgcggggccggccggccggggggaggggagcgatgcggcgccggcgggcggcagtggccgcgggtttctgcgcctccttcctgctgggctccgtcctcaacgtgctcttcgctccgggctcggagcctccgaggccaggccagtcccctgagccttcgccggccccgggtccgggccgtcgcgggggccgcggggagctggcccggcagatccgggcgcgctacgaggaggtgcagcgctattcccgcgggggccccgggcccggggcgggccggccggagcggcggcgcctgatggacctggctccgggcgggcccggcctgccgcgcccccggcccccttgggcccggcccctgtccgacggcgccccaggctggcccccggctcccggcccaggctcccccggcccgggcccgcggctgggctgcgccgcgcttcgcaacgtgtccggcgcgcagtacatgggctcaggctacaccaaggccgtgtaccgggtccgcctgcccggcggcgccgcggtggcgctcaaggcggtggactttagcggccacgatctgggcagctgcgtgcgcgagttcggggtacggaggggctgctatcggctggcggcccacaagctgcttaaggagatggtgctgctggagcggctgcggcaccccaacgtgctgcagctctatggctactgctaccaggacagcgaggacatcccagacaccctgaccaccatcacggagctgggcgcccctgtagaaatgatccagctgctgcaaacttcctgggaggatcgattccgaatctgcctgagcctgggccgcctcctccaccacctggcccactccccactgggctccgtcactctgctggacttccgccctcggcagtttgtgctggtggatggggagctcaaagtgacggacctggatgacgcacgtgtggaggagacgccgtgtgcaggcagcaccgactgcatactcgagtttccggccaggaacttcaccctgccctgctcagcccagggctggtgcgagggcatgaacgagaagcggaacctctataatgcctacaggtttttcttcacatacctcctgcctcacagtgccccgccttcactgcgtcctctgctggacagcatcgtcaacgccacaggagagctcgcctggggggtggacgagaccctggcccagctggagaaggtgctgcacctgtaccggagcgggcagtatctgcagaactccacggcaagcagcagtaccgagtaccagtgtatcccagacagcaccatcccccaggaagactaccgctgctggccatcctaccaccacgggagctgcctcctttcagtgttcaacctggctgaggctgtggatgtctgtgagagccatgcccagtgtcgggcctttgtggtcaccaaccagaccacctggacaggtcggcagctggtctttttcaagactggatggagccaagtggtccctgatcccaacaagaccacatatgtgaaggcctctggctgacctatctgagggctcggctgaccagctgactatcctcagcagctgggcttgcctgtggagggagtgacttgcactggcagcactgcatgtcacctgggaacccctgcagacaaagctaacatcccagacagacagatgtgaccaggacaaacgtgcaataatgccaaatgttaaaatgtgagtttaccagcctagctatgggactgctggctcctagtccaggaatcatgggggtatgactgcctctccaaccctgtgggctgtaagcaagctcaggctagtctccccactgggggctgtgcccctccctgggacggttccgtgggcagccccatcactgtgttcaatagtgtgagaatgtagctaaagcccctgctgctgctgctgcacatgccacagcaggcggtgggggctgcgtggggacaatccatcgtggagtgttctctcagcttaggtctggacaggagacttggcgggggatgctccaggatgtgggtgattctgtacctggggaggctatctctgacctcccgacaggggacactcccaggccagcccaggggtcaggggcagaggtgcacacctcagcatgagccaagactggggtcagggagcaggtgtggtttgagccaggacctggggcgggggtggggccggggcctttctgcctcatttgctttcaatgaaagcctcaaagcagccaaaaccaggctttcccccttcctcgagtttgaatatccagaatcatttgtacttcttgttggttaaattgtttatttttgtaaaaaataaaataaaattagttaataaaataatgtttcacagc

SEQ ID NO: 26233 - DNA, 3901 bp, Homo sapiens
  Clone ID: LIB4119-027-D2_FLI
acgcggaggtggtggctgcggcctttgaacaagtaagtgagccaccctcggagacccccgcgctggggacgggaggccggcgagcctcgggacctctgaaagccttgaggaggcgcgggggtgagtgcggccctgaggaaacccaggtgccccgcccctccctttcttcctggcccgcgcctcgcctacccctcccccgaccctggcgggcccccggctctgggcccggacccctggggtagctagtctgccacgaaccagccgcgcgcttctgcccttgtcggtttaggaaactgggaagttccctggtcctgctccccagcccgcagaggggacactgaggcccacggtaggtggtcctctcctcacccgagtctccacacagacaccatggccgagcctctgaaggaggaagacggcgaggacggctctgcggagccccccgggcccgtgaaggccgaacccgcccacaccgctgcctctgtagcggccaagaacctggccctgcttaaagcccgctccttcgatgtgacctttgacgtgggcgacgagtacgagatcatcgagaccataggcaacggggcctatggagtggtgtcctccgcccgccgccgcctcaccggccagcaggtggccatcaagaagatccctaatgctttcgatgtggtgaccaatgccaagcggaccctcagggagctgaagatcctcaagcactttaaacacgacaacatcatcgccatcaaggacatcctgaggcccaccgtgccctatggcgaattcaaatctgtgtaagaagcgggatgggagagggagccagacttgggacttttctgaaggctgcaaccatgttgccgaagttctggaaaggcagctgaatctaatctgaagcaggctgggaaaattcccgcagttctaggaccagttctttagagttttgccagggacaactgttattcctcaagaagtgtacagatgattttacagttttatagaatcttagtatataggatgtcaaatgtaggacattcctactatgaccacaccctcctattcccatagcagacttcactaatcaatcacagaacactttcctacagacagtggacaagcctggtcaattttcatcatagttcttcaagctgccactaccaaacaatggagatagccccaaaaggaaacctattggccagccctggtgtagtccaaccccatcttttatctgatggggaaactaggtctggagacaaaagtgatttaaccaagttcatggaaaagtcgtagagaatctaaaacgtgatgctcttcttccataccatgccgtcagcccctatggggtcccagggtaaggctgttacctgtctggaatcggaagggtgtggtgaggatggggcttgtccctggagtgtgatcaggccaacccatgcttctctccttccttccccttccagctacgtggtcctggacctgatggaaagcgacctgcaccagatcatccactcctcacagcccctcacactggaacacgtgcgctacttcctgtaccaactgctgcggggcctgaagtacatgcactcggctcaggtcatccaccgtgacctgaagccctccaacctattggtgaatgagaactgtgagctcaagattggtgactttggtatggctcgtggcctgtgcacctcgcccgctgaacatcagtacttcatgactgagtatgtggccacgcgctggtaccgtgcgcccgagctcatgctctctttgcatgagtatacacaggctattgacctctggtctgtgggctgcatctttggtgagatgctggcccggcgccagctcttcccaggcaaaaactatgtacaccagctacagctcatcatgatggtgctgggtaccccatcaccagccgtgattcaggctgtgggggctgagagggtgcgggcctatatccagagcttgccaccacgccagcctgtgccctgggagacagtgtacccaggtgccgaccgccaggccctatcactgctgggtcgcatgctgcgttttgagcccagcgctcgcatctcagcagctgctgcccttcgccaccctttcctggccaagtaccatgatcctgatgatgagcctgactgtgccccgccctttgactttgcctttgaccgcgaagccctcactcgggagcgcattaaggaggccattgtggctgaaattgaggacttccatgcaaggcgtgagggcatccgccaacagatccgcttccagccttctctacagcctgtggctagtgagcctggctgtccagatgttgaaatgcccagtccctgggctcccagtggggactgtgccatggagtctccaccaccagccccgccaccatgccccggccctgcacctgacaccattgatctgaccctgcagccacctccaccagtcagtgagcctgccccaccaaagaaagatggtgccatctcagacaatactaaggctgcccttaaagctgccctgctcaagtctttgaggagccggctcagaggtgccttgtgggcaggtcgggtgggcagaggggagacttggacttggacaaggcttcaggcttttaccttctcccctgcccaacttccccgcagatggccccagcgcacccctggaggctcctgagcctcggaagccggtgacagcccaggagcgccagcgggagcgggaggagaagcggcggaggcggcaagaacgagccaaggagcgggagaaacggcggcaggagcgggagcgaaaggaacggggggctggggcctctgggggcccctccactgaccccttggctggactagtgctcagtgacaatgacagaagcctgttggaacgctggactcgaatggcccggcccgcagccccagccctcacctctgtgccggcccctgccccagcgccaacgccaaccccaaccccagtccaacctaccagtcctcctcctggccctgtagcccagcccactggcccgcaaccacaatctgcgggctctacctctggccctgtaccccagcctgcctgcccaccccctggccctgcaccccaccccactggccctcctgggcccatccctgtccccgcgccaccccagattgccacctccaccagcctcctggctgcccagtcacttgtgccaccccctgggctgcctggctccagcaccccaggagttttgccttacttcccacctggcctgccgcccccagacgccgggggagcccctcagtcttccatgtcagagtcacctgatgtcaaccttgtgacccagcagctatctaagtcacaggtggaggaccccctgccccctgtgttctcaggcacaccaaagggcagtggggctggctacggtgttggctttgacctggaggaattcttaaaccagtctttcgacatgggcgtggctgatgggccacaggatggccaggcagattcagcctctctctcagcctccctgcttgctgactggctcgaaggccatggcatgaaccctgccgatattgagtccctgcagcgtgagatccagatggactccccaatgctgctggctgacctgcctgacctccaggacccctgaggcccccagcctgtgccttgctgccacagtagacctagttccaggatccatgggagcattctcaaaggctttagccctggacccagcaggtgaggctcggcttggattattctgcaggttcatctcagacccacctttcagccttaagcagccacctgagccaccaccgagccatggcaggatcgggagaccccaactccccctgaacaatccttttcagtattatatttttattattattatgttattattacactgtctttttgccatcaaaatgaggcctgtgaaatacaaggttcccttctg

SEQ ID NO: 26234 - DNA, 3625 bp, Homo sapiens
  Clone ID: LIB4119-028-H6_FLI
gcggacaccccggcccgggggtcggggccgcgagcccgggggctgatgggggggagggtggaagagaaagagtgaagaaaagttgcgagcgtctcctctcttcctaagcctcccgccccaacccacccctcagagaaggagaagataatatactgaaaagaagaggaggaggagagcgacgggacgggacgcgagcgggagcgcagccgccctctcggctccgcggcggcgcctcgcaagtccgggaggcgaggggggcccgaggggagacgccgtgacaactttcgtttccctctgagggaattgggaggtcggcggccccaaaagctttcagtccagtgtaaagctgttggagcgcgggagcaaaggtaaagaatgatgtaatgcgctggctgctccaaagcatcttttgttgtggaatggttattccagtcatctctttatgaatcaaatgtgaggggctgctttgtggacggagtcctttgcaagagcacatcaacgggaaagagaaagagacattcacttggagggctcttgctgaaaatgggtttaactctccttttgccagtcaccaccagcctgacctcatacacttttagtacaatggagtggctgagcctttgagcacaccaccattacatcatcgtggcaaattaaagaaggaggtgggaaaagaggacttattgttgtcatggcccatgagatgattggaactcaaattgttactgagaggttggtggctctgctggaaagtggaacggaaaaagtgctgctaattgatagccggccatttgtggaatacaatacatcccacattttggaagccattaatatcaactgctccaagcttatgaagcgaaggttgcaacaggacaaagtgttaattacagagctcatccagcattcagcgaaacataaggttgacattgattgcagtcagaaggttgtagtttacgatcaaagctcccaagatgttgcctctctctcttcagactgttttctcactgtacttctgggtaaactggagaagagcttcaactctgttcacctgcttgcaggtgggtttgctgagttctctcgttgtttccctggcctctgtgaaggaaaatccactctagtccctacctgcatttctcagccttgcttacctgttgccaacattgggccaacccgaattcttcccaatctttatcttggctgccagcgagatgtcctcaacaaggagctgatgcagcagaatgggattggttatgtgttaaatgccagcaatacctgtccaaagcctgactttatccccgagtctcatttcctgcgtgtgcctgtgaatgacagcttttgtgagaaaattttgccgtggttggacaaatcagtagatttcattgagaaagcaaaagcctccaatggatgtgttctagtgcactgtttagctgggatctcccgctccgccaccatcgctatcgcctacatcatgaagaggatggacatgtctttagatgaagcttacagatttgtgaaagaaaaaagacctactatatctccaaacttcaattttctgggccaactcctggactatgagaagaagattaagaaccagactggagcatcagggccaaagagcaaactcaagctgctgcacctggagaagccaaatgaacctgtccctgctgtctcagagggtggacagaaaagcgagacgcccctcagtccaccctgtgccgactctgctacctcagaggcagcaggacaaaggcccgtgcatcccgccagcgtgcccagcgtgcccagcgtgcagccgtcgctgttagaggacagcccgctggtacaggcgctcagtgggctgcacctgtccgcagacaggctggaagacagcaataagctcaagcgttccttctctctggatatcaaatcagtttcatattcagccagcatggcagcatccttacatggcttctcctcatcagaagatgctttggaatactacaaaccttccactactctggatgggaccaacaagctatgccagttctcccctgttcaggaactatcggagcagactcccgaaaccagtcctgataaggaggaagccagcatccccaagaagctgcagaccgccaggccttcagacagccagagcaagcgattgcattcggtcagaaccagcagcagtggcaccgcccagaggtcccttttatctccactgcatcgaagtgggagcgtggaggacaattaccacaccagcttccttttcggcctttccaccagccagcagcacctcacgaagtctgctggcctgggccttaagggctggcactcggatatcttggccccccagacctctaccccttccctgaccagcagctggtattttgccacagagtcctcacacttctactctgcctcagccatctacggaggcagtgccagttactctgcctacagctgcagccagctgcccacttgcggagaccaagtctattctgtgcgcaggcggcagaagccaagtgacagagctgactcgcggcggagctggcatgaagagagcccctttgaaaagcagtttaaacgcagaagctgccaaatggaatttggagagagcatcatgtcagagaacaggtcacgggaagagctggggaaagtgggcagtcagtctagcttttcgggcagcatggaaatcattgaggtctcctgagaagaaagacacttgtgacttctatagacaatttttttttcttgttcacaaaaaaattccctgtaaatctgaaatatatatatgtacatacatatatatttttggaaaatggagctatggtgtaaaagcaacaggtggatcaacccagttgttactctcttaacatctgcatttgagagatcagctaatacttctctcaacaaaaatggaagggcagatgctagaatcccccctagacggaggaaaaccattttattcagtgaattacacatcctcttgttcttaaaaaagcaagtgtctttggtgttggaggacaaaatcccctaccattttcacgttgtgctactaagagatctcaaatattagtctttgtccggacccttccatagtacaccttagcgctgagactgagccagcttgggggtcaggtaggtagaccctgttagggacagagcctagtggtaaatccaagagaaatgatcctatccaaagctgattcacaaacccacgctcacctgacagccgagggacacgagcatcactctgctggacggaccattaggggccttgccaaggtctaccttagagcaaacccagtacctcagacaggaaagtcggggctttgaccactaccatatctggtagcccattttctaggcattgtgaataggtaggtagctagtcacacttttcagaccaattcaaactgtctatgcacaaaattcccgtgggcctagatggagataatttttttttcttctcagctttatgaagagaagggaaactgtctaggattcagctgaaccaccaggaacctggcaacatcacgatttaagctaaggttgggaggctaacgagtctacctccctctttgtaaatcaaagaattgtttaaaatgggattgtcaatcctttaaataaagatgaacttggtttc

SEQ ID NO: 26235 - DNA, 2169 bp, Homo sapiens
  Clone ID: LIB4119-031-C2_FLI
gcctggccagcccaaaggactctctatccaggatgtaaatgagcacactgctggcccatgcgcctcggggctgtagagggcagcctcagaggcactgggcattcctggcaccatggatgacgctgctgtcctcaagcgacgaggctacctcctggggataaatttaggagagggctcctatgcaaaagtaaaatctgcttactctgagcgcctgaagttcaatgtggcgatcaagatcatcgaccgcaagaaggcccccgcagacttcttggagaaattccttccccgggaaattgagattctggccatgttaaaccactgctccatcattaagacctacgagatctttgagacatcacatggcaaggtctacatcgtcatggagctcgcggtccagggcgacctcctcgagttaatcaaaacccggggagccctgcatgaggacgaagctcgcaagaagttccaccagctttccttggccatcaagtactgccacgacctggacgtcgtccaccgggacctcaagtgtgacaaccttctccttgacaaggacttcaacatcaagctgtccgacttcagcttctccaagcgctgcctgcgggatgacagtggtcgaatggcattaagcaagaccttctgtgggtcaccagcgtatgcggccccagaggtgctgcagggcattccctaccagcccaaggtgtacgacatctggagcctaggcgtgatcctctacatcatggtctgcggctccatgccctacgacgactccaacatcaagaagatgctgcgtatccagaaggagcaccgcgtcaacttcccacgctccaagcacctgacaggcgagtgcaaggacctcatctaccacatgctgcagcccgacgtcaaccggcggctccacatcgacgagatcctcagccactgctggatgcagcccaaggcacggggatctccctctgtggccatcaacaaggagggggagagttcccggggaactgaacccttgtggacccccgaacctggctctgacaagaagtctgccaccaagctggagcctgagggagaggcacagccccaggcacagcctgagacaaaacccgaggggacagcaatgcaaatgtccaggcagtcggagatcctgggtttccccagcaagccgtcgactatggagacagaggaagggcccccccaacagcctccagagacgcgggcccagtgagcttcttgcggcccagggaatgagatggagctcacggcttaaagcccaagctctgaagaagtcaagggtggagccagagaaggaaggcagtcccagatgagcctctattttcatcagcttcttctctctccccttgaacttggtaacccacatggttctcccgtggcccctaggtggatgaggccaaagtcaaatccaaggctgagacagtcgtgcgactcctactcccccagagcgtgacccggagcaggtgctggacacagagcctgtctcagcagagggtccccactggccgcaacggctcagtgacagcaagagcaggaagagcagcaggaaggcaccgctgtccaccttgggcaccatttatcctcctttcatcgtccccggggcagttgcgtgaccctgctgggaggccagaccgggccagactgagggtcaggggaccaggctgggttgggggttgggtggggctggacggggacgaggcgcggagaggcggcgggaaagagcttcggctgggccacgggctcgcgggcactctcggcggcagcctcgggggctccgactccagctctgggcaagatccataaacttttaaagaagcctcaaaacatacttttaaagcattaagctttaaagtgctagaaatcttgtgccccatatgtgcttctttcagtattatcctagatcctcaggagtagcatggcaactggagaaaatgggaggaaagacaagaagaaatagaagctgatttaacatcaagtttattcagttttgatttttcttatctctactggctttctcctgttcaaaccttgcagcgataatatttggaaaagagcacttggaaattatattcctgtttttaactctttatatttaatcattctccttgtaattgattttgtagctaatttactccccagcacccccagaagaaaattttacaaagg

SEQ ID NO: 26236 - DNA, 2807 bp, Homo sapiens
  Clone ID: LIB4119-033-B7_FLI
gccgaaggctggctgtaggcaggcggctgagccggcggcgggtggcctgcccaacgtgtgctgggtgggagaaggcgaggcggcagcgatgctgtctcttccgtgaggagcgcagaggaggtcgcggcgccggaggccccagaaggctcgaaggcgccgcgggctggggtcggtggcttagggagcccgtccggccatggtggccgcgggtggtggttggcgcggctgcgctgcggcccggggcagtgcggagccgggacagtcgcggcgctgacgcccgcgggccccagctgcagatatgaagcggagccgctgccgcgaccgaccgcagccgccgccgcccgaccgccgggaggatggagttcagcgggcagcggagctgtctcagtctttgccgccgcgccggcgagcgccgcccgggaggcagcggctggaggagcggacgggccccgcggggcccgagggcaaggagcaggatgtagtaactggagttagtcccctgctcttcaggaaactcagtaatcctgacatattttcatccactggaaaagttaaacttcagcgacaactgagtcaggatgattgtaagttatggagaggaaacctggccagctctctatcgggactgatgggcggcgctggtctttggcctctttgccctcttcaggatatggaactaacactcctagctccactgtctcatcatcatgctcctcacaggaaaagctgcatcagttgcctttccagcctacagctgatgagctgcactttttgacgaagcatttcagcacagagagcgtaccagatgaggaaggacggcagtccccagccatgcggcctcgctcccggagcctcagtcccggacgatccccagtatcctttgacagtgaaataataatgatgaatcatgtttacaaagaaagattcccaaaggccaccgcacaaatggaagagcgactagcagagtttatttcctccaacactccagacagcgtgctgcccttggcagatggagccctgagctttattcatcatcaggtgattgagatggcccgagactgcctggataaatctcggagtggcctcattacatcacaatacttctacgaacttcaagataatttggagaaacttttacaagatgctcatgagcgctcagagagctcagaagtggcttttgtgatgcagctggtgaaaaagctgatgattatcattgcccgcccagcacgtctcctggaatgcctggagtttgaccctgaagagttctaccaccttttagaagcagctgagggccacgccaaagagggacaagggattaaatgtgacattccccgctacatcgttagccagctgggcctcacccgggatcccctagaagaaatggcccagttgagcagctgtgacagtcctgacactccagagacagatgattctattgagggccatggggcatctctgccatctaaaaagacaccctctgaagaggacttcgagaccattaagctcatcagcaatggcgcctatggggctgtatttctggtgcggcacaagtccacccggcagcgctttgccatgaagaagatcaacaagcagaacctgatcctacggaaccagatccagcaggccttcgtggagcgtgacatactgactttcgctgagaacccctttgtggtcagcatgttctgctcctttgataccaagcgccacttgtgcatggtgatggagtacgttgaagggggagactgtgccactctgctgaagaatattggggccctgcctgtggacatggtgcgtctatactttgcggaaactgtgctggccctggagtacttacacaactatggcatcgtgcaccgtgacctcaagcctgacaacctcctaattacatccatggggcacatcaagctcacggactttggactgtccaaaattggcctcatgagtctgacaacgaacttgtatgagggtcatattgaaaaggatgcccgggaattcctggacaagcaggtatgcgggaccccagaatacattgcgcctgaggtgatcctgcgccagggctatgggaagccagtggactggtgggccatgggcattatcctgtatgagttcctggtgggctgcgtccctttttttggagatactccggaggagctctttgggcaggtgatcagtgatgagattgtgtggcctgagggtgatgaggcactgcccccagacgcccaggacctcacctccaaactgctccaccagaaccctctggagagacttggcacaggcagtgcctatgaggtgaagcagcacccattctttactggtctggactggacaggacttctccgccagaaggctgaatttattcctcagttggagtcagaggatgatactagctattttgacacccgctcagagcgataccaccacatggactcggaggatgaggaagaagtgagtgaggatggctgccttgagatccgccagttctcttcctgctctccaaggttcaacaaggtgtacagcagcatggagcggctctcactgctcgaggagcgccggacaccacccccgaccaagcgcagcctgagtgaggagaaggaggaccattcagatggcctggcagggctcaaaggccgagaccggagctgggtgattggctcccctgagatattacggaagcggctgtcggtgtctgagtcgtcccacacagagagtgactcaagccctccaatgacagtgcgacgccgctgctcaggcctcctggatgcgcctcggttcccggagggccctgaggaggccagcagcacctctca

SEQ ID NO: 26237 - DNA, 1988 bp, Homo sapiens
  Clone ID: LIB4119-040-C5_FLI
gtcgacccacgctccggcgggcctgccgcggaggcatctgggaaacggagttcccaggtaggcgaagcccaggggccgtcaggaagtcagcggcgcctgcgcgggcgcctcagattcaggatgcgcgcgcagcgctctccgcccagcggaagttttcgctgggcaactgagaaggtcgctgtcaagatggagtttccaacccagtaaatccaagggccagaccgtgacctcataaagcatgatctccttctgtccagactgtggcaaaagtatccaagcggcattcaaattctgcccctactgtggaaattctttgcctgtagaggagcatgtagggtcccagacctttgtcaatccacatgtgtcatccttccaaggctcaaagagagggctgaactccagttttgaaacctctcctaagaaagtgaaatggtccagcaccgtcacctctccccgattatccctcttctcagatggtgacagttctgagtctgaagatactctgagttcctctgagagatccaaaggctccgggagcagacccccaacccccaaaagcagccctcagaagaccaggaagagccctcaggtgaccaggggtagccctcagaagaccagctgtagccctcagaagaccaggcagagccctcagacgctgaagcggagccgagtgaccacctcacttgaagctttgcccacagggacagtgctgacagacaagagtgggcgacagtggaagctgaagtccttccagaccagggacaaccagggcattctctatgaagctgcacccacctccaccctcacctgtgactcaggaccacagaagcaaaagttctcactcaaactggatgccaaggatgggcgcttgttcaatgagcagaacttcttccagcgggccgccaagcctctgcaagtcaacaagtggaagaagctgtactcgaccccactgctggccatccctacctgcatgggtttcggtgttcaccaggacaaatacaggttcttggtgttacccagcctggggaggagccttcagtcggccctggatgtcagcccaaagcatgtgctgtcagagaggtctgtgctgcaggtggcctgccggctgctggatgccctggagttcctccatgagaatgagtatgttcatggaaatgtgacagctgaaaatatctttgtggatccagaggaccagagtcaggtgactttggcaggctatggcttcgccttccgctattgcccaagtggcaaacacgtggcctacgtggaaggcagcaggagccctcacgagggggaccttgagttcattagcatggacctgcacaagggatgcgggccctcccgccgcagcgacctccagagcctgggctactgcatgctgaagtggctctacgggtttctgccatggacaaattgccttcccaacactgaggacatcatgaagcaaaaacagaagtttgttgataagccggggcccttcgtgggaccctgcggtcactggatcaggccctcagagaccctgcagaagtacctgaaggtggtgatggccctcacgtatgaggagaagccgccctacgccatgctgaggaacaacctagaagctttgctgcaggatctgcgtgtgtctccatatgaccccattggcctcccgatggtgccctaggtggaatccagaactttccatttgcagtgtgcaacagaaaaaaaaatgaagcaatgtgactcaaggcctgctgtttaatcacagataagcttctagaacaagccctggaatgtgcattcctgccactggtttcaggatactcatcagtcctgattagcctcccggagggccccagtttccctcccgtgaatgtgaagttccccatcttggtggcctgcccttcagccagtgtcctagcaaagctggatggggttgggccggcccacaggggggacccctcctacccttgactcctctgtgctttggtaataaattgttttaccag

SEQ ID NO: 26238 - DNA, 2045 bp, Homo sapiens
  Clone ID: LIB4119-042-F3_FLI
gccagacctcaatgtttgtaaaagggaaattacaattatgaaagagctatctggtcacaaaaatattgtgggctatttggactgtgctgttaattcaattagtgataatgtatgggaagtccttatcttaatggaatattgtcgagctggacaggtagtgaatcaaatgaataagaagctacagacgggttttacagaaccagaagtgttacagatattctgtgatacctgtgaagctgttgcaaggttgcatcagtgtaagactccaataattcaccgggatctgaaggtagaaaatattttgttgaatgatggtgggaactatgtactttgtgactttggcagtgccactaataaatttcttaatcctcaaaaagatggagttaatgtagtagaagaagaaattaaaaagtatacaactctgtcatacagagcccctgaaatgatcaacctttatggagggaaacccatcaccaccaaggctgatatctgggcactgggatgtctactctataaactttgtttcttcactcttccttttggtgagagtcaggttgctatctgtgatggcaacttcaccatcccagacaattctcgttactcccgtaacatacattgcttaataaggttcatgcttgaaccagatccggaacatagacctgatatatttcaagtgtcatattttgcatttaaatttgccaaaaaggattgtccagtctccaacatcaataattcttctattccttcagctcttcctgaaccgatgactgctagtgaagcagctgctaggaaaagccaaataaaagccagaataacagataccattggaccaacagaaacctcaattgcaccaagacaaagaccaaaggccaactctgctactactgccactcccagtgtgctgaccattcaaagttcagcaacacctgttaaagtccttgctcctggtgaattcggtaaccatagaccaaaaggggcactaagacctggaaatggccctgaaattttattgggtcagggacctcctcagcagccgccacagcagcatagagtactccagcaactacagcagggagattggagattacagcaactccatttacagcatcgtcatcctcaccagcagcagcagcagcagcagcagcaacagcaacagcagcagcagcaacagcaacagcagcagcagcagcagcagcagcagcaccaccaccaccaccaccaccacctacttcaagatgcttatatgcagcagtatcaacatgcaacacagcagcaacagatgcttcaacaacaatttttaatgcattcggtatatcaaccacaaccttctgcatcacagtatcctacaatgatgccgcagtatcagcaggctttctttcaacagcagatgctagctcaacatcagccgtctcaacaacaggcatcacctgaatatcttacctcccctcaagagttctcaccagccttagtttcctacacttcatcacttccagctcaggttggaaccataatggactcctcctatagtgccaataggtcagttgctgataaagaggccattgcaaatttcacaaatcagaagaacatcagcaatccacctgatatgtcagggtggaatccttttggagaggataatttctctaagttaacagaagaggaactattggacagagaatttgaccttctaagatcaaataggctcgaggagagagcatcctcagataagaatgtagactcactttctgctccacataaccatcctccagaagatccttttggttctgttcctttcatttctcattcaggcaagttacatatgtaacaccatttgaaaactacagaattaacaacaaaagaaaaacttacaaatgtaaagccaaaagaagaattgagtgtttaggatttctgctgagtacattgaacagcttttcaacattcagacttgtttggttatctggaatatacaggatagttttttcattgctttcatactccatatttttctctttgacatttattaaaaacagttcctattcttgctgttt

SEQ ID NO: 26239 - DNA, 2587 bp, Homo sapiens
  Clone ID: LIB4119-045-G4_FLI
cacaggtcttaagccagccaccaaatatgtatttcacatccgagtgagaactgcgacaggatacagtggctacagtcagaaatttgaatttgaaacaggagatgaaacttctgacatggcagcagaacaaggacagattctcgtgatagccaccgccgctgttggcggattcactctcctcgtcatcctcactttattcttcttgatcactgggagatgtcagtggtacataaaagccaagatgaagtcagaagagaagagaagaaaccacttacagaatgggcatttgcgcttcccgggaattaaaacttacattgatccagatacatatgaagacccatccctagcagtccatgaatttgcaaaggagattgatccctcaagaattcgtattgagagagtcattggggcaggtgaatttggagaagtctgtagtgggcgtttgaagacaccagggaaaagagagatcccagttgccattaaaactttgaaaggtggccacatggatcggcaaagaagagattttctaagagaagctagtatcatgggccagtttgaccatccaaacatcattcgcctagaaggggttgtcaccaaaagatccttcccggccattggggtggaggcgttttgccccagcttcctgagggcagggtttttaaatagcatccaggccccgcatccagtgccagggggaggatctttgccccccaggattcctgctggcagaccagtaatgattgtggtggaatatatggagaatggatccctagactcctttttgcggaagcatgatggccacttcacagtcatccagttggtcggaatgctccgaggcattgcatcaggcatgaagtatctttctgatatgggttatgttcatcgagacctagcggctcggaatatactggtcaatagcaacttagtatgcaaagtttctgattttggtctctccagagtgctggaagatgatccagaagctgcttatacaacaactggtggaaaaatccccataaggtggacagccccagaagccatcgcctacagaaaattctcctcagcaagcgatgcatggagctatggcattgtcatgtgggaggtcatgtcctatggagagagaccttattgggaaatgtctaaccaagatgtcattctgtccattgaagaagggtacagacttccagctcccatgggctgtccagcatctctacaccagctgatgctccactgctggcagaaggagagaaatcacagaccaaaatttactgacattgtcagcttccttgacaaactgatccgaaatcccagtgcccttcacaccctggtggaggacatccttgtaatgccagagtcccctggtgaagttccggaatatcctttgtttgtcacagttggtgactggctagattctataaagatggggcaatacaagaataacttcgtggcagcagggtttacaacatttgacctgatttcaagaatgagcattgatgacattagaagaattggagtcatacttattggacaccagagacgaatagtcagcagcatacagactttacgtttacacatgatgcacatacaggagaagggatttcatgtatgaaagtaccacaagcacctgtgttttgtgcctcagcatttctaaaatgaacgatatcctctctactactctctcttctgattctccaaacatcacttcacaaactgcagtcttctgttcagactataggcacacaccttatgtttatgcttccaaccaggattttaaaatcatgctacataaatccgttctgaataacctgcaactaaaaccctggcccactgcagattattgctacgcaatggtaaataactcagcatggatgtgtaattttgtataagccgtatatgggaagtgttcacggacttaacctaaaaaaatttatccaggtggggcttccttagtgatgtatgtagagtgtgatggtagatgagaaagaactagttgacctttctttcatgttttgtgatcaagtagcttccaaactgacagaaatgtttcatttttagataattatattcagctctattggttgtattattactttattttttaatactttaactgttggtgcctgatattgttagaattatttgcagaaatgaccagtgatatcatgtaatgaatttttgtgaggtatgactatggtgagaagggggttattagggagggagaaaaaaatactgtgtttataaatcttctgaggctgggtttgtcaattttttaaaaattaactttataatgtcatacatatttcatagtaggtggtagtttaaaggcttttcacctctaattttatttatttatttatttatttttactaaccgtagtatatttctctactaccttatgaagaccgctcctggaaagaccaagggtgacttcattgatctaatggctttcatagagaaaagcttgggataaatccatgactatttcctttgtgcattgtcacaagtttgcaaaagcaattatcaaagcactgagaaaattggtcattctcagtagaattgctttgaataaaatacgttagattataccctt

SEQ ID NO: 26240 - DNA, 780 bp, Homo sapiens
  Clone ID: LIB4119-046-B11_FLI
gttttgcgaccacaagcttcatgatgtcttaattgccccaggaacagcagatctaacagctgatgtggacttcagttatttgcgaagaatggcacagggaaaagtagcctctctgggcccaataaaacaacacacatttttaaaaaatatgggtattgatgtccggctgaaggttcttttagataaatcaaatgagccatcagtgaggcagcagttacttcaaggatatgatatgttaatgaatccaaagaagatgggagagagatttaacttttttgccttgctacctcatcagagacttcaaggtggaagatatcagaggaatgcacgtcagtcaaaaccctttgcatccgttgtagctgggtttagtgaacttgcttggcagtgatatttcagcttggacattttacccttcagtcggcccaagaaatcaaaataaaggaaacacatttcatatactgcagcactgcagatgacaatctacgaagaacaagttacacagcaaatatcagtccataaaatgaaatccttccttatttaggttagctcagtgattaaggatcttcttccatatcatctggattaggagccataatgaagtgctttgggtatacaaggttatgtgtgtatgcatgtatttcccagcgagcatcatcactttcatgtgtatgtaacgttctccaatgcgagtttcaaattctctaaggtcaagccaagtctgatagtcctaggagaaaatgaaatgtaatgatgaaacaaaagaacaatcctggcacctgg

SEQ ID NO: 26241 - DNA, 2870 bp, Homo sapiens
  Clone ID: LIB4119-048-G2_FLI
gcgatttacttggcgtcctcataccaggataaattaagggtcatttgctgcaagggaaacctcgtgaaggagtccggcactgaacaccaccggggcccgtccacctcccgcagcagccccaacaagcgaggcccacccacgtacaacgagcacatcaccaagcgcgtggcctccagcccagcgccgcccgaaggccccagccacccgcgagagccaagcacaccccaccgctaccgcgaggggcggaccgagctgcgcagggacaagtctcctggccgccccctggagcgagagaagtcccccggccggatgctcagcacgcggagagagcggtcccccgggaggctgtttgaagacagcagcaggggccggctgcctgcgggagccgtgaggaccccgctgtcccaggtgaacaaggtctgggaccagtcttcagtataaatctcagccagaaaaaccaactcctcatcttgatctgcaggaaaacaccaaacacactatggaactctgctgatggggacccaagcgcccacgtgctcagccaccctctggctcagcggggcccagacccacctcggcacggacacccctgtctccaggaggggcaggtggctgaggctcttcggagctgtcagcgcccggtgcctgccctgggcacctccctgcagtcatctctttgcactttgttactctttcaaagcattcacaaacttttgtacctagctctagcctgtaccagttagttcatcaaaggaaaccaaccgggatgctaactacaacatggttagaatcctaattagctactttaagatcctaggattggttggtttttcttttttttttctctttgtttctttcctttttttttttttttttaagacaacagaattcttaatagatttgaatagcgacgtatttcctgttgtagtcatttttagctcgaccacatcatcaggtctttgccaccgaggcatagtgtagaacagtcccggtcagttggccaacctcccgcagccaagtaggttcatccttgttcctgttcattctcatagatggccctgctttccccagggtgacatcgtagccaaatgtttactgttttcattgccttttatggccttgacgacttcccctcccaccagctgagaatgtatggaggtcatcggggcctcagctcggaggcagtgacttggggccaagggacctcgagacgctttccttccccaccccccagcgtcatctccccagcctgctgttcccgctttccatatagctttggccaggaaagcatgcaatagacttgctcggagcccagcactcctgggtctcggggtcggggaggggacgggggcacccacttccttgtctgtgacggcgtgttgttccccactctgggatggggaagaggcccgtcgggagttctgcatggcagttcactgcatgtgctgcccccttgggttgctctgccaatgtattaataccatcccatagctcctgccaaatcgagaccctctgacgacttgccgactaactggccaccacaagctgcagtctgtagcactgaacaaacaaaaaacaaaacgctcaagccttacgaccagagaaggatttcagcaaaccaccacctcccactcagtgtcccctccaaacttcacacttccctgcctgcagaggatgactctgttcacacccaatccagcgcggttctaccccacgaaactgtgactttccaaatgagcctttccctagggctagacctaagaccaggaagtttgagaaagcagccgcagctcaactcttccagctccgccagggttgggaagtccttaggtgcagtgcggctcccactgggtctgcggaccctcctattagagtacgaaattcctggcaactggtatagaaccaacctagaggctttgcagttggcaagctaactcgcggccttatttctgcctttaatctcccacaaggcatctgttgctttgggtcctccacgactcttaggcccgcctcaacaacccaggcacctcctaggtaggctcaaaggtagacccgtttccaccgcagcaggtgaacatgaccgtgttttcaactgtgtccacagttcagatccctttccagattgcaacctggcctgcatcccagctccttcctgctcgtgtcttaacctaagtgctttcttgtttgaaacgcctacaaacctccatgtggtagctcctttggcaaatgtcctgctgtggcgttttatgtgttgcttggagtctgtggggtcgtactccctcccctcccgtccccagggcagatttgattgaatgtttgctgaagttttgtctcttggtccacagtatttggaaaggtcactgaaaatgggtctttcagtcttggcatttcatttaggatctccatgagaaatgggcttcttgagccctgaaaatgtatattgtgtgtctcatctgtgaactgctttctgctatatagaactagctcaaaagactgtacaagaaactttatattcgtaaaaaaaaaaagaggaaattgaattggtttctacttttttattgtaaaaggtgcatttttcaacacttacttttggtttcaatggtggtagttgtggacagccatcttcactggagggtggggagctccgtgtgaccaccaagatgccagcaggatataccgtaacacgaaattgctgtcaaaagcttattagcatcaatcaagattctaggtctccaaaagtacaggctttttcttcattaccttttttattcagaacgaggaagagaacacaaggaatgattcaagatccaccttgagaggaatgaactttgttgttgaacaattagtgaaataaagcaatgatctaaact

SEQ ID NO: 26242 - DNA, 3169 bp, Homo sapiens
  Clone ID: LIB4119-056-H10_FLI
cgccgaagggggaggaggcgaggagcgagccgtgcggccagagcgggaaagagactcgtctttgcgtccgagttctggagccgccgcaccccgactcctggggccgcggcagcggctgcgaggggacgggcgtccgctgtctcctgggttcccctcgtagcgacccgcgggatcggaaaaaaaggagaagatggaggaggagggtggcagcagcggcggcgccgcggggaccagcgcggacggcggcgacggaggagagcagctcctcactgtcaagcacgagctgcggactgctaatttgacaggacatgctgagaaggtgggaatagaaaattttgagctcctgaaggtcctaggaactggagcttatggaaaagtatttctagttcgtaaaataagtggccatgatactggaaagctgtatgccatgaaagttttgaaaaaggcaacaatcgttcaaaaggccaaaaccacagagcatacaaggacagaacgacaagtcctggaacacattaggcagtcgccatttttggtaacattacattatgctttccagacagaaaccaaacttcatctcattttagattatataaatggtggtgaactttttactcatctttctcaaagagagcgtttcacagagcatgaggtgcagatttatgttggagagattgtgcttgccctcgaacatctccacaagttggggattatatatcgtgatattaagcttgagaatattctacttgattctaatggccatgtggtgctgacagattttggtctgagtaaggagtttgtggctgatgaaactgaaagagcatattccttttgtggaactattgaatacatggcaccagatattgtcagagggggagattcaggacatgacaaggcagttgactggtggagtttgggtgttctaatgtatgaattactaactggagcatctcctttcactgttgatggagaaaaaaattcccaagctgagatatctaggagaatattaaaaagtgagcctccatatccccaagaaatgagtgctttagcgaaagacctaattcagcgtcttttgatgaaagatcccaagaagagattgggatgtggtccacgtgatgcagatgaaatcaaagaacatctcttctttcagaaaataaattgggatgatttagctgccaaaaaagtgcctgcaccatttaagccagtcattcgagatgaattagatgtgagtaactttgcagaagagttcacagaaatggatcccacttattctcccgcagccctgccccagagttctgagaagctgtttcagggctattcctttgttgctccttccatcctattcaagcgtaatgcagctgtcatagaccctcttcagtttcacatgggagttgaacgtcctggagtgacaaatgttgccaggagtgcaatgatgaaggactctccattctatcaacactatgacctagatttgaaggacaaacccctgggagaaggtagtttttcaatttgtcgaaagtgtgtgcataaaaaaagtaaccaagcttttgcagtcaaaataatcagcaaaaggatggaagccaatactcaaaaggaaataacagctctgaaactctgtgaaggacaccccaatattgtgaagttgcatgaagtttttcatgatcagcttcacacgtttctagtgatggaacttctgaatggaggagaactgtttgagcgcattaagaaaaagaagcacttcagtgagacggaagccagctacatcatgaggaagcttgtttcagctgtaagccacatgcatgatgttggagtggtgcacagggatctgaaacctgagaatttattgttcaccgatgaaaatgacaatttggaaattaaaataattgattttggatttgcacggctaaagccaccggataatcagcccctgaagactccatgcttcacccttcattatgccgccccagagctcttgaatcagaacggctacgatgagtcctgtgacctgtggagcttgggcgtcattttgtacacaatgttgtcaggacaggttcccttccaatctcatgaccgaagtttgacgtgtaccagcgcggtggaaatcatgaagaaaattaaaaagggagatttctcctttgaaggagaagcctggaagaatgtatcccaagaggctaaagatttgatccaaggacttctcacagtagatccaaacaaaaggcttaaaatgtctggcttgaggtacaatgaatggctacaagatggaagtcagctgtcctccaatcctctgatgactccggatattctaggatcttccggagctgccgtgcatacctgtgtgaaagcaaccttccacgcctttaacaaatacaagagagaggggttttgccttcagaatgttgataaggcccctttggctaagagaagaaaaatgaaaaagactagcaccagtaccgagacgcgcagcagttccagtgagagttcccattcttcttcctctcattctcacggtaaaactacacccaccaagacactgcagcccagcaatcctgccgacagcaataacccggagaccctcttccagttctcggactcagtagcttaggcatggtaggagtgtatcagtgatccattgcacctttattccctcagcatatgcctgaggcgatcttttatgcttttaaaaatgtttcccgttggtctcattggaatctgcctcctaatgatttttttcaggaaaacctgtttggttatcctcattcaaaagcactggacagagaatgttactgtgaatagagcacatattactctttttagcaacctagcatgatgccaacaagactattcttgaaagagcaaaggttcctgtaaatttaattagggctagatttgagctgcttgtaagtcacaggttttccagatgtctgccaacaagaaatgactcatactgtgatgataccttttgctttgccttgtggacaatgtgggtttttgaaatttgcacccttcaaacaatgatttatcagagaaaggggtctgttttcaaaaaagattctgtaatgaattttatgtgtggcatatacttatttcttgagagaagattttaacttattgtttttattttatggttacatatgatgataacctgctattattaaactttttctaaaaagtg

SEQ ID NO: 26243 - DNA, 1737 bp, Homo sapiens
  Clone ID: LIB4119-070-F10_FLI
gcggcggcggcggcggcggcggctcgggtggctgcgctgggaggcggcggtgagaggctcgcacgcctccagcccggccccggccccccgggagggagagccgagcagccccggctctgggctacggactatgggcgaatagctctgaccacccggcgaagagctgagaatgaagcggagagcatcagacagaggagctggggaaacgtcggccagggccaaggctctaggaagtgggatttctggaaataatgcaaagagagctggaccattcatccttggtccccgtctgggcaactcaccggtgccaagcatagtgcagtgtttggcgaggaaagatggcacggatgacttctatcagctgaagatcctgaccctggaggagaggggggaccaaggcatagagagccaggaagagcggcagggcaagatgctgctgcacaccgagtactcactgctgtctctcctgcacacgcaggatggcgtggtgcaccaccacggcctcttccaggaccgcacctgtgaaatcgttgaggacacagaatccagccggatggttaagaagatgaagaagcgcatctgcctcgtcctggactgcctctgtgctcatgacttcagcgataagaccgctgacctcatcaacctgcagcactacgtcatcaaggagaagaggctcagcgagagggagactgtggtaatcttctacgacgtggtccgcgtggtggaggccctgcaccagaaaaatatcgtgcacagagacctgaagctggggaacatggtgctcaacaagaggacacatcggataaccatcaccaacttctgcctcgggaagcatctggtgagcgagggggacctgctgaaggaccagagagggagccctgcctacatcagtcccgacgtgctcagcggccggccgtaccgtggcaagcccagtgacatgtgggccctgggcgtggtgctcttcaccatgctgtatggccagttccccttctacgacagcatcccgcaggagctcttccgcaagatcaaggctgccgagtataccattcctgaggatggacgggtttctgagaacaccgtgtgtctcatccggaagctgctggtccttgacccccagcagcgcctggccgccgccgacgtcctggaggccctcagtgccatcattgcatcatggcagtccctgtcatctctgagtgggcctttgcaagtggttcctgacattgatgaccaaatgagcaatgcggatagctcccaggaggcgaaggtgacggaggagtgctcccagtacgagtttgagaactacatgcgtcagcagctgctgctggccgaggagaagagctccatccatgacgcccggagctgggtacccaagcggcagttcggcagcgcaccaccggtgcgacggctgggccacgacgcacagcccatgacctccttggacacggccatcctggcgcagcgctacctgcggaaataacagcctcagccggggccaccagcactgctgccacttcttccagccccagccaaaggcgtggctgtcagggctgggccctgtagtgctggactctcccgggccacaatagggacagggcagggacagggacagcccaggtcacacgtggggtcagcagaggtaccacgaagctaccttttgggatgattgctcgattgtttggtttttaaatctgagaagcctagataactaatctgcttttaatcacgatgttttaatct

SEQ ID NO: 26244 - DNA, 3210 bp, Homo sapiens
  Clone ID: LIB4119-079-C1_FLI
tggattgatgagattcccagaggggagcatttagtgctctgagtgctttgatgaaattgattagcttctctcctgaagggtttgaaacatgccaatattgtgctcctgcatgacataatccacaccaaagagacactgacattcgtttttgaatacatgcacacagacctggcccagtatatgtctcagcatccaggagggcttcatcctcataatgtcagacttttcatgtttcaacttttgcggggcctggcgtacatccaccaccaacacgttcttcacagggacctgaaacctcagaacttactcatcagtcacctgggagagctcaaactggctgattttggtcttgcccgggccaagtccattcccagccagacatactcttcagaagtcgtgaccctctggtaccggccccctgatgctttgctgggagccactgaatattcctctgagctggacatatggggtgcaggctgcatctttattgaaatgttccagggtcaacctttgtttcctggggtttccaacatccttgaacagctggagaaaatctgggaggtgctgggagtccctacagaggatacttggccgggagtctccaagctacctaactacaatccagaatggttcccactgcctacgcctcgaagccttcatgttgtctggaacaggctgggcagggttcctgaagctgaagacctggcctcccagatgctaaaaggctttcccagagaccgcgtctccgcccaggaagcacttgttcatgattatttcagcgccctgccatctcagctgtaccagcttcctgatgaggagtctttgtttacagtttcaggagtgaggctaaagccagaaaatgtgtgaccttttggcctcctaccagaaaggtcaccacccagcccagtttagcaaatgctggtgaaaagaaagggcgagatcaccaaggttcttccagggctgtatttctgcagtttcggttttcatttgcttcagcttactaagaagcttcaaatctaactccatactgaacaaggggctttatgtcctcacctatgacctggaatagtttaaatatggtgttcaaggcaatagtacataatagtggaagaaaattcagtggaaggttattgctattgtcatttgcatagaatttaagtgattgatttaaaaaaactggacataaactaagtctaagaagagggcttctgaataacttcattcattttggcatttgttaagagattcctgggctagaaggttgatttcccaaaaagacagataagagactgacaatttaaaagaatctggagacagagctggtgcttacagagacctgccactcctgtgttcacttacaatttctcccaacaaaaggatttctgtggcaaggagaaaactagcctaaagtttagaaaaagatggtttcttggataacattgttaacaaaaggacttcctgaggactatttattattattttgtagggggcacttcctccttcactaaactggattatcagaacgtattaccacccaacccatattttagaagtttggatttggctgctgattagaaatgaatttcaggctatctcctcctactgaatcttaattgtctgtgatgatggcaacagtgatggggaatctaagcgctggtttgatggtggagatattgaataagtagttgggagcagagttccaaagatgtaatttaagccctgttgcaccaccacacacacacacacacacacacacacacacacacacacccctcaagtaaaatgagagatctgtcttagctaacacgtgtgccgttttatacaatgactccttctaaaagcagccagggaaactcaaatcgcttctgtccagggatcatctcaggaaatgtagcagcctagaaaccagagacctctgtatatcctttggaagagcaaggaggaactaattaagagagaattaaaaaatagtaactatcccccaatgtctgagatggaaaaaggaaaaagacacatgggtagcccaaatcaacctgcctgagtaagtatctgattttagtaaggcatttgacaaagactgtccagctatacctgaaagatgaaacagtgtaggctgggtgatggagcagatatatgtactcaaatcatggtgtttatttacccagagaaaggccagccgtggtgtgctacaaggttcagtcttgagtcctattctggtcaaatatttttattaattactcgaataaatcagagtacacggacaactttatacaactccttgaagtaagtactattattattaatttatgacttccatttcacaaaagaggagactgaggctcagtgaagttaggtaactccttcatagtagcatgccagagtgaagatgcaaacctcagacctggttctccaatgttcctgacacctatcgaatttagagaatacacaactcttgcagaggcagctgctatttagtattggatcatgattcaaaagacaccttgctagaagccaatgaacagcaggccaaaacaacacttacttgcatcaaatttcatctgacttaaattcttacactttgggctacaacttaaaaaaggctatgacttagtggaaattggcacttttaagtacaatatgaattaatagtataatttcgctgtcccccagagataatgctagtaccaatcgaaagctcagggatgctactgttgacgcatcagcaagagttcttgagcagttttacctgtccatcaatacaaagagttcccacaacagtagtgggattcctctgcctctctgaagatatgagagctataggagggattcccatgttggaggttagaagagctgacctccaatgtcccgtctaattccaagattctccaataatgactttggaacagctgtgtacagattatacttggaattatgcttagatactattgctgcaggaatgaatagacaaattttgttattaaaaaattgattttattaagtggaagttgacagaattatcctctttataatggaggaacattatgcttatgcatatgcatataccttatgcatatgattatgcttgtgcttccttctttaatggatttacctattcaaaagcttaataaatgttataagactctaaaacatttaaatctttcatttctcaattttatcaaataaatattcctggaatttgtgcatattttt

SEQ ID NO: 26245 - DNA, 3474 bp, Homo sapiens
  Clone ID: LIB4119-079-D3_FLI
ctcagctgggctgaagtcacaggtccgcaggtatcaagagcagtggtgactcctgtgtcttattaaggattttgaaaggcgaccttccgtcacacatctccttgaccacccatttattaaaggagtacatggaaaagttctgtttctgcaaaaacagctggccgaggttctccaagaccagaagcatcaaaatcctgttgctaaaaccaggcatgagaggatgcataccagaagaccttatcatgtggaagatgctgaaaaatactgccttgaggatgatttggtcaacctagaggttctggatgaggatacaattatccatcagttgcagaaacgttatgcagacttgctaatttacacatatgttggagacatcttaattgccttaaaccccttccagaatctaagcatatactctccacagttttccagactttatcatggggtgaaacgtgcctccaatcccccccacatatttgcatcagcagatgctgcttaccagtgcatggttactctcagcaaagaccagtgcattgtcatcagcggagagagtggctctgggaagacagaaagcgcccacctgattgttcagcatttgactttcttgggaaaggccaataatcagaccttgagagagaaaattctacaagtcaactccctggtggaagcctttgggaactcatgcactgccatcaatgacaactcgagccgttttggaaaatatctggaaatgatgtttacaccaactggagttgtgatgggggcaagaatctctgaatatctcctggaaaaatccagagttataaaacaggcagcgagagagaaaaattttcatatattttactatatttatgctggtcttcatcaccaaaagaagctttctgatttcagacttcctgaggaaaaacctcctaggtacatagctgatgaaactggaagggtgatgcacgacataacttccaaggagtcttacagaagacaattcgaagcaattcagcattgcttcaggattatagggttcacggacaaagaggtgcactcagtgtacagaattttggctgggattttgaatattgggaacattgagttcgcagctatttcctctcaacatcagactgataaaagtgaggtgcccaatgctgaagctttgcaaaatgctgcctctgttctgtgcattagccctgaagagctccaggaggccctcacctcccactgtgtggtcacccggggcgagaccatcatccgtgccaacactgtagacagggctgcggacgttcgagacgccatgtccaaagccctgtatgggaggctcttcagctggattgtgaatcgcattaatacactcctgcagccagacgaaaacatatgtagtgcaggaggtggaatgaatgtggggatcttggatatctttggattcgagaattttcagagaaattcatttgagcagctctgcataaacatcgccaatgagcaaatccagtactatttcaatcagcatgtttttgctcttgagcagatggaatatcagaatgaaggcattgatgctatacccgtgggatatgaggacaaccgcccgctcctggacatgttcctccagaaacccctgggactgcttgcacttttggatgaggaaagtcggtttccccaagcaactgaccagaccctggttgataaatttgaagataatctacgatgcaaatacttctggaggcccaaaggagtggaactgtgctttggcattcagcattatgctggaaaggtattatatgatgcttctggggttcttgagaaaaatagagacactctccctgccgatgtggttgtggtcctgagaacgtcagaaaacaagcttcttcagcagctcttctcaatccctctgaccaaaacaggtaatttggcccagacaagagctaggataacagtggcctcaagttctttgcctccacatttcagtgctgggaaagccaaggtggacactctggaggtgatacggcatccggaagaaaccaccaacatgaagaggcaaactgtggcttcttacttccggtattctctgatggacctgctctccaaaatggtggttggacagccccactttgtgcgctgcattaaacccaatgatgaccgagaggccctgcagttctctcgagagagggtgctggcccagctccgctccacagggattctggagacagtcagcatccgccgccagggctattcccaccgcatcctttttgaagaatttgtgaaaaggtattattacttggcattcacagcacatcaaacacctcttgctagcaaagagagctgtgtggctatcttggaaaagtccagattagatcactgggtgctgggaaaaacaaaggtttttctcaaatattaccatgttgagcaattaaatttgctgcttcgagaagtcataggcagagtggttgtgctgcaggcatataccaaggggtggcttggagccaggagatacaaaaaggtcagagagaagagagagaagggagccattgccatccagtcagcctggagaggatatgatgctcggaggaaatttaagaaaataagcaacagaaggaatgagtctgctgctcataatcaagcaggggacacttcaaaccaaagcagtgggccacattcccccgtcgcagcaggtacgaggggaagtgccgaggttcaagactgcagcgagcctggtgaccataaagttctcaggggctctgtacatcgtaggagccattcacaagcagaatccaacaatggccgtacacagacttcaagcaactctcctgctgtcacagagaaaaatgggtctcattcgtgtgacatacagacaagggcaagagaagagcatcccaggcaggagaaacaagagtgggccatagccagaggcaggatatgcagagccattcttggaaggcattcacaagcccagagttctccaaaagggtgcgatatcttcgcaggacatgcaaacaagcactcggtttctgggactgatttgctgtcttctcggatatgccatcctgctccagatcagcaaggattgagtctctggggagcccctcaaaagcctgcctaggtctcgaattgaattcttgaacatccaaagtggtgatgaaatataatggaagcaagaatgaaatgaaactctacctaagttcagaaaatggtcttgcacagaagcatcgaacacctcgccgacgatgtcagcagcccaaaatgctgagtagccctgaggacaccatgtactataaccagttaaatggaactctagaatatcaagggagcaagaggaagccaagaaaacttggccaaatcaaagtacttgatggggaagatgaatattacaaatctctgtcaccagtggactgtatccctgaggagaacaactcagcccacccttcctttttttcttcatcctcaaaaggagactcttttgctcaacattaaattgtgcttcctaaccct

SEQ ID NO: 26246 - DNA, 2839 bp, Homo sapiens
  Clone ID: LIB4119-079-E1_FLI
tacacaacgctgtcctatcgagcaccagaaatggtcaacctgtacagtggcaaaatcatcactacgaaggcagacatttgggctcttggatgtttgttgtataaattatgctacttcactttgccatttggggaaagtcaggtggcaatttgtgatggaaacttcacaattcctgataattctcgatattctcaagacatgcactgcctaattaggtatatgttggaaccagaccctgacaaaaggccggatatttaccaggtgtcctacttctcatttaagctactcaagaaagagtgcccaattccaaatgtacagaactctcccattcctgcaaagcttcctgaaccagtgaaagccagtgaggcagctgcaaaaaagacccagccaaaggccagactgacagatcccattcccaccacagagacttcaattgcaccccgccagaggcctaaagctgggcagactcagccgaacccaggaatccttcccatccagccagcgctgacaccccggaagagggccactgttcagcccccacctcaggctgcaggatccagcaatcagcctggccttttagccagtgttccccaaccaaaaccccaagccccacccagccagcctctgccgcaaactcaggccaagcagccacaggctcctcccactccacagcagacgccttctactcaggcccagggtctgcccgctcaggcccaggccacaccccagcaccagcagcaactcttcctcaagcagcaacagcagcagcaacagccaccgccagcacagcagcagccggcaggcacgttttaccagcagcagcaggcccagactcagcagtttcaggcagtacatccagcaacccagcaaccagcaattgctcagttccctgtggtgtcccaaggaggctctcaacagcagctaatgcagaatttctaccagcagcagcagcagcagcaacaacaacagcaacagcaacagctggccacagccctgcatcaacaacagctgatgactcagcaggctgccttgcagcaaaagcccactatggcagcaggacagcagccccagccacagccagctgcagccccacagccagcccctgcccaggagccagcgattcaagccccagtaagacaacagccaaaggttcagacaaccccacctcctgccgtccaggggcagaaagttggatctctcactccaccctcatcccccaaaacccaacgtgctgggcacaggcgtattctcagtgacgtaacccacagtgcagtctttggggtccctgccagcaaatcaacccagctgctccaggcagctgcagctgaggccagtctcaataagtccaagtctgcaaccaccactccatcaggctctcctcggacctctcaacaaaacgtttataatccttcagaagggtctacgtggaatccctttgatgacgataatttctccaaactcacagctgaagaactgctaaacaaggactttgccaagcttggggaaggcaaacatcccgagaagcttggaggctcagctgagagtttgatcccaggctttcaatcaacccaaggtgatgcttttgctacgacctcattttctgctggaactgctgaaaaaaggaagggtgggcagactgtggactctggcctcccgcttctaagcgtgtctgatcctttcattcctcttcaagtacctgatgcaccagatctccagagggagtccaatccctgtcctgtaataactgtagagcactttaaagaatcactgggtgttaaaggccttccgctgtatccagacccctccagagtacctggcacaaagactcagaacaacttagaatctgactacttggccagagatggcccttcaagcaacagctcattccacagcagcgaagaggaagggactgaccttgaaggagacatgctggactgcagtgggtctcggcctctccttatggagtctgaagaagaagatgagagctgcagaccccccccggggaagctgggaggagccgttccattcgctccaccagaagtctctcctgagcaagcaaagacagtgcaaggtggaagaaagaaccagtttcaagccttcacacagccagccactgatgggctcagtgagccagatgtttttgccatagctcccttcaggagctcaagggttccaaatgatgacatggacattttctccaaagccccatttgtctccaagagcagtatggctccttcccagccagaggagtcagacgtgtttttgagagctcctttcactaagaagaaaagcatggaggagttaacagttatccaatgcacctcccaggagctgcctgcacagaccggtctcctcagtcagacaggtgatgtccccctgcccgcgagccgtgagagagctgtgtacacctctgtccaagctcagtattccacagctggttttgtgcaacagtctaacctcctgtcccattctgtacaagcagcagaccatctggacagcatctctcccaggggatcctgcctggaatctgggggtcattctaatgacagaaacaaaggacctcagctccagaaagaagctgtctcaggccccatggctggcaaaccattccgcccccagtccttatccaagtattcccgtcactatagcccagaagacgagccaagtccagaagcccagcccattgctgcctacaaaattgtttcacaaaccaacaagcagtcgatagctgggtctgtttctatcacatccctttcctccaggactacggagctgccagctgctgatccatttgctctagcacccttcccttcaaaatcaggcaagaaaccctaggagc

SEQ ID NO: 26247 - DNA, 2125 bp, Homo sapiens
  Clone ID: LIB4119-086-E11_FLI
cttggcctctaggaggcaggaacagcaggcctggccagcccaaaggactctctatccaggatgtaaatgagcacactgctggcccatgcgcctcggggctgtagagggcagcctcagaggcactgggcattcctggcaccatggatgacgctgctgtcctcaagcgacgaggctacctcctggggataaatttaggagagggctcctatgcaaaagtaaaatctgcttactctgagcgcctgaagttcaatgtggcgatcaagatcatcgaccgcaagaaggcccccgcagacttcttggagaaattccttccccgggaaattgagattctggccatgttaaaccactgctccatcattaagacctacgagatctttgagacatcacatggcaaggtctacatcgtcatggagctcgcggtccagggcgacctcctcgagttaatcaaaacccggggagccctgcatgaggacgaagctcgcaagaagttccaccagctttccttggccatcaagtactgccacgacctggacgtcgtccaccgggacctcaagtgtgacaaccttctccttgacaaggacttcaacatcaagctgtccgacttcagcttctccaagcgctgcctgcgggatgacagtggtcgaatggcattaagcaagaccttctgtgggtcaccagcgtatgcggccccagaggtgctgcagggcattccctaccagcccaaggtgtacgacatctggagcctaggcgtgatcctctacatcatggtctgcggctccatgccctacgacgactccaacatcaagaagatgctgcgtatccagaaggagcaccgcgtcaacttcccacgctccaagcacctgacaggcgagtgcaaggacctcatctaccacatgctgcagcccgacgtcaaccggcggctccacatcgacgagatcctcagccactgctggatgcagcccaaggcacggggatctccctctgtggccatcaacaaggagggggagagttcccggggaactgaacccttgtggacccccgaacctggctctgacaagaagtctgccaccaagctggagcctgagggagaggcacagccccaggcacagcctgagacaaaacccgaggggacagcaatgcaaatgtccaggcagtcggagatcctgggtttccccagcaagccgtcgactatggagacagaggaagggcccccccaacagcctccagagacgcgggcccagtgagcttcttgcggcccagggaatgagatggagctcacggcttaaagcccaagctctgaagaagtcaagggtggagccagagaaggaaggcagtcccagatgagcctctattttcatcagcttcttctctctccccttgaacttggtaacccacatggttctcccgtggcccctaggtggatgaggccaaagtcaaatccaaggctgagacagtcgtgcgactcctactcccccagagcgtgacccggagcaggtgctggacacagagcctgtctcagcagagggtccccactggccgcaacggctcagtgacagcaagagcaggaagagcagcaggaaggcaccgctgtccaccttgggcaccatttatcctcctttcatcgtccccggggcagttgcgtgaccctgctgggaggccagaccgggccagactgagggtcaggggaccaggctgggttgggggttgggtggggctggacggggacgaggcgcggagaggcggcgggaaagagcttcggctgggccacgggctcgcgggcactctcggcggcagcctcgggggctccgactccagctctgggcaagatccataaacttttaaagaagcctcaaaacatacttttaaagcattaagctttaaagtgctagaaatcttgtgccccatatgtgcttctttcagtattatcctagatcctcaggagtagcatggcaactggagaaaatgggaggaaagacaagaagaaatagaagctgatttaacatcaagtttattcagttttgatttttcttatctctactggctttctcctgttcaaaccttgcagcgataatatttggaaaagagcacttggaaattatattcctgtttttaactctttatattt

SEQ ID NO: 26248 - DNA, 2053 bp, Homo sapiens
  Clone ID: LIB4119-094-D5_FLI
tgcggggccgcctggggccgggctcccgccccagcagcggagtggtggagccacagtgttaaagaacagagaagtgatccttaatcatttagaattttgcctccaccatccaccagaaaatgaagtggaaagagaagttgggggatggtgtctatgacaccttcatgatgatagatgaaaccaaatgtcccccctgttcaaatgtactctgcaatccttctgaaccacctccacccagaagactaaatatgaccactgagcagtttacaggagatcatactcagcactttttggatggaggtgagatgaaggtagaacagctgtttcaagaatttggcaacagaaaatccaatactattcagtcagatggcatcagtgactctgaaaaatgctctcctactgtttctcagggtaaaagttcagattgcttgaatacagtaaaatccaacagttcatccaaggcacccaaagtggtgcctctgactccagaacaagccctgaagcaatataaacaccacctcactgcctatgagaaactggaaataattaattatccagaaatttactttgtaggtccaaatgccaagaaaagacatggagttattggtggtcccaataatggagggtatgatgatgcagatggggcctatattcatgtacctcgagaccatctagcttatcgatatgaggtgctgaaaattattggcaaggggagttttgggcaggtggccagggtctatgatcacaaacttcgacagtacgtggccctaaaaatggtgcgcaatgagaagcgctttcatcgtcaagcagctgaggagatccggattttggagcatcttaagaaacaggataaaactggtagtatgaacgttatccacatgctggaaagtttcacattccggaaccatgtttgcatggcctttgaattgctgagcatagacctttatgagctgattaaaaaaaataagtttcagggttttagcgtccagttggtacgcaagtttgcccagtccatcttgcaatctttggatgccctccacaaaaataagattattcactgcgatctgaagccagaaaacattctcctgaaacaccacgggcgcagttcaaccaaggtcattgactttgggtccagctgtttcgagtaccagaagctctacacatatatccagtctcggttctacagagctccagaaatcatcttaggaagccgctacagcacaccaattgacatatggagttttggctgcatccttgcagaacttttaacaggacagcctctcttccctggagaggatgaaggagaccagttggcctgcatgatggagcttctagggatgccaccaccaaaacttctggagcaatccaaacgtgccaagtactttattaattccaagggcataccccgctactgctctgtgactacccaggcagatgggagggttgtgcttgtggggggtcgctcacgtaggggtaaaaagcggggtcccccaggcagcaaagactgggggacagcactgaaagggtgtgatgactacttgtttatagagttcttgaaaaggtgtcttcactgggacccctctgcccgcttgaccccagctcaagcattaagacacccttggattagcaagtctgtccccagacctctcaccaccatagacaaggtgtcagggaaacgggtagttaatcctgcaagtgctttccagggattgggttctaagctgcctccagttgttggaatagccaataagcttaaagctaacttaatgtcagaaaccaatggtagtatacccctatgcagtgtattgccaaaactgattagctagtggacagagatatgcccagagatgcatatgtgtatatttttatgatcttacaaacctgcaaatggaaaaaatgcaagcccattggtggatgtttttgttagagtagactttttttaaacaagacaaaacatttttatatgattataaaagaattcttcaagggctaattacctaaccagcttgtattggccatctggaatatgcattaaatgactttttataggtcc

SEQ ID NO: 26249 - DNA, 2778 bp, Homo sapiens
  Clone ID: LIB4119-095-G10_FLI
tttccttctaccagcttattttcagcacagtccatgggctttacaaggaccgctatgcctacagggatagcatgactgacgtcattgtgcagcacctgatcactgagcagaaagttcggattaaatgcaaagagcttgtcaagaagattgccatctacagaaatcgattggctatccaactgccagagaaaatcctcatctatgagttgtattcagaggacttatcagacatgcattaccgggtaaaggagaagattatcaagaagtttgagtgcaacctcctggtggtgtgtgccaatcacatcatcctgtgccaggagaaacggctgcagtgcctgtccttcagcggagtgaaggagcgggagtggcagatggagtctctcattcgttacatcaaggtgatcggtggccctcctggaagagaaggcctcttagtggggctgaagaatggacagatcctgaagatcttcgtggacaatctctttgctatcgtcctgctgaagcaggccacagctgtgcgctgcttggacatgagtgcctcccgtaagaagctggccgtggtagatgaaaatgacacttgcctggtgtatgacatcgacaccaaggagctgctttttcaggaaccaaacgccaacagtgtagcttggaacacccagtgtgaggacatgctctgcttctcgggaggaggctacctcaacatcaaagccagcaccttccctgtgcaccggcagaagctgcagggctttgtggtcggctacaatggctccaagatcttctgcctccatgtcttctccatttctgccgtggaggtgccgcagtccgctcccatgtaccagtacctggataggaaactgttcaaggaagcctaccagattgcttgcttgggtgtcacagacactgattggcgtgaactggccatggaagcgctagaaggtttagattttgaaacagcaaagaaggccttcatcagagtacaagacctccgatatttagagctcatcagcagcattgaggagaggaagaagcggggagagaccaacaatgacctgtttctggcagatgtgttttcctaccaggggaagttccatgaggccgccaaactgtacaagaggagtgggcacgagaacctcgcgcttgaaatgtacaccgacctctgcatgtttgagtatgccaaggatttccttggatctggagaccccaaagaaacaaagatgctaatcaccaaacaggctgactgggccagaaatatcaaggagcccaaagccgccgtggagatgtacatctcagcaggagagcacgtcaaggccatcgagatctgtggtgaccatggctgggttgacatgttgatcgacatcgcccgcaaactggacaaggctgagcgcgagcccctgctgctgtgcgctacctacctcaagaagctggacagccctggctatgctgctgagacctacctgaagatgggtgacctcaagtccctggtgcagctgcacgtggagacccagcgctgggatgaggcctttgctttgggtgagaagcatcctgagtttaaggatgacatctacatgccgtatgctcagtggctagcagagaacgatcgctttgaggaagcccagaaagcgttccacaaggctgggcgacagagagaagcggtccaggtgctggagcagctcacaaacaatgccgtggcggagagcaggtttaatgatgctgcctattattactggatgctgtccatgcagtgcctcgatatagctcaagcagatcctgcccagaaggacacaatgcttggcaagttctaccacttccagcgtttggcagagctgtaccatggttaccatgccatccatcgccacacggaagatccgttcagtgtccatcgtcctgaaactcttttcaacatctccaggttcctgctgcacagcctgcccaaggacaccccctcgggcatctctaaagtgaaaatactcttcaccttggccaagcagagcaaggccctcggtgcctacaggctggcccggcacgcctatgacaagctgcgtggcctgtacatccctgccagattccaaaagtccattgagctgggtaccctgaccatccgcgccaagcccttccacgacagtgaggagttggtgcccttgtgctaccgctgctccaccaacaacccgctgctcaacaacctgggcaacgtctgcatcaactgccgccagcccttcatcttctccgcctcttcctacgacgtgctacacctggttgagttctacctggaggaagggatcactgatgaagaagccatctccctcatcgacctggaggtgctgagacccaagcgggatgacagacagctagagattgcaaacaacagctcccagattctgcggctagtggagaccaaggactccatcggagatgaggacccgttcacagctaagctgagctttgagcaaggtggctcagagttcgtgccagtggtggtgagccggctggtgctgcgctccatgagccgccgggatgtcctcatcaagcgatggcccccacccctgaggtggcaatacttccgctcactgctgcctgacgcctccattaccatgtgcccctcctgcttccagatgttccattctgaggactatgagttgctggtgcttcagcatggctgctgcccctactgccgcaggtgcaaggatgaccctggcccatgaccagcatcctggggacggcctgcaccctctgcccgccttggggtctgctgggctgtgaaggagaataaagagttaaactgtc

SEQ ID NO: 26250 - DNA, 3899 bp, Homo sapiens
  Clone ID: LIB4119-098-F5_FLI
tgcggtctaggaagtaggtcccgggctccgcgctcaacaaagacggggccgcccccattagacggagctgcgggcggaggctccatgttgggaagcggcgccgttcgtgcttgttagcgggaatccgggagccgcggggtgagctggcgggggccgggccctaagtgaagatggaggccccgctgcggcctgccgcggacatcctgaggcggaacccgcagcaggactacgaactcgtccagagggtcggcagcggcacctacggggacgtctataaggccagaaatgtacacacaggagagctggctgcagtaaaaatcattaaattggagcctggagatgatttttctttgattcaacaagaaatatttatggttaaagaatgtaaacattgtaacatcgttgcctactttgggagttatcttagtcgggaaaaactatggatttgtatggaatactgtggtggcggatcacttcaagatatttaccatgttactggaccattatcagaattgcaaatagcctatgtatgcagagaaaccttacagggtcttgcctatttgcatactaaaggcaaaatgcatagagatatcaaaggtgctaatattttattgacagaccatggcgatgtaaaattagctgactttggtgtggctgcaaaaataacagctaccattgcaaaacgaaaatctttcattggcaccccttactggatggccccagaagttgcagcagtagagaagaatggtggctacaaccaactctgtgatatctgggcagtaggaataacagcaattgaacttggagaacttcagccacctatgtttgatctccacccaatgagggctctcttcttaatgtcaaaaagtaattttcagcctccaaaactaaaggacaaaacaaaatggtcatcaacattccataattttgtcaaaatagcactaaccaaaaacccaaaaaaaagaccaactgctgaaagacttctgactcacacttttgttgcacagccaggtctctctagagccctagcagttgaactgttagacaaagtgaacaatccagataaccacgcacattacactgaagcagatgacgatgactttgagccccatgcaatcattcgtcataccattagatctacaaacaggaatgccagagctgaacggacagcttcagaaataaattttgacaaattacaatttgaacctcctctgagaaaagaaacagaagcacgagatgaaatgggattgtcatcagacccaaatttcatgttacagtggaatccttttgttgatggtgcaaatactggcaaatcaacctcaaaacgtgcaataccacctcccctacctcctaagccaaggataagcagttaccctgaagacaactttccggatgaagaaaaagcatcaaccataaaacattgtcctgattcagaaagcagagctccccaaattctcagaagacagagtagcccaagttgtgggcctgtggcagagacttcttctattggaaatggtgatggtatttcaaaactgatgagtgaaaatacagaaggatcagcacaagcaccacagttaccacgaaaaaaggacaaacgagacttccctaaaccagccatcaatggccttccacccaccccaaaagttctgatgggagcatgcttttcaaaagtttttgatggctgtcctttgaaaattaattgtgcaacatcctggatacatcctgatacaaaagatcagtacattatttttggaactgaagatggtatttacacactgaatctcaatgagctacatgaggcaacgatggaacagttatttccacggaagtgtacttggctgtatgttatcaataatactttaatgtcattatcagaaggaaaaacctttcagctctactctcacaatcttatagctttgtttgaacatgccaaaaaaccaggattagctgcccatattcaaactcacaggtttccagaccgaatactaccaagaaaattcgctttaacaacaaagattcctgatacaaaaggctgccacaaatgttgcatagtcagaaacccttacacgggacataaatacctctgtggagctttacagtctggaattgttttacttcagtggtatgagccaatgcagaaattcatgttgataaagcactttgattttcctttgccaagtcctttgaatgtttttgaaatgctggtgatacctgaacaggaataccctatggtctgtgtagctattagcaaaggcactgaatcgaatcaggtagttcagtttgagacaatcaatttgaactctgcatcttcatggtttacagaaattggtgcaggcagccagcagttagattccattcatgtaacacagttggagagagataccgttttagtgtgtttagacaaatttgtgaaaattgtaaatctacaaggaaaattaaaatcaagtaagaaactggcctctgagttaagttttgattttcgcattgaatctgtagtatgccttcaagacagtgtgttggctttctggaaacatgggatgcagggtaaaagcttcaagtcagatgaggttacccaggagatttcagatgaaacaagagttttccgcttattaggatcagacagggttgtcgttttggaaagtaggccaacagaaaatcctactgcacacagcaatctctacatcttggctggacatgaaaatagttactaagcaacagaaactgatctcaaatgacaggaaaatgaatatactccattgaaaggaaaaataaggaaattcaatacaaactgcactatgatttgctttaactattatgggttatattgcaaatgatctgtactttagggtagaattcaatattttctgcagctggaaacagctagtctatctcttgccactgtgtggtggttatatcaagtttgcttaataaaagctatgagacaaatagtcctctagttccaggaaacacagtctttttttaaaaaaaacaatgtttgtaacaagggtgccatggtatttttagataactcgtgattatcttaagagaggtaaatttagtgatcattttatatcatgtcttattccttcttaatgaacataatttgttaaattctcaagcaaggttttcacttttatattggccattctgtatgtttttgtaaaacagaatatttaatccttatttattaatctcttgctggagtggtgtaatgtatctaacttttagcaaaggagggttgcagagcagcttaaattttttttataatgtataagaattttgtttatcttttaagagtagtaaagtactttgagtgtttgggggttcaacacacacatgcaattttgcttaacaaaagtattttataatacagtttcatacagaattaccttaaaagggagtcttatgttttcaactacagatagttgtaagggatcatacagaagatattgatgatagttgaaatattcttagaaggggtgtgtatgtctagctgtgtctaccatgtgtatgtattcttgacaagcagtataaaatacctgtgatttttctttacattagggataatgcataaggaattaatcttcatatatattatcatccctaatgtagcagggggaagtatttaattgcccatgatatgtattttacttatactatgccagagaggaaactataaagtaattacacatgtaatcttgggtttttcacatatgtaggtattcattttgagtaggttgaagaagaaaaaaaatatttaaatgaattgaattcctgatgggatagtatcaataagtatttaaaagccagtattctaaaaataataaagggtagggtcatttttgagtttgtttttcttttgctattgttaatattcaaaattaaagtgttacattggt

SEQ ID NO: 26251 - DNA, 2446 bp, Homo sapiens
  Clone ID: LIB4119-100-C9_FLI
cactcaacagcgctggaacccattcggtggggcctggggcccctcatcccaagccaggagggtttctggggaggggtgcagcccctggcagactgacagtgtggcctgggggtttgggggtgccagggaagcaggggccaacctcataggaggagacacgagtgcggttctctttcccccactggggggcctgctgtgtcagcagccaggcgggaggcctgggcggcagagccagtggtacaggggcctgggcagggcggtgtctggcagcagcggcaccatgtccaccatccagtcggagactgactgctacgacatcatcgaggtcttgggcaaggggaccttcggggaggtagccaagggctggcggcggagcacgggcgagatggtggccatcaagatcctcaagaatgacgcctaccgcaaccgcatcatcaagaacgagctgaagctgctgcactgcatgcgaggcctagaccctgaagaggcccacgtcatccgcttccttgagttcttccatgacgccctcaagttctacctggtctttgagctgctggagcaaaaccttttcgagttccagaaggagaacaacttcgcgcccctccccgcccgccacatccgtacagtcaccctgcaggtgctcacagccctggcccggctcaaggagctggctatcatccacgctgatctcaagcctgagaacatcatgctggtggaccagacccgctgccccttcagggtcaaggtgattgacttcggatccgccagcattttcagcgaggtgcgctacgtgaaggagccatacatccagtcgcgcttctaccgggcccctgagatcctgctggggctgcccttctgcgagaaggtggacgtgtggtccctgggctgcgtcatggctgagctgcacctgggctggcctctctaccccggcaacaacgagtacgaccaggtgcgctacatctgcgaaacccagggcctgcccaagccacacctgttgcacgccgcctgcaaggcccaccacttcttcaagcgcaacccccaccctgacgctgccaacccctggcagctcaagtcctcggctgactacctggccgagacgaaggtgcgcccattggagcgccgcaagtatatgctcaagtcgttggaccagattgagacagtgaatggtggcagtgtggccagtcggctaaccttccctgaccgggaggcgctggcggagcacgccgacctcaagagcatggtggagctgatcaagcgcatgctgacctgggagtcacacgaacgcatcagccccagtgctgccctgcgccaccccttcgtgtccatgcagcagctgcgcagtgcccacgagaccacccactactaccagctctcgctgcgcagctaccgcctctcgctgcaagtggaggggaagccccccacgcccgtcgtggccgcagaagatgggaccccctactactgtctggctgaggagaaggaggctgcgggtatgggcagtgtggccggcagcagccccttcttccgagaggagaaggcaccaggtatgcaaagagccatcgaccagctggatgacctgagtctgcaggaggctgggcatgggctgtggggtgagacctgcaccaatgcggtctccgacatgatggtccccctcaaggcagccatcactggccaccatgtgcccgactcgggccctgagcccatcctggccttctacagcagccgcctggcaggccgccacaaggcccgcaagccacctgcgggttccaagtccgactccaacttcagcaacctcattcggctgagccaggtctcgcctgaggatgacaggccctgccggggcagcagctgggaggaaggagagcatctcggggcctctgctgagccactggccatcctgcagcgagatgaggatgggcccaacattgacaacatgaccatggaagctgagaggccagaccctgagctcttcgaccccagcagctgtcctggagaatggctgagtgagccagactgcaccctggagagcgtcaggggcccacgggctcaggggctcccaccccgccgctcccaccagcatggtccaccccggggggccaccagcttcctccagcatgtcaccgggcaccactgatggtgattccacccctgcccatcactgggggctgcgctagctgggctggcattccctcccaacctgaactgctcctcagagccatctcctgaacccacaaattattcttacagaaagatagttatccagaaattctcattccccgtctgcggtgcggtgcgtgcctgcacacctctcctaaacacagcagggctttggagtctggcccatgctccttggccagaaggacagcaggaaagggggctgcaccccgctggccctgcgctcgcccttggccctgctgcctctgtctatttcaatatagaactgttcagc

SEQ ID NO: 26252 - DNA, 2236 bp, Homo sapiens
  Clone ID: LIB4119-106-E6_FLI
ggctcacacagtacatggatggcagtggaatgccaaagacaatgcagtcagaagagactcgtgtgtggcaccgccgggatggaaagtggcagaatgttcattttcatcgctcggggtcaccaacagtacccatcaactaaatttcaacagtgccacttctgcattctctgttctcaaggcacctggatggtgaccctgggccgtcctctcctcctcttcatgcatgtttctgagtgcatgaagttgtgaaggtcctacatgtaatgcatatgtgatgcatcatcttatcatatattccttcctatacattgtttacacttcaactacggggatgttccacacaaacttaaattactgttggcaaaacaatagggggagattagacaaaaaaaaaaatccacaatattccaagtacaactcttcatcaagtttctctgttaatgccaagatttaacagacttaagaactattgttctctgaatgacagttgtaagagaaatgtaaattttttagaactctttgctgttaatctgttttggtttgtttggttttttttttttttttttaaggtaaaaaaaaaatacaccttcagtttcctagtgtgatcctggttaaaatggatgatttttcattgaaagttttgctgattaacaattaaagtgggatgatatgtgggcaaaatcacttatgaaagtagaagcaagaatcagttggtttgctaccacataaagccatgctgtttttggtcaaactgtgtaaactggaaaaattcacatcatttctgagtttaatcactttaggatatattcacattgttttggtgaatttgctgaattgaattgtttttctttctcaaatctgtgatctcttttctttatcctgtttctttgttccttttttgctttcttatttttcttttgttccattcttttcttacttttttcccttttccttttttggggaggctggctagtagtgtgtgagaaaagaatagaagtgaaatttgcataatgaatgtaaaagggaaataaaagtcttttgaaggtagctatactagcacttttgatcatcttcagggcccacaaaaatgttgtcaagattttaaaggtttataattctgcttaagctctagtttggacttaggtatcctaactatgttggaggtatttgcattgtttaaagttaggataaaagcaagttcctcctgtgactgcaacgtcttactgattgggacagttgccaggaggataccaacttgatagcagagggggttttatgcaaacgcactcacctccgccttggggaatgaaagggtcacttctgcatcatcactagctagttttctagtgttagagaggcttacaaatgtttgccattctcataagtgttttgaacttgatctttgtgacttgtgcttttttagcttctctcttgaatcagagtatcattgtcttcctccaaggagttagaatttcccagtttaaaacaaaaagggaaatgtcctaggttttctttgtgcttctcatttttcctttgttgattcaattcctgtgatttttgttctcttccctgaagtgctttacagtgcatggaatctccatcattgttattttaacgatagtaattcacagtcctcagaagcctatttttaaagcagaagcaaaaaagaaaaacaaaataacaaaaacaacccttcctcttttctctcatctcacctctctgtgttgattactaatcatcttagatattattgctagtggatgtatggtagatgggttgaagcttttctgataattattacacaatttaaaacaacatatatatttaaaataaatatatacagtaaatatattgagccatgttaacctgccaatgagatctgtgaaaaaataatggcctcatttttctctttttaatttcttttacccttttgtgaagcagctatacgtggcatacatgtatttaaagaaaaaaaaatagatgtagagtgttttttttacacttttaacttagcatgtggtgttgaagtattactgtagatcaagtttgtcttccgcactaagatgtgaggaaattgtgatttgttctctccaccacaaatgaattacacatttattatcttctatcattttgaaacactgcagtttaccatgggacactgtatatatttcttgccataatggtaaaggactgattgatatatttaagagttaataaatttgtgatttctgctgac

SEQ ID NO: 26253 - DNA, 2136 bp, Homo sapiens
  Clone ID: LIB4119-111-F11_FLI
ggctgaaggtggggggcctacttcgggggaccggtggacagctgggccagactgttggttggccttgtggggccctggggcctgggccccaccgctggggaccatgtggaggttcttgggcccaaaagttttaccaggatgggcctgggagaggcctgggtgaggaggacattcgcagggcacgggaggcccgtcccaggaagacaccccggccccagctgagtgaccgctctcgagaacgcaaggtgcctgcctcccgcatcagccgcttggccaactttgggggactggctgtgggcttggggctaggagtactggccgagatggctaagaagtccatgccaggaggtcgtctgcagtcagagggtggttctgggctggactccagccccttcctgtcggaggccaatgccgagcggattgtgcagaccttatgtacagttcgaggggccgccctcaaggttggccagatgctcagcatccaggacaacagcttcatcagccctcagctgcagcgcatctttgagcgggtccgccagagcgccgacttcatgccccgctggcagatgctgagagttcttgaagaggagctcggcagggactggcaggccaaggtggcctccttggaggaggtgccctttgccgctgcctcaattgggcaggtgcaccagggcctgctgagggacgggacggaggtggccgtgaagatccagtaccccggcatagcccagagcattcagagcgatgtccagaacctgctggcggtactcaagatgagcgcggccctgcccgcgggcctgtttgccgagcagagcctgcaggccttgcagcaggagctggcttgggagtgtgactaccgtcgtgaggcggcttgtgcccagaatttcaggcagctgctggcaaatgaccccttcttccgggtcccagccgtggttaaggagctgtgcacgacacgggtgctgggcatggagctggctggaggggtccccctggaccagtgccagggcctaagccaggacctgcggaaccagatttgcttccagctcctgacgctgtgtctgcgggagctgtttgagttccgattcatgcagactgaccccaactgggccaacttcctgtatgatgcctccagccaccaggtgaccctgctggactttggtgcaagccgggagtttgggacagagttcacagaccattacatcgaggtggtgaaggctgcagctgatggagacagagactgtgtcctgcagaagtccagggacctcaaattcctcacaggctttgaaaccaaggcattctccgacgcccacgtggaggcagtgatgatcctgggggagcctttcgccacccagggcccttatgactttgggtcgggggaaacggcccgccgcatacaggacctcatcccggtgctgctgcggcaccggctgtgtcccccacccgaggagacctatgccctgcaccgcaagctggcaggggctttcctggcctgtgcccacctccgagcccacatcgcctgcagggacctcttccaggacacctaccaccgctactgggccagtcgccagccagacgcagccactgccggcagcctccccaccaaaggggactcctgggtggatccctcatgacagcctccatgggggattcagtccccagagcaggccgtaccctgctgtagtgcctcttatcccttccccgtctgccctgggtcagaggagcccccttgggcttcccagtcttgcctggctctcctccttggcccaggagctcaggatccctggggctggggaactcccaacttcgtgccctagatcctgcacctccccactcgaaagtgggtatccgaaaactaagccagggaagcggttaacttatctttgccaacatttgagggagccttgggccgctgcatgtcgttatgcagatcagactcatcagggggagccctcacctctgcctcaagcctcccgtggaaggcgagatggtcctggaggcagtcctcacctctgcctccctcgctcctccaacagctgccttctcccgggttccagcctctcagtgtgttggagaggtaggggtgcggggtgggggggagctgaatcttcaatcggaataaaagcagccctccccttc

SEQ ID NO: 26254 - DNA, 2836 bp, Homo sapiens
  Clone ID: LIB4119-112-B4_FLI
gatagataagaaagccatgtacaaagcaggaatggtacagagagtccaaaatgaggtgaaaatacattgccaattgaaacatccttctatcttggagctttataactattttgaagatagcaattatgtgtatctggtattagaaatgtgccataatggagaaatgaacaggtatctaaagaatagagtgaaacccttctcagaaaatgaagctcgacacttcatgcaccagatcatcacagggatgttgtatcttcattctcatggtatactacaccgggacctcacactttctaacctcctactgactcgtaatatgaacatcaagattgctgattttgggctggcaactcaactgaaaatgccacatgaaaagcactatacattatgtggaactcctaactacatttcaccagaaattgccactcgaagtgcacatggccttgaatctgatgtttggtccctgggctgtatgttttatacattacttatcgggagaccacccttcgacactgacacagtcaagaacacattaaataaagtagtattggcagattatgaaatgccatcttttttgtcaatagaggccaaggaccttattcaccagttacttcgtagaaatccagcagatcgtttaagtctgtcttcagtattggaccatccttttatgtcccgaaattcttcaacaaaaagtaaagatttaggaactgtggaagactcaattgatagtgggcatgccacaatttctactgcaattacagcttcttccagtaccagtataagtggtagtttatttgacaaaagaagacttttgattggtcagccactcccaaataaaatgactgtatttccaaagaataaaagttcaactgatttttcttcttcaggagatggaaacagtttttatactcagtggggaaatcaagaaaccagtaatagtggaaggggaagagtaattcaagatgcagaagaaaggccacattctcgataccttcgtagagcttattcctctgatagatctggcacttctaatagtcagtctcaagcaaaaacatatacaatggaacgatgtcactcagcagaaatgctttcagtgtccaaaagatcaggaggaggtgaaaatgaagagaggtactcacccacagacaacaatgccaacatttttaacttctttaaagaaaagacatccagtagttctggatcttttgaaagacctgataacaatcaagcactctccaatcatctttgtccaggaaaaactccttttccatttgcagacccgacacctcagactgaaaccgtacaacagtggtttgggaatctgcaaataaatgctcatttaagaaaaactactgaatatgacagcatcagcccaaaccgggacttccagggccatccagatttgcagaaggacacatcaaaaaatgcctggactgatacaaaagtcaaaaagaactctgatgcttctgataatgcacattctgtaaaacagcaaaataccatgaaatatatgactgcacttcacagtaaacctgagataatccaacaagaatgtgtttttggctcagatcctctttctgaacagagcaagactaggggtatggagccaccatggggttatcagaatcgtacattaagaagcattacatctccgttggttgctcacaggttaaaaccaatcagacagaaaaccaaaaaggctgtggtgagcatacttgattcagaggaggtgtgtgtggagcttgtaaaggagtatgcatctcaagaatatgtgaaagaagttcttcagatatctagtgatggaaatacgatcactatttattatccaaatggtggtagaggttttcctcttgctgatagaccaccctcacctactgacaacatcagtaggtacagctttgacaatttaccagaaaaatactggcgaaaatatcaatatgcttccaggtttgtacagcttgtaagatctaaatctcccaaaatcacttattttacaagatatgctaaatgcattttgatggagaattctcctggtgctgattttgaggtttggttttatgatggggtaaaaatacacaaaacagaagatttcattcaggtgattgaaaagacagggaagtcttacactttaaaaagtgaaagtgaagttaatagcttgaaagaggagataaaaatgtatatggaccatgctaatgagggtcatcgtatttgtttagcactggaatccataatttcagaagaggaaaggaaaactaggagtgctccctttttcccaataatcataggaagaaaacctggtagtactagttcacctaaggccttatcacctcctccttctgtggattcaaattacccaacgagagagagagcatctttcaacagaatggtcatgcatagtgctgcttctccaacacaggcaccaatccttaatccctctatggttacaaatgaaggacttggtcttacaactacagcttctggaacagacatctcttctaatagtctaaaagattgtcttcctaaatcagcacaacttttgaaatctgtttttgtgaaaaatgttggttgggctacacagttaactagtggagctgtgtgggttcagtttaatgatgggtcccagttggttgtgcaggcaggagtgtcttctatcagttatacctcaccaaatggtcaaacaactaggtatggagaaaatgaaaaattaccagactacatcaaacagaaattacagtgtctgtcttccatccttttgatgttttctaatccgactcctaattttcattgattaaaactcctttcagacatataagtttaataaataacttttttgttg

SEQ ID NO: 26255 - DNA, 4306 bp, Homo sapiens
  Clone ID: LIB4119-113-G5_FLI
ggcgtgaccctcgcctgatccagttgttagaggtggaagcttggcagttggcctcccttcttcccatggaggacgggggcttaacagcctttgaagaggaccagagatgcctttcccagagcctccccttgccagtgtcagcagagggcccagctgcacagaccactgctgagcccagcaggtcgttttcctcagcccacagacacctgagcagaaggaatgggctttccagactctgccagagcaggacggcgctctctgaagacagatggagctcctattgtctatcatcactggctgcccagaatatttgtacaagtaaactgcactgccctgctgcccctgagcacacggacccgtccgaaccgcggggcagtgtgtcctgctgctccctgctgcggggactgtcctcagggtggtcctcacctctgcttccggcccctgtgtgcaaccctaacaaggccatcttcacggtggatgccaagaccacagagatcctggttgctaacgacaaagcttgcgggctcctggggtacagcagccaggacctgattggccagaagctcacgcagttctttctgaggtcagattctgatgtggtggaggccctcagcgaggagcacatggaggccgacggccacgctgcggtggtgtttggcacggtggtggacatcatcagccgtagtggggagaagattccagtgtctgtgtggatgaagaggatgcggcaggagcgccgcctatgctgcgtggtggtcctggagcccgtggagagggtctcgacctgggtcgctttccagagcgatggcaccatcacgtcatgtgacagtctctttgctcatcttcacgggtacgtgtctggggaggacgtggctgggcagcatatcacagacctgatcccttctgtgcagctccctccttctggccagcacatcccaaagaatctcaagattcagaggtctgttggaagagccagggacggtaccaccttccctctgagcttaaagctgaaatcccaacccagcagcgaggaggcgaccaccggtgaggcggcccctgtgagcggctaccgggcatctgtctgggtgttctgcaccatcagtggcctcatcaccctcctgccggatgggaccatccacggcatcaaccacagcttcgcgctgacactgtttggttacggaaagacggagctcctgggcaagaatatcactttcctgattcctggtttctacagctacatggaccttgcgtacaacagctcattacagctcccagacctggccagctgcctggacgtcggcaatgagagtgggtgtggggagagaaccttggacccgtggcagggccaggacccagctgaggggggccaggatccaaggattaatgtcgtgcttgctggtggccacgttgtgccccgagatgagatccggaagctgatggaaagccaagacatcttcaccgggactcagactgagctgattgctggaggccagctcctttcctgcctctcacctcagcctgctccaggggtggacaatgtcccagaaggaagcctgccagtgcacggtgaacaggcgctgcccaaggaccagcaaatcactgccttggggagagaggaacctgtggcaatagagagccccggacaggatcttctgggagaaagcaggtctgaaccagtggatgtgaagccatttgcttcctgcgaagattctgaagctccagtcccagctgaggatgggggcagtgatgctggcatgtgtggcctgtgtcagaaggcccagctagagcggatgggagtcagtggtcccagcggttcagacctttgggctggggctgccgtggccaagccccaggccaagggtcagctggcggggggcagcctcctgatgcactgcccttgctatgggagtgaatggggcttgtggtggcgaagccaggacttggcccccagcccctctgggatggcaggcctctcgtttgggacacctactctagatgagccgtggctgggagtggaaaacgaccgagaagagctgcagacctgcttgattaaggagcagctgtcccagttgagccttgcaggagccctggatgtcccccacgccgaactcgttccgacagagtgccaggctgtcaccgctcctgtgtcgtcctgcgatctgggaggcagagacctgtgcggtggctgcacgggcagctcctcagcctgctatgccttggccacggacctccctgggggcctggaagcagtggaggcccaggaggttgatgtgaattcgttttcctggaacctcaaggaactctttttcagtgaccagacagaccaaacgtcatcaaattgttcctgtgctacgtctgaactcagagagacaccctcttccttggcagtgggctccgatccagatgtaggcagtctccaggaacaggggtcgtgtgtcctggatgacagggagctgttactactgaccggcacctgtgttgaccttggccaaggccgacggttccgggagagctgtgtgggacatgatccaacagaaccgcttgaggtttgtttggtgtcctctgagcattatgcagcaagcgacagagaaagcccaggacacgttccttccacgttggatgctggccctgaggacacgtgcccatcagcagaggagccaaggctgaacgtccaggtcacctccacgcccgtgatcgtgatgcgcggggctgctggcctgcagcgggagatccaggagggtgcctactccgggagctgctaccatcgagatggcttacggctgagtatacagtttgaggtgaggcgggtggagctccagggccccacacctctgttctgctgctggctggtgaaagacctcctccacagccaacgcgactcagccgccaggacccgcctgttccttgccagcctgcccggctccacccactctaccgctgctgagctcaccggacccagcctggtggaagtgctcagagccagaccctggtttgaggagccccccaaggctgtggaactggaggggttggcggcctgtgagggcgagtactcccaaaagtacagtaccatgagcccgctgggcagtggggccttcggcttcgtgtggactgctgtggacaaggaaaaaaacaaggaggtggtggtgaagtttattaagaaggagaaggtcttggaggattgttggattgaggatcccaaacttgggaaagttactttagagatcgcaattctatccagggtggagcacgccaatatcatcaaggtattggatatatttgaaaaccaagggttcttccagcttgtgatggagaagcacggctccggcctagacctcttcgctttcatcgaccgccaccccaggctggatgagcccctggcgagctacatcttccgacaactagtgtcagcagtgggatacctgcgcttgaaggacatcatccaccgtgacatcaaggatgagaacatcgtgatcgccgaggacttcacaatcaagctgatagactttggctcggccgcctacttggaaaggggaaaattattttatactttttgtgggaccatcgagtactgtgcaccggaagttctcatggggaatccctacagagggccggagctggagatgtggtctctgggagtcactctgtacacgctggtctttgaggagaaccccttctgtgagctggaggagaccgtggaggctgccatacacccgccatacctggtgtccaaagaactcatgagccttgtgtctgggctgctgcagccagtccctgagagacgcaccaccttggagaagctggtgacagacccgtgggtaacacagcctgtgaatcttgctgactatacatgggaagaggtgtttcgagtaaacaagccagaaagtggagttctgtccgctgcgagcctggagatggggaacaggagcctgagtgatgtggcccaggctcaggagctttgtgggggccccgttccaggcgaggctcctaatggccaaggctgtttgcatcccggggatccccgtctgctgaccagctaaacaccaatttcttcctgcttttctccacttggtttggaaaatcacacagttttcaggctccatctgtttggagaaaatacattctgaagcatccccaattcaccttctaaaaactcatgtgcaggtttgataaacaccagaacagaagacagtgatgctgtattattttagatttattacatagatttggaattcacttttttcatgacctagaaaaaaacattccagtgttcaactgttttatattattaaagggcttttaatttgtg

SEQ ID NO: 26256 - DNA, 3376 bp, Homo sapiens
  Clone ID: LIB4119-121-F1_FLI
ggaattgcttacatttcctcatcccggaagcatgacagcattaaagacgactcggaggaccttaagccagttatcgatgggatggatggaatcaaaatctctcaggggcttgggctgcaggactttgacctaatcagagtcatcgggcgcgggagctacgccaaggttctcctggtgcggttgaagaagaatgaccaaatttacgccatgaaagtggtgaagaaagagctggtgcatgatgacgaggatattgactgggtacagacagagaagcacgtgtttgagcaggcatccagcaaccccttcctggtcggattacactcctgcttccagacgacaagtcggttgttcctggtcattgagtacgtcaacggcggggacctgatgttccacatgcagaggcagaggaagctccctgaggagcacgccaggttctacgcggccgagatctgcatcgccctcaacttcctgcacgagagggggatcatctacagggacctgaagctggacaacgtcctcctggatgcggacgggcacatcaagctcacagactacggcatgtgcaaggaaggcctgggcccctggtgacacaacgagcactttctgcggaaccccgaattacatcgcccccgaaatcctgcggggagaggagtacgggttcagcgtggactggtgggcgctgggagtcctcatgtttgagatgatggccgggcgctccccgttcgacatcatcaccgacaacccggacatgaacacagaggactaccttttccaagtgatcctggagaagcccatccggatcccccggttcctgtccgtcaaagcctcccatgttttaaaaggatttttaaataaggaccccaaagagaggctcggctgccggccacagactggattttctgacatcaagtcccacgcgttcttccgcagcatagactgggacttggatccccgggacttggcacactgcaaagcctgagtatttgtggatcacgtgatctgtgctagtgactatcaggagtctgagatttgaagcgatggatttcccagcatggtcccagctccccactgatgtgaaaggtggtggcacgttcctgggagctcggtgggaggaacccagccacgttgtgtgctgcgcaaggagccggcggcagggaggggaaaacggaaagacgcagaggagggcagatgcacagacaactcagatgcacagacgcccggacgacgtggacacccagacgatgtggacgcacagacgacatggacgcacagacgatgtggatgcacggacgacgtagacacacggatgactcatccacagatgactcagatgcacggacacccagacgacgcggacgcacagacgacgcggacgcacagatgacgtggacgcacagatgacgtggacgcacggacgacgtggatgcatggacgacgtggacgcacagatgacctggacgcacggacgacgtggacgcacggatgactcagatccccagacgactcagatgcacggacacccagatgacatggatgcacggacgactcagatccacagatgactcaaacgcacagatgactgggatgctcagatgaccgctgctgtgctgccaccccagggctctctgggcgtttcctgtggtttgggcaccaggagcctgggagtcccatgctgcccccagggcactacctcctgggcccagccctgcatccggtggcagggctcaccgtcatcaccccaacagtgcagggtggtctcagggacctcctctcatcattgccaagaactggctccaggatgtttccatgtggccggctagtatggccaaagtggaccctggcgtgctgtccccttggacgcctccaggccctgcccagcacgtggggctcgtccattctgtgcctgaccatgctctgccatgcggggcctagcccagccccccagccctgctgcttctccccaccccacccccgccacctccaccaagccaccagcatcctgcctggccctacggacagcagggtcgtcctgtgtccaaaagcctcctccccctcagccccttcactcgggtctcatggggcccctctgtggcccccagcgcacaaggcacacacccactatggggcctttgcacagctgtgccctccccaggctccagccctcacctcccccaggctatttctcagatgtcccttcagaactagagcccttgggcccccagccccattgacacggaacgggccccctgttgtatctcaggtcactgctgtggttgcagccacaggggcaacacctgttactgccacagcgtccgacctggggccagcgtgcattcaaacgcactgctctgagaggccaggacgtccatgggttgggcgcagggggcggcggtgggaaaaggtgtcaggcaccatgggtcccgacctggagcccacgtgccagctgcagagatgggcactgaaggcttttgagcaagaggaggaggtaacgctggcccctggggatgctgtcagggaaactgaggcaatcttgagccctcggagcagagaacgggctgggccaggggctggaggaccctgggccagctccagctgggtcctgctctgttcccacccctgctgcttattaaacccttgtaaagcagcacaggactaaggtagggaaagtactttaggaaatgcccctttttcacattttatcggcaggtgtttcatacaaagaatacaagtaactgatgaatgaagggggcatcttgtgtccccacaatcctgctgtgcgcacaccacagctggagaagaagcaggcgctccctccattccagccacagatcacagacgactacggtctggacaactttgacacacagttcaccagcgagcccgtgcagctgaccccagacgatgaggatgccataaagaggatcgaccagtcagagttcgaaggctttgagtatatcaacccattattgctgtccaccgaggagtcggtgtgaggccgcgtgcgtctctgtcgtggacacgcgtgattgaccctttaactgtatccttaaccaccgcatatgcatgccaggctgggcacggctccgagggcggccagggacagacgcttgcgccgagaccgcagagggaagcgtcagcgggcgctgctgggagcagaacagtccctcacacctgggcccgggcaggccagcttcgtgctggaggaacttgctgctgtgcctgcgtcgcggcggatccgcggggaccctgccgagggggctgtcatgcggtttccaaggtgcacattttccacggaaacagaactcgatgcactgacctgctccgccaggaaagtgagcgtgtagcgtcctgaggaataaaatgttccgatgatgtg

SEQ ID NO: 26257 - DNA, 2597 bp, Homo sapiens
  Clone ID: LIB4119-123-G6_FLI
ccttacacaaacaaagtcattactttgtggtaccgacctccagaactactgctaggagaggaacgttacacaccagccatagatgtttggagctgtggatgtattcttggggaactattcacaaagaagcctatttttcaagccaatctggaactggctcagctagaactgatcagccgactttgtggtagcccttgtccagctgtgtggcctgatgttatcaaactgccctacttcaacaccatgaaaccgaagaagcaatatcgaaggcgtctacgagaagaattctctttcattccttctgcagcacttgatttattggaccacatgctgacactagatcctagtaagcggtgcacagctgaacagaccctacagagcgacttccttaaagatgtcgaactcagcaaaatggctcctccagacctcccccactggcaggattgccatgagttgtggagtaagaaacggcgacgtcagcgacaaagtggtgttgtagtcgaagagccacctccatccaaaacttctcgaaaagaaactacctcagggacaagtactgagcctgtgaagaacagcagcccagcaccacctcagcctgctcctggcaaggtggagtctggggctggggatgcaataggccttgctgacatcacacaacagctgaatcaaagtgaattggcagtgttattaaacctgctgcagagccaaaccgacctgagcatccctcaaatggcacagctgcttaacatccactccaacccagagatgcagcagcagctggaagccctgaaccaatccatcagtgccctgacggaagctacttcccagcagcaggactcagagaccatggccccagaggagtctttgaaggaagcaccctctgccccagtgatcctgccttcagcagaacagacgacccttgaagcttcaagcacaccagctgacatgcagaatatattggcagttctcttgagtcagctgatgaaaacccaagagccagcaggcagtctggaggaaaacaacagtgacaagaacagtgggccacaggggccccgaagaactcccacaatgccacaggaggaggcagcagagaagaggccccctgagccccccggacctccaccgccgccacctccaccccctctggttgaaggcgatctttccagcgccccccaggagttgaacccagccgtgacagccgccttgctgcaacttttatcccagcctgaagcagagcctcctggccacctgccacatgagcaccaggccttgagaccaatggagtactccacccgaccccgtccaaacaggacttatggaaacactgatgggcctgaaacagggttcagtgccattgacactgatgaacgaaactctggtccagccttgacagaatccttggtccagaccctggtgaagaacaggaccttctcaggctctctgagccaccttggggagtccagcagttaccagggcacagggtcagtgcagtttccaggggaccaggacctccgttttgccagggtccccttagcgttacacccggtggtcgggcaaccattcctgaaggctgagggaagcagcaattctgtggtacatgcagagaccaaattgcaaaactatggggagctggggccaggaaccactggggccagcagctcaggagcaggccttcactgggggggcccaactcagtcttctgcgtatggaaaactctatcgggggcctacaagagtcccaccaagagggggaagagggagaggagttccttactaacccagagacttcagtgtcctgaaagattcctttcctatccatccttccatccagttctctgaatctttaatgaaatcatttgccagagcgaggtaatcatctgcatttggctactgcaaagctgtccgttgtattccttgctcacttgctactagcaggcgacttacgaaataatgatgttggcaccagttccccctggatgggctatagccagaacatttacttcaactctaccttagtagatacaagtagagaatatggagaggatcattacattgaaaagtaaatgttttattagttcattgcctgcacttactgatcggaagagagaaagaacagtttcagtattgagctgctctttggcttttgctataagggaaacagagtggcctggctgatttgaataaatgtttctttcctctccaccatctcacatttttgcttttaagtgaacactttttccccattgagcatcttgaacatactttttttccaaataaattactcatccttaaagtttactccactttgacaaaagatacgcccttctccctgcacataaagcaggttgtagaacgtggcattcttgggcaagtaggtagactttacccagtctctttccttttttgctgatgtgtgctctctctctctctttctctctctctctctctctctctctctctctctgtctgtctcgcttgctcgctctcgctgtttctctctctttgaggcatttgtttggaaaaaatcgttgagatgcccaagaacctgggataattctttactttttttgaaataaaggaaaggaaattcagactctt

SEQ ID NO: 26258 - DNA, 2775 bp, Homo sapiens
  Clone ID: LIB4119-126-D10_FLI
ctcttggcgggtgccggccatggcggcttcgctcccgggacctgggagccggcttttccgcacatatggggctgcggacggcaggagacagcggcggccgggccgggaagccgcgcagtggttcccgccgcaggaccggaggcgtttcttcaacagcagcggcagcagcgacgccagcatcggcgacccctcgcagtccgacgatcctgacgatcccgacgaccccgacttccccggcagcccggtgaggcggcggcggaggtgtcccggcggccgagtgcccaaggaccggcccagcctgaccgtgaccccaaagcgctggaagctgcgagctcgcccaagcctaaccgtgaccccaagacgcctggggctgcgagctcggcccccgcagaagtgcagcacaccctgcggcccgctccgacttccgcccttccccagccgcgactccggccgcctcagcccggacctcagcgtgtgcggccagcccagggacggcgacgagctgggcatcagtgcctccctgttcagctctctggcctcgccctgccccgggtccccaacgccaagggacagtgtcatctcgatcggcacctccgcctgtctggttgcagcctcagccgtcccgagcgacctccacctcccagaagtctccctggaccgagcatctctcccctgctcccaggaggaagcgacaggaggagccaaggacaccaggatggtccaccaaacccgcgccagcctcaggtcagttctctttggccttatgaactcaggaacccctgaggattctgagtttcgggcagatgggaagaatatgagagagtcctgctgtaaaaggaaactggtggtgggaaatggaccagagggtccaggtctgtcaagcacaggcaagaggagggccacaggccaggactcttgtcaagagagagggcttcaagaggccgtccggagagagcatcaggaggccagtgttcccaagggccgcattgtgccaaggggaacagacaggctggagagaactagatcaagccggaagagcaaacatcaggaggcaacggaaacctctctcctccattcccaccgctttaaaaagggccaaaagctgggaaaagattcgttccccacccaggacctgactcctttacagaatgcctgcttttggaccaaaaccagggcttccttcagtttccacaagaagaaaattgtgactgatgtgtcagaggtctgcagcatctataccactgccacttctctctctggatccctcctatcagaatgttcaaaccggcctgtcatgaacagaacaagtggtgctccgtcctcttggcactcctcctctatgtatttgctaagccccttaaacactctaagtatttcaaacaaaaaggcatctgatgctgaaaaggtttatggggaatgcagtcagaagggtcctgtcccctttagccattgccttcccacagaaaaactgcaacgctgtgagaagattggggaaggggtgtttggcgaagtgtttcaaacaattgctgatcacacacccgtagccataaaaatcattgctattgaaggaccagatttagtcaatggatcccatcagaaaacctttgaggaaatcctgccagagatcatcatctccaaagagttgagcctcttatccggtgaagtgtgcaaccgcacagaaggctttatcgggctgaactcagtgcactgtgtccagggatcttaccctcccttgctcctcaaagcctgggatcactataattcaaccaaaggctctgcaaatgaccggcctgatttttttaaagacgaccagctcttcattgtgctggaatttgagtttggagggattgacttagagcaaatgcgaaccaagttgtcttccttggctactgcaaagagcattctacaccagctcacagcctccctcgcagtggcagaggcatcactgcgctttgagcaccgagacttacactgggggaacgtgctcttaaagaaaaccagcctcaaaaaactccactacaccctcaatgggaagagcagcactatccccagctgtgggttgcaagtgagcatcattgactacaccctgtcgcgcttggaacgggatgggattgtggttttctgtgacgtttccatggatgaggacctgtttaccggtgacggtgactaccagtttgacatctacaggctcatgaagaaggagaataacaaccgctggggtgaatatcacccttatagtaatgtgctctggttacattacctgacagacaagatgctgaaacaaatgaccttcaagactaaatgtaacactcctgccatgaagcaaattaagagaaaaatccaggagttccacaggacaatgctgaacttcagctctgccactgacttgctctgccagcacagtctgtttaagtaagctaaatgtatcttactgccccgaaatgagaggagactggtcttgaagcctctggtgctgtttcaacctccgtccccacaggagggtggaactcccattctcacaggtttccagtcagcttttcaaacaagaattttgtttccaaatggaaactgaaatatttgttgaaatgtttaaatttgctgataacaaatgttctgaaagaagtaaactagccgggcgcagtggcgtgcgcctgtaatcccagctactcgggaggctgaggcaggaggatcgcttgagcccaagagttcatatctagcctggtcaacatagcaagacccctgtctctatttttttaaataaataaactacatgtg

SEQ ID NO: 26259 - DNA, 2406 bp, Homo sapiens
  Clone ID: LIB4119-128-C12_FLI
cgcccctgcagtgaccggagaacggcgtgttcctagggctctgctgccgtcgtggaagcaggatttccgcggttgtgtaacggcctgtcgcaggcgtgcagggacctggactccgcctcgtccccggggctcgggcagccgagccatggcggggaactgtggggcccgcggcgcgctgtcggcgcacacgctgctgttcgacctgccgcccgcgctgctcggagagctctgcgctgttctggacagctgcgacggcgcgctgggctggcgcggcctggcagagagactttcaagcagctggctggatgttcgtcatattgaaaagtatgtagaccaaggtaaaagtggaacaagagaattactttggtcctgggcacagaaaaacaagaccatcggtgaccttttacaggtcctccaggagatgggacatcgtcgagctattcatttaattacaaactatggagcagtgttgagtccttcagagaagagttatcaggaaggtggatttccaaatatattattcaaggaaacagccaatgtcaccgtggataatgttcttattcctgaacataatgaaaaaggagtactgcttaaatcttccatcagctttcaaaatatcatagaaggaactagaaatttccacaaagacttcctaattggagaaggagagatttttgaggtatacagagtggagattcaaaacctaacatatgctgtcaaattatttaaacaggagaaaaaaatgcagtgtaagaagcattggaagaggtttttatctgagcttgaagttttactactgtttcatcacccaaacatactagagttggctgcatattttacagagactgagaagttctgtctgatttatccatacatgagaaatggaacactttttgacagattgcagtgtgtaggtgacacggccccactcccttggcacattcgaatcggtatattaataggaatatccaaagccattcactacctgcacaacgttcaaccatgctcggtcatctgtggcagtatatcaagtgcaaacatccttttggatgatcagtttcaacccaaactaactgattttgccatggcacacttccggtcccacctagaacatcagagttgtaccataaatatgaccagcagcagcagtaaacatctgtggtacatgccagaagagtacatcagacaggggaaactttccattaaaacagatgtctacagctttggaattgtaataatggaagttctaacaggatgtagagtagtgttagatgatccaaaacatatccagctgcgggatctccttagagaattgatggagaagagaggcctggattcatgtctctcatttctagataagaaagtgcctccctgccctcggaatttctctgccaagctcttctgtttggcaggccggtgtgctgcaacgcgggcaaagttaagaccatcaatggatgaagttttaaatactcttgaaagtactcaagccagcttgtattttgctgaagatcctcccacatcactaaagtccttcaggtgtccttctcctctattcctggagaatgtaccaagtattccagtggaagatgatgaaagccagaataacaatttactaccttctgatgaaggcctgaggatagacagaatgactcagaaaactccttttgaatgcagccagtctgaggttatgtttctgagcttggacaaaaagccagagagcaagagaaatgaggaagcttgcaacatgcccagttcttcttgtgaagaaagttggttcccaaagtatatagttccatcccaggacttaaggccctataaggtaaatatagatccttcttcagaagctccagggcattcttgcaggagcaggccagtggagagcagctgttcctccaaattttcctgggatgaatatgaacagtacaaaaaagaataaattctaccagaagataaagaaaaaagcaagtattgcataggcacctgagcataggtatgaccttgggaagacattggctccataagcaatgccaagagaatgatcaatagtgagtttgggtgatgcagataaacaatctggataattccatttcttttttcccaaaccctcaaacagagtgccttaaaaaattgttttatcaggataattgtctcatgaccaaatccacgctcaattagagccattcaaaattccttaagatcatgggttctgacttcagccaaacaaaacaatcaaaacctaccaaaaagggactggattgtaatgtcctctccatcatcctcagtgtgagtcctcagagcctccatctgccaagaacattcagttggattccatcgtttggtttagcttgcttgcacgggttgtaggaaatgtctaatttgtaaatgttaatagatacctttggaaag

SEQ ID NO: 26260 - DNA, 3544 bp, Homo sapiens
  Clone ID: LIB4119-128-E10_FLI
gcagcggcgtcgtcgcgggccgggccccagcaatcccgcccgggcccggctgcctcaacagccgcccccactgccccctctcgggcatgaaccgagcttcttgttgccgcccgctgccctacccgccgctgccgccgcatcccgactctgggccagcgctgggaacatgcccctggccgcctactgctacctgcgggtcgtgggcaaggggagctatggagaggtgacgcttgtgaagcaccggcgggacggcaagcagtatgtcatcaaaaaactgaacctccgaaatgcctctagccgagagcggcgagctgctgaacaggaagcccagctcttgtctcagttgaagcatcccaacattgtcacctacaaggagtcatgggaaggaggagatggtctgctctacattgtcatgggcttctgtgaaggaggtgatttgtaccgaaagctcaaggagcagaaagggcagcttctgccggagaatcaggtggtagagtggtttgtacagatcgccatggctttgcagtatttacatgaaaaacacatccttcatcgagatctgaaaactcaaaatgtcttcctaacaagaacaaacatcatcaaagtaggggacctaggaattgcccgagtgttggagaaccactgtgacatggctagcaccctcattggcacaccctactacatgagccctgaattgttctcaaacaaaccctacaactataagtctgatgtttgggctctaggatgctgtgtctatgaaatggccaccttgaagcatgctttcaatgcaaaagatatgaattctttagtttatcggattattgaaggaaagctgccagcaatgccaagagattacagcccagagctggcagaactgataagaacaatgctgagcaaaaggcctgaagaaaggccgtctgtgaggagcatcctgaggcagccttatataaagcggcaaatctccttctttttggaggccacaaagataaaaacctccaaaaataacattaaaaatggtgactctcaatccaagccttttgctacagtggtttctggagaggcagaatcaaatcatgaagtaatccacccccaaccactctcttctgagggctcccagacatatataatgggtgaaggcaaatgtttgtcccaggagaaacccagggcctctggtctcttgaagtcacctgccagtctgaaagcccatacctgcaaacaggacttgagcaataccacagaactagccacaatcagtagcgtaaatattgacatcttacctgcaaaagggagggattcagtgagtgatggctttgttcaggagaatcagccaagatatttggatgcctctaatgagttaggaggtatatgcagtatttctcaagtggaagaggagatgctgcaggacaacactaaatccagtgcccagcctgaaaacctgattcccatgtggtcctctgacattgtcactggggaaaagaatgaaccagtgaagcctctgcagcccctaatcaaagaacaaaagccaaaggaccaggatcaagttgctggtgaatgtattatagaaaaacagggcagaatccacccagatttacagccacacaactctgggtctgaaccttccctgtctcgacagcgacggcaaaagaggagagaacagactgagcacagaggggaaaagagacaggtccgcagagatctctttgctttccaagagtcgcctcctcgatttttgccttctcatcccattgttgggaaagtggatgtcacatcaacacaaaaagaggctgaaaaccaacgtagagtggtcactgggtctgtgagcagttcaaggagcagtgagatgtcatcatcaaaggatcgaccattatcagccagagagaggaggcgactaaagcagtcacaggaagaaatgtcctcttcaggcccttcagtgaggaaagcgtctctgagtgtagcagggccaggaaaaccccaggaagaagaccagcccttgcctgcccgacggctctcctctgactgcagcgtcactcaggaaaggaaacagattcattgtctgtctgaggatgagttaagttcttctacaagttcaactgataagtcagatggggattacggggaagggaaaggtcagacaaatgaaattaatgccttggtacaattgatgactcagaccctgaaactggattctaaagagagctgtgaagatgtcccggtagcaaacccagtgtcagaattcaaacttcatcggaaatatcgggacacactgatacttcatgggaaggttgcagaagaggcagaggaaatccattttaaagagctaccttcagctattatgccaggttctgaaaagatcaggagactagttgaagtcttgagaactgatgtaattcgtggcctgggagttcagcttttagagcaggtgtatgatcttttggaggaggaggatgaatttgatagagaggtacgtttgcgggagcacatgggtgaaaagtatacaacttacagtgtgaaagctcgccagttgaaattttttgaagaaaacatgaatttttgagcatttgtcctaatctgctgccagaattaaagacctatttttagaggattttggcttaaaaagcaagggcaaacagtcatttggaagccactcaccactgttttatatctcttttttatatctctttggcgtttccctacagaaaagaaattggacagaacagaataatatgaagcaggatcacaaaagaaaaaaaactttggctttcatattctctttgtgaggacaaatctgttgtttgtttgattactgtttactgagccttaatccaccaagtttatatttagaattttatttttttaaggtactaattaacttaaacacagagctataaaatgctggattgaaaattttatattgtaatgtagagataaaagcagtaggagaaacaaatgacataatatgtcgtcataattcctgctattgttaataaccttaaggagtagttgataaattataaaattttaaaaagtcaattcagttctagaaatagatttaaagaatatgaagttctatctagtacttgagcagctgtatttcttttctacacattgatggacttttaatattttattctcatttaatataaacctcatctagggtatatacaaattaaaactgagacacattggctttgtaaatcagtatgtttttacataatggttttgttagatttatttttccatcagtgaaaacatttcttaaacacaaatttcatttccatttaagcaatttgtaagcaaagtccaggtccatttagtttttggatatatttaatgtttgtctcctgaagtttgtcttcatgtactgtaagatattagttgtctttccatgttttaaatgtatgattatatagcacatattttattagttgtttaataagaggtaatacccatctaggaaagaaattttatgaagttaaatacaagtcttgaatagtacattttcacttctgtattcgagggactctaaaaataaatattgctccag

SEQ ID NO: 26261 - DNA, 2865 bp, Homo sapiens
  Clone ID: LIB4119-180-G1_FLI
gcggcctttgaacaagtaagtgagccaccctcggagacccccgcgctggggacgggaggccggcgagcctcgggacctctgaaagccttgaggaggcgcggggacaccatggccgagcctctgaaggaggaagacggcgaggacggctctgcggagccccccgggcccgtgaaggccgaacccgcccacaccgctgcctctgtagcggccaagaacctggccctgcttaaagcccgctccttcgatgtgacctttgacgtgggcgacgagtacgagatcatcgagaccataggcaacggggcctatggagtggtgtcctccgcccgccgccgcctcaccggccagcaggtggccatcaagaagatccctaatgctttcgatgtggtgaccaatgccaagcggaccctcagggagctgaagatcctcaagcactttaaacacgacaacatcatcgccatcaaggacatcctgaggcccaccgtgccctatggcgaattcaaatctgtctacgtggtcctggacctgatggaaagcgacctgcaccagatcatccactcctcacagcccctcacactggaacacgtgcgctacttcctgtaccaactgctgcggggcctgaagtacatgcactcggctcaggtcatccaccgtgacctgaagccctccaacctattggtgaatgagaactgtgagctcaagattggtgactttggtatggctcgtggcctgtgcacctcgcccgctgaacatcagtacttcatgactgagtatgtggccacgcgctggtaccgtgcgcccgagctcatgctctctttgcatgagtatacacaggctattgacctctggtctgtgggctgcatctttggtgagatgctggcccggcgccagctcttcccaggcaaaaactatgtacaccagctacagctcatcatgatggtgctgggtaccccatcaccagccgtgattcaggctgtgggggctgagagggtgcgggcctatatccagagcttgccaccacgccagcctgtgccctgggagacagtgtacccaggtgccgaccgccaggccctatcactgctgggtcgcatgctgcgttttgagcccagcgctcgcatctcagcagctgctgcccttcgccaccctttcctggccaagtaccatgatcctgatgatgagcctgactgtgccccgccctttgactttgcctttgaccgcgaagccctcactcgggagcgcattaaggaggccattgtggctgaaattgaggacttccatgcaaggcgtgagggcatccgccaacagatccgcttccagccttctctacagcctgtggctagtgagcctggctgtccagatgttgaaatgcccagtccctgggctcccagtggggactgtgccatggagtctccaccaccagccccgccaccatgccccggccctgcacctgacaccattgatctgaccctgcagccacctccaccagtcagtgagcctgccccaccaaagaaagatggtgccatctcagacaatactaaggctgcccttaaagctgccctgctcaagtctttgaggagccggctcagagatggccccagcgcacccctggaggctcctgagcctcggaagccggtgacagcccaggagcgccagcgggagcgggaggagaagcggcggaggcggcaagaacgagccaaggagcgggagaaacggcggcaggagcgggagcgaaaggaacggggggctggggcctctgggggcccctccactgaccccttggctggactagtgctcagtgacaatgacagaagcctgttggaacgctggactcgaatggcccggcccgcagccccagccctcacctctgtgccggcccctgccccagcgccaacgccaaccccaaccccagtccaacctaccagtcctcctcctggccctgtagcccagcccactggcccgcaaccacaatctgcgggctctacctctggccctgtaccccagcctgcctgcccaccccctggccctgcaccccaccccactggccctcctgggcccatccctgtccccgcgccaccccagattgccacctccaccagcctcctggctgcccagtcacttgtgccaccccctgggctgcctggctccagcaccccaggagttttgccttacttccacctggcctgccgcccccagacgccgggggagcccctcagtcttccatgtcagagtcacctgatgtcaaccttgtgacccagcagctatctaagtcacaggtggaggaccccctgccccctgtgttctcaggcacaccaaagggcagtggggctggctacggtgttggctttgacctggaggaattcttaaaccagtctttcgacatgggcgtggctgatgggccacaggatggccaggcagattcagcctctctctcagcctccctgcttgctgactggctcgaaggccatggcatgaaccctgccgatattgagtccctgcagcgtgagatccagatggactccccaatgctgctggctgacctgcctgacctccaggacccctgaggcccccagcctgtgccttgctgccacagtagacctagttccaggatccatgggagcattctcaaaggctttagccctggacccagcaggtgaggctcggcttggattattctgcaggttcatctcagacccacctttcagccttaagcagccacctgagccaccaccgagccatggcaggatcgggagaccccaactccccctgaacaatccttttcaggattatatttttattattattatggtattattacactgtctttttgccatcaaaatgaggcctgtgaaatacaaggttcccttctgc

SEQ ID NO: 26262 - DNA, 2549 bp, Homo sapiens
  Clone ID: LIB4119-182-C9_FLI
gcagctcggcgctgcggacacttttagctgagggcgcgggcgggtcggctcctccgcggctcctcggccccacctgcgcggagagggcgggatgccagagccaggtgtcccggcgcgttaagggccctcgcagtcagacgtccctgcaccggcgctcgcacccttagtcggcccggaacgtctttttgcggacgccctcggagcagccgcgatggccagcaccaggagtatcgagctggagcactttgaggaacgggacaaaaggccgcggccggggtcgcggagaggggcccccagctcctccgggggcagcagcagctcgggccccaaggggaacgggctcatccccagtccggcgcacagtgcccactgcagcttctaccgcacgcggaccctgcaggccctcagctcggagaagaaggccaagaaggcgcgcttctaccggaacggggaccgctacttcaagggcctggtgtttgccatctccagcgaccgcttccggtccttcgatgcgctcctcatagagctcacccgctccctgtcggacaacgtgaacctgccccagggtgtccgcactatctacaccatcgacggcagccggaaggtcaccagcctggacgagctgctggaaggtgagagttacgtgtgtgcatccaatgaaccatttcgtaaagtcgattacaccaaaaatattaatccaaactggtctgtgaacatcaagggtgggacatcccgagcgctggctgctgcctcctctgtgaaaagtgaagtaaaagaaagtaaagatttcatcaaacccaagttagtgactgtgattcgaagtggagtgaagcctagaaaagccgtgcggatccttctgaataaaaagactgctcattcctttgaacaagtcttaacagatatcaccgaagccattaaactagactcaggagtcgtcaagaggctctgcaccctggatggaaagcaggtaagatgcttctagctcccagctctccatctgacttttaaactccctgtgccatggtggctacatagtcaacaatagaaatttagtagtgtgctagaaatccttctgggagtcatacttgagattgtgtgtgtgtgtgtatgtgtgtgtgtgtgtatgtatgtaaaattaaccatttttgtgaaaaatgtaagcgacttaagtacctcaaaagtgattatagagaagtctatcatatacttcttttggttattggaaggaaaatgtaaatttctgagggaaaagtataagttgaggagacatcctacgttaaatggcatgtcatctatttatgaataactgttgatttgtaaagtcattatggacttgggtatcacaggagtcaaaattaaaagtatttaacattcttagaaaaaccttttcttccccacttacatataatagggaaaatgtatttcaaaagaaagtacttttataggaatgtctgtaaaagtttcatagggagcaatggaggtaattagtgagcatttttgaaaaatgaaaaattgcacaggaaaaagcaattaaaattatggcaacaatgtatcagggaacctaagggacaaaaaaagttggcatattgcaaaaacacatgaatagccgttaggtaagtgttgaattttgctacaatcagattatcattgctaaaaagaagcttggcttctgaagtgtattttcccccaaattccataaagttaaattgtttatatttacattgtattaaaattatagtttccaaaattaaatttgtttctttgttccattttgcctcttccctgtaacatacttaatttattttgaagtgttctgctcttgaagtgctgagaatgaataatataaaacattgagcagtgtctttgggaaaaacacaatcaaattagtctccaattttctaagaccagatctagttagtacagtgcttgctgaaacattagcaattttttaaaaatacgttctaaagattccagtagattatggtaaaattagaataacatttctaattaattaataaggtatatagtacctcatagccgcctgcccccaaatatgtgtgaatgatgatagacacttcatataatttagttaatagcacagtacaacacaaaacaccttaagatttactctgcaagtaaggaaaaataaattaggctacaggaaaaaggtatttgacaaatcaaatagttgattcttgatgggcacagggaagacacatatagagacaaaaatttaagatacctaaccaaagaaaaaaatctaaactcaccaatttaggggaaaaaggcatataaacagtaaatacagatgtgatttgaaaaattagagctcaagtttggaaatccccaaatgaatgacattcagggaaaatataggtgaaataaaagaagttgtggtcaggtgtggtggtgcactcctatagttccagctacttgggaggctgaagtgggaggatcctttgaacccaggagtttcgggctgcagtgagctatgattgtgccactgcactccaacctgggtgctggtgacaaaaaagaccacatctcct

SEQ ID NO: 26263 - DNA, 1913 bp, Homo sapiens
  Clone ID: LIB4119-186-B6_FLI
tcatggcgttcagggcctgacggttgctagggtgacagggacacaacatggcggcgggatctctaacgctctccttcgagggaccaccacggagatcctagtgcgggaccccgcctcagggaagtggaaagcagggggacaaccttcctgcttctttcttttccgtccagtgtcggcaaggggttgtcaccggcttccgcatccaagatgaagaactataaagcaattggcaaaataggagagggaacgttttctgaagttatgaagatgcaaagcctgagagatggaaactactatgcatgtaaacaaatgaagcagcgctttgaaagtattgagcaagtcaacaacctacgagagatccaagcactgaggcgcctgaatccgcacccaaacattcttatgttgcatgaagtggtttttgacagaaaatctggttctcttgcactaatatgtgaacttatggacatgaatatttatgagctaatacgagggagaagatacccattatcagaaaaaaaaattatgcactatatgtaccagttatgtaagtccctggatcatattcacagaaatggaatatttcacagagatgtaaaaccagaaaatatactaataaaggatgtcctgaaattaggggactttggctcctgccggagtgtctattccaagcagccgtacacggaatacatctccacccgctggtaccgggccccggagtgtctcctcactgatgggttctacacgtacaagatggacctgtggagcgccggctgtgtgttctacgagatcgccagtctgcagcccctctttcctggagtaaatgaactggaccaaatctcaaaaatccacgatgtcatcggcacacccgctcagaagatcctcaccaagttcaaacagtcgagagctatgaattttgattttccttttaaaaagggatcaggaatacctctactaacaaccaatttgtccccacaatgcctctccctcctgcacgcaatggtggcctatgatcccgatgagagaatcgccgcccaccaggccctgcagcacccctacttccaagaacagaggaaaacagagaagcgggctctgggcagccacagaaaagctggctttccggagcaccctgtggcaccggaaccactcagtaacagctgccagatttccaaggagggcagaaagcagaaacagtccctaaagcaagaggaggaccgtcccaagagacgaggaccggcctatgtcatggaactgcccaaactaaagctttcgggagtggtcagactgtcgtcttactccagccccacgctgcagtccgtgcttggatctggaacaaatggaagagtgccggtgctgagacccttgaagtgcatccctgcgagcaagaagacagatccgcggaaggaccttaagcctgccccgcagcagtgtcgcctgcccaccatagtgcggaaaggcggaagataactgagcagcaccgtcgtctcgacttcggaggcaacaccaagcccgaccgggccaggcctgggcgatctgctgctgagacgccacggagggctggggatgcgcctgcgtccgtttcgcgctggccggggctctgggtgctgccctgcgccctgccgcacccgcggcccgcgcagctgcctaggatgttctgggctaatatacttgtaaaaccaccgcattctagggttttctttcattttcgttaagaatttggggcaggaaatactttgtaactttgtatatgaatcaaaacaaacgagcaggcatttctgtgatgtgttgggcgtggttggaaggtgggttctgcgtgtcccttcccagcgctgctggtcagtcgtggagcgccatcatgtcttaccagtgacgctgctgacacccctgacttttattaaagaataagctgtcgttac

SEQ ID NO: 26264 - DNA, 1661 bp, Homo sapiens
  Clone ID: LIB4119-194-C1_FLI
ggcggcgggatctctaacgctctccttcgagggaccaccacggagatcctagtgcgggaccccgcctcagggaagtggaaagcagggggacaaccttcctgcttctttcttttccgtccagtgtcggcaaggggttgtcaccggcttccgcatccaagatgaagaactataaagcaattggcaaaataggagagggaacgttttctgaagttatgaagatgcaaagcctgagagatggaaactactatgcatgtaaacaaatgaagcagcgctttgaaagtgacagaaaatctggttctcttgcactaatatgtgaacttatggacatgaatatttatgagctaatacgagggagaagatacccattatcagaaaaaaaaattatgcactatatgtaccagttatgtaagtccctggatcatattcacagaaatggaatatttcacagagatgtaaaaccagaaaatatactaataaagcaggatgtcctgaaattaggggactttggctcctgccggagtgtctattccaagcagccgtacacggaatacatctccacccgctggtaccgggccccggagtgtctcctcactgatgggttctacacgtacaagatggacctgtggagcgccggctgtgtgttctacgagatcgccagtctgcagcccctctttcctggagtaaatgaactggaccaaatctcaaaaatccacgatgtcatcggcacacccgctcagaagatcctcaccaagttcaaacagtcgagagctatgaattttgattttccttttaaaaagggatcaggaatacctctactaacaaccaatttgtccccacaatgcctctccctcctgcacgcaatggtggcctatgatcccgatgagagaatcgccgcccaccaggccctgcagcacccctacttccaagaacagagaaacagtccctaaagcaagaggaggaccgtcccaagagacgaggaccggcctatgtcatggaactgcccaaactaaagctttcgggagtggtcagactgtcgtcttactccagccccacgctgcagtccgtgcttggatctggaacaaatggaagagtgccggtgctgagacccttgaagtgcatccctgcgagcaagaagacagatccgcagaaggaccttaagcctgccccgcagcagtgtcgcctgcccaccatagtgcggaaaggcggaagataactgagcagcaccgtcgtctcgacttcggaggcaacaccaagcccgaccgggccaggcctgggtgatctgctgctgagacgccacggagggctggggatgcgcctgcgtccgtttcgcgctggccggggctctgggtgctgccctgcgccctgccgcacccgcggcccgcgcagctgcctaggatgttctgggctaatatacttgtaaaaccaccgcattctagggttttctttcattttcgttaagaatttggggcaggaaatactttgtaactttgtatatgaatcaaaacaaacgagcaggcatttctgtgatgtgttgggcgtggttggaaggtgggttctgcgtgtcccttcccagcgctgctggtcagtcgtggagcgccatcatgtcttaccagtgacgctgctgacacccctgacttttattaaagaataagctgtcgttt

SEQ ID NO: 26265 - DNA, 1627 bp, Homo sapiens
  Clone ID: LIB4119-200-E7_FLI
gtcactgtcagcccctcatctccccccacacctcctagccaggccttgtcctcgctcaaggctgtgggtccaccaccccaaacccctccacgaagacacaggggcctgcaggctgcccggccagcggagcccaccctacccagtacccacgtcaccccaagtgagcccaagcctttcgtccttgacactgggaccccgatcccagcctccactcctcaaggggttaaaccagtgtcttcctctactcctgtgtatgtggtgacttcctttgtgtctgcaccaccagcccctgagcccccagcccctgagccccctcctgagcctaccaaggtgactgtgcagagcctcagcccggccaaggaggtggtcagctcccctgggagcagtccccgaagctctcccaggcctgagggtaccactcttcgacagggtccccctcagaaaccctacaccttcctggaggagaaagccaggggccgctttggtgttgtgcgagcgtgccgggagaatgccacggggcgaacgttcgtggccaagatcgtgccctatgctgccgagggcaagcggcgggtcctgcaggagtacgaggtgctgcggaccctgcaccacgagcggatcatgtccctgcacgaggcctacatcacccctcggtacctcgtgctcattgctgagagctgtggcaaccgggaactcctctgtgggctcagtgacaggttccggtattctgaggatgacgtggccacttacatggtgcagctgctacaaggcctggactacctccacggccaccacgtgctccacctagacatcaagccagacaacctgctgctggcccctgacaatgccctcaagattgtggactttggcagtgcccagccctacaacccccaggcccttaggccccttggccaccgcacgggcacgctggagttcatggctccggagatggtgaagggagaacccatcggctctgccacggacatctggggagcgggtgtgctcacttacattatgctcagtggacgctccccgttctatgagccagacccccaggaaacggaggctcggattgtggggggccgctttgatgccttccagctgtaccccaatacatcccagagcgccaccctcttcttgcgaaaggttctctctgtacatccctggagccggccctccctgcaggactgcctggcccacccatggttgcaggacgcctacctgatgaagctgcgccgccagacgctcaccttcggttaccaccagcagcaacatctggctgggctcttacctcatagaccttcaaggacagagaccccagggcctggacctgatgccaccccaggccaaagccagagtgggagacccattggtcaggctcagcagggtgggaacaggcagagggacaagaggggaatggagaagtggagaggaaaaggaatcgagggacaggaagggggaggctctaggaaggttctgggttgggggtcagtgcatctcagggagaaccaaggaaggtgggcatggctggagaggaggaaaaggaaggagcccatgttgtcctgaccatccctcccagccatccagctgtctgtctgtctgccacaaggaaataaaaatggcaagcagc

SEQ ID NO: 26266 - DNA, 1628 bp, Homo sapiens
  Clone ID: LIB4119-226-G4_FLI
ctgaagcagagcccgagaacggggctggaggtcccagggtcccgggttggtgggggtggagcagcacttcatcgccgcgggggtgctgggactccggccgcagtgccgccgccatcatggacttcctgtgggacaagcgcacgggcctggccgccagaaagatgcctcatcctcgaaggtaccattcctcagagcgaggcagccgggggagttactgtgaacactatcggagccgaaaacaagcaacgaagaagccgttcctggtcaagtagtagtgaccggacacgacggcgccggcgagaggacagctaccatgtccggaggaggtgcagccggacatttagccgctcgtcttcgcagcacagcagccggaaagccaagagtgtagaggacgacactgagggccacctcatctaccatgtcggggactggctacaagagcgatatgaaatcgtcagcaccttaggaaaggggaccttcggccgagttgtacaatgtgttgaccatcgcaggcgtggggctcgagttgccctgaagatcattaagaatgtggagaagtataaggaagcagctcgacttgagatcaaagtgctggagaaaatcaacgagaaagaccctggcaagaacctctgtgtccagatgtttgactggttcgactaccatggccacatgtgtatctccttggagcttctgggccttagcaccttcgatttcctcaaagacaacaaccacctgccctaccccatccaccaagtgcaccacatggcctcccagctgtgccaggctgtcaagttcctccatgataacaagctgacacatacagacctcaagcctgaaaatattctgtttgtgaattcagactatgagctcacctacaacctagagaagaagcgacatgagcgcagtgtgaagagcacagctgtgcgggtgggagactttggcagtgccacctttgaccatgagcaccatagcaccattgtctccactcgccattaccgagcaccagaagtcatccttgagttgggttggtcacagccttgtgatgtgtggagtataggctgcatcatctttgagtactatgtgggcttcaccctcttccagacccatgacaacagacagcatctagccacgatggaaaggatcttgggtcctatcccttcccggatgatccgaaagacaagaaaacagaaatatttttaccggggtcgcctggattgggatgagaacacatcagctggacgctatgttcgtgagaactgcaaaccgctgcggcagtatctgacctcagaggcagaggaagaccaccagctcttcgatctgattgaaagcatgctagagtatgaaccagctcagcggctgaccttgggtgaagcccttcagcatcctttcttctcccgcctttgggctgagccacccaacaagttgtgggactccagtcaggatatcagtccgtgaccaccaggccctgggcctccctgcatcttttatagcagtgagtgtccagtccaggacattggtgcttttttataaaagagaacagagccagagttcactccttcctgctggttctctatatacctgtgaatatgtgaaacagtaaatatgaaagaacttgtacctatcacttc

SEQ ID NO: 26267 - DNA, 1024 bp, Triticum aestivum
  Clone ID: LIB4126-025-F11_FLI
tgaagatggggcgcggcaagatagtgatccggcggatcgacaactccacgagccggcaggtgacgttctcgaagcggcggaacgggatcttcaagaaggccaaggagctgggtattctctgcgatgccgaggtcggtctcgtcatcttctccagcaccggccgcctctatgagtacgccagctccagcatgaagtcagtgatagatcgatatggacgagccaaggaggagcagcaacttgttgcaaaccccaactcggagcttaagttctggcaaagggaggcagcaagcttgagacaacaactgcacaacttgcaagaaaatcatcggcagttgatgggacaagatctttctggaatgggtgtcaaggaactacagactctagaaaatcaactggaaataagcctgcgttgcatccggacaaaaaaggaccaaatcttaattgatgagattcatgaactgaatcacaaggggagtcttgtccaccaagaaaacatggaattatacaaaaagattaacctaattcgtcaagaaaatgctgagttacacaaaaagctctctgagacggaggcagcgactgaagttaaccgagattcaagaaccccatacaattttgcagttgttgaagatgccaatgtttctgttaatcttgaactcaattccccgcagcaacaaaatgatgttcagcatactgcgccccctaaactaggattgcaactacatccatgacgatcgtggggtatggggttactcttgttgttattattctcaagggatacaattcagagcagccagaatattcctggttgtaaagaacctaaacccatagcaagacataagtggttcgcatgtgacgaccgattgataaacggtagtgtaaatctgttacaaataaaatgtactccatggaaggattaatctgatgtgcaaatggttgtattagaactatttaacacattctgcgagtttgttcaactgcatgagcggctagcttattgacaaaaggtgtgaagtgtggattgagc

SEQ ID NO: 26268 - DNA, 2963 bp, Glycine max
  Clone ID: LIB4127-086-F3_FLI
ctttccctttctctctttttttccttcatcaatggtggcggtaacttttgagaaagctctgtcttttggctcttggagctcaaaagcaagagcaccttagattataagatcggtttcgctttcattctgtcccttttctcagagagagcaacgaggtcttatagttaaatctgatgctgaagattgaggaacttaaagtttgaagtttgaggagtgtttgtgattacaaagaatatggatcaaaatagggatgagagctggaggaaattagtgaagaagatgcttcctcctggtgcttccatacctgctgatgcttctaatcttgattactccatagctatggaatatgttggtccaccagtttcatatgaagtaccaagagttgagccctttgatacaaactcaagagcaattcccactgctcaaccactctctggatcacaaagatcaaatactcacggggggcatatggtgattgaaccaatccctctaccggtgtctcgtattgctgttggcgtaacgagctctcctaatcaaagtccaagggtgtcaggaagttcagattctgtggtttctgtcttacagaacccagatctttcttctgcatcaccttcggcttcacctgcttcagttcataatcttccaagcaatcctcctaagccagctaatgaagcgaagagggccccggttgtcacttttaatactgttgatagacctcagaggaaagaggtggaggttgtgaagccagtttatgcggaatacgttggagttttgaacgaaaggaagaaaaagaaaataagagtttgttacaggtgcggaaaagggaagtgggaaactaaggagtcttgcatagtttgtaatgccaagtattgcagcaactgtgtgcttagggcaatgggatcaatgcctgaaggacgcaaatgtgtaacatgcatttgtcagccaattgatgaatcgaggagactgaaattgggtaaatattcaagggtgttgtcccgactgttaagccctctagaagtcaagcaaattatgaaagcagagaaagaatgttctgctaatcagcttcggccggagcagctgattgtcaatggattgcccctgaagccagatgagatggctgaattacttggatgccccttgcctccgcgtaagctgaagcctggtagatattggtatgacaaagaatctggtctctggggaaaggagggggagcaacctgacagaatcataagttcaaacttgaatttcactgggaaacttagccttgatgctagtaatggaaacaccgaggtttacatgaatggtcgagagatcacaaaacttgaattgagggtactcaagctggcaaatgtacagtgtccacgtgatacacacttttgggtttatgatgatggtcgttatgaggaggaaggtcaaaataatattagaggaaacatttgggagaaggcctcaacaagattcgtatgtgccttattctctctaccctttccccatggtcagcctcatgggcaaaaggatgaaactagtcactataccacagttcctaagtatctggaacagaaaaaaactcagaagcttcttcttcttggaattcaaggatctggtactagcactatatttaagcaggccaagtttttgtatgggaacaaattttctgctgaagagcttcaggatgtcaaactgatgatccagagtagcatgtataagtatcttagtattttacttgatggaagagagcgctttgaagaggaggctgtttctagaatgaatggacaaggttctcctggtcaaactatggaaacaggtagcaatggtgaagcaagtaatactagtgaatgcatttattccctcaacccaaggctaaaacatttctctgactggctcctggacattatagccactggggatttagatgccttcttccctgcagccacacgtgaatatgcaccattagttgaagaagtatggagggatcctgcaatacaagaaaccttcaaaagaaaagatgagcttcactttcttccagatgttgccgagtacttcttaagccgggcggttgagatatctagcaatgaatacgaaccttctgaaagggacatagtatatgcagaaggggttactcagggaaatggtttggctttcatggaattttcacttgatgaccgcatcccaaagtctgatacttattcggagaacctggatgctcagctgccaccattggccaagtatcaactcataagggtgaatgccaagggcctgaatgagggctgcaagtgggttgaaatgttcgaagacgttcgagcagtggtcttttgtgtttccctaagcgactacgatcagttgttgctttccccagacagtagtggcagtggaacacttgttcaaaacaagatggtacaaagcaaggaacttttcgagaccatggtgaggcacccttgcttcaaagacacccctttggtgctagtccttaacaagtatgatatcttcgaggaaaagattagcagggtgtccctaaatacatgtgaatggttcagcgatttttgtcccgtgcacgcacatcataataaccagtcactggcccatcaagcttacttctatgttgccatgaaattcaaggacctttatgcatccctcacaggtaaaaaactctttgtggcacaagcaagggcaagggaccgagtaactgttgatgaggcattcaagtacataagagaggtcctcaaatgggatgaagagaaggaagagaatttctatggtccacctgaagattcattttacagcacagacataagctcctctccctttgtcagacaagagtgagtgagtgtccataaaaaaaatgttattatttggctgttgaaaagggtggaaaatgtaacatgctggccagcttgtgttctgtgatcttttatgtattctgaaatgttacgtgaaagttattgatggttttggtagagttcttt

SEQ ID NO: 26269 - DNA, 1340 bp, Zea mays
  Clone ID: LIB4171-001-H7_FLI
gttcccgtgtcgtcctcccgacaaagagggagccgctagggtttagcggcttccgcgtctgggcgagggcttacccgcgagggacggcgcgacgcggcggcacttgagctagggtttaaccctccgatcccgttcctttcccggcgaggcgatggacgaggcggcgattgacgacttgatccggcggctcctcgaggcccgcggcgggcgcaccccgcgcaacgcgcaggtgactgacgccgagatccggcgcctctgcgccaccgccaaggacgttttcctctcccagcccaacctcctggagctcgaggcccccattaagatatgcggggatgtccatggccagtattcagacctccttcgattatttgagtatggtggctatccaccagatgcaaattatctgttcctgggtgactatgttgatcgggggaaacagagcatagaaacaatatgccttctcttggcgtacaagataaagtacccagaaaacttctttcttctcaggggaaaccatgaatgtgcctcgatcaaccggatatatgggttttttgatgagtgtaagaggagattcaatgtgcgtatctggaagatattcactgagtgttttaactgcctcccagtggctgcacttattgacgataagatcttttgcatgcatggggggttgtctcctgagctaaagaacatggatcaaatacgtaacatttctcgtcctgtggatgttcctgacgttggtcttctatgtgatctgttatggtcggaccctgataaagagattgttgggtggggtgagaatgacaggggtgtttcctacacctttggagctgacatagttgctgagtttcttcagaaacatgatctagatttgatctgcagggctcaccaggtcgtagaggatggctatgagtttttcgcaaatcgccagcttgtaacaatattctcagcaccgaactactgtggagagtttgacaatgctggtgcactgatgagcatcgacgactccctagtatgctcgttccagatactcaagccttctgaaaagaaaagaaaagcaggagctgagaacatgccaaagcccggtacacctcccaggaagataaaaataagtgttacccgcatttagccagattctcgttatcaaactggatttgagaagttgtgattaaatgctccccaaacttgttatggtaggttttttggtgagcttaacacggtgttaaactgtggagtgtggaccaccgtgcttatgtcttgctgatctgaagtcatgcaaatgtatcctggcgttttgccaaacaaaaaagatcatgctaacagaaacttctggattttttttt

SEQ ID NO: 26270 - DNA, 1640 bp, Oryza sativa
  Clone ID: LIB4309-013-D9_FLI
ctcctcctcccgtcttttccaccaccaccaccctcgcgtgccctaatttctcgctgctccttgtcccccacctcctttacttgagcttgctcaccactgcctccatatacagagagtcttctctgtatttctctctctcagtgggaggctcacaagaatctttcagctcacatctcactgtccttgcctttctctagctaggtactactactgctagtactaaccactgctcgtgttcttgggacttcttcttcttcttgttcttgttcttaaaatcatttggggttttgagctccagggaggtccaagaacagagcagcaggatggtgcagtggcgtttctgagagcagcatgagtactcgcaccaccgagctgggatggtcggcgatggcgaacaccgatgcagccgccgccgatgagggagaggcagcggtggcggcctgaggaagacgccatcctcctcgcctacgtccgccagtatgggccccgggagtggagcctcgtgtcccagcggatgaaccgccccctccaccgcgacgccaagtcctgcctcgagcgctggaagaactacctccgcccggggatcaagaaaggttcgctcaccgacgacgagcagcgcctcgtcatccgcctccaggccaagcacggcaacaagtggaagaagatcgccgccgaggtccccggccggacggcgaagcggctgggcaagtggtgggaggtgttcaaggagaagcagcagcgggagctccgggatcgggatcgccggcgactcccgccgccgctggacggcgacgagcgcggctgcgccggcgggcgatacgactggctcctcgaggacttcgccgacaagctcgtcaacgaccaccaccgccgaatgatggctgccccgatcctcccgccgtggatgtcgtcgtcgccgtcgtcttcttcctcgccgtcggtgacgcttagcctcgcgtcggcggcggtggcgccggcgcctgcggcgccgccgccgacgtggggtggtggtggaggaggggaggtggtggtggcggagttgatggagtgttgcagggagatggaggaagggcagagggcgtgggcggcgcacaggaaggaggcggcgtggaggatgaagagggtggagatgcagctggagacggagagggcgtgccggcggcgggaggcgacggaggagttcgaggcgaagatgagggcgctgagggaggagcaggcagctgcggtggagcgggtggaggcggagtaccgggagaagatggccggcctccgccgcgacgcggaggccaaggagcagaagatggcggagcagtgggcggccaagcacgcccgcctcgccaagttcctcgaccaggtcgccgcctgccgccgctggccgcccgtagagatcaacggcggcggcggcggcggccccggcggcggccggtgagccgccggacggtggcgctgcatgcatgcgtagttggacacctcgctttcttgcttcttcttctcgtgtcctttttacaactgttggaattcacttctctctagaaatatgtaatcttttgagtctcttttgatcattccaagtttcctactagtagctctattgaataataaatggaccaccaaattgcaaaccaaaatggttacaaaag

SEQ ID NO: 26271 - DNA, 2045 bp, Oryza sativa
  Clone ID: LIB4506-010-B7_FLI
ccacctcctccccttcccacatccaggctcctcctcttggtggtccagatagagccgaacagtcatgacagaagtcctatcaagacctcttgaacaccgtctaagctctccaaccttagatggtcactatgaagagaagaggaaatccaatgttgaatactcagaggatgagaagaaagccaaaatcatatcgctgaagaagaaggcaatgagtgcttcacaaaagttaaggcattcaatgaagaaggggaggaggagtagcaaggtcatatccatctcaattgcggatgaacgtgatcctgaggaggtgcaggctgtagatgccttccgtcagctccttgtacttgaagagttgctaccatctcaccatgatgactaccacatgatgctaaggtttttgaaggcaagaaagtttgatgtggagaaggcaaagcaaatgtgggttgatatgctgcagtggagaaaggaattcgctgcagataccattcttgaggattttgaatttgaagaagctgacaaggtggcagaatgctatcctcaaggttaccatggggttgataaggaaggaaggcctgtctacattgaacgtcttgggcagatcaatgtcaataggctaatgcaggttaccacaatggatcgttttatcaagaaccatgtcagggagtttgagaagaactttgctgttaagttcccagcttgctcaattgctgccaagtgccacattgatcaaagcacaacaattcttgatgtgcaaggggtggggatgaaacaattcagcaaagctgcaagagacctcattggtcagcttcaaaagattgatggtgataactaccctgagacattgtgtcgaatgttcatcattaatgctgggccaggattccgacttctttggagcacagtgaagagtttccttgacccaaagaccacagcaaagattcatgtgttgggcaacaagtaccagagcaagcttcttgaggtgatcgatgctagtgagctgccggagttttttggtggaacttgccaatgtgaaggtggttgcatgaaggctgacaagggcccctggaaggatgctgaaatattgaagatggttcaaagcggggctgggtggtgtggaaatcttagtttgaatcatctggatgctgaggagaaaatgatgatttgtgaagatgacaccatgcacaccaagaggcaggagtctttcaaatatgaagggtgcactttgtcacgaaaaatatcctgtgcccgaattgaacatccttcattatcgcctgtttgcgaggaacttcctcctacgatacttcctaccctaggatcagcttattcttgtgatgttccaatggtagagaaggccatagatgccatttgccagagcaagggattgccagatgagaatgtcacagtaaccaaagcgattgtaaatgcctctaatggatccaatcctccactctatgggggtatcatggctcttgtcatgagcattgcaacaatgctccgtgtcagccgcaacatgccaaagaaggtacttggtgctacccttggggcacaaagtacatccaaaatccaagcacaacaactatccgagatatcagtggaggctgtgtcagtagctgaatatgtttcttctacaaagcgtttgtccgatattgaggagaaggtcattgcgattctcaccaagcctgcagaaatgccagctgataaagaggagatgctaaagactgccgtcagccgtgttagtgcattggaggaggaacttgcagcgaccaagaaggccttgcaggagactcttgagcggcaagaggagatcatggcatacattgagaagaaaaagaagaagaaaagcaagcgcttgtttcgttggtaatatgcgaagaacaaataccatgggtttgatcaagaggtgatgttttcatcgttggcaaaagacgattccatgtgtaacatataatgttcatttattatttttcctgtgttgctacaattgatcgatctgagcttctctgccttaatataaatttttgcacattgtgggtgcggtattgatgctt

SEQ ID NO: 26272 - DNA, 2052 bp, Oryza sativa
  Clone ID: LIB4506-012-A5_FLI
ccacatttcgctctcgctttgccgggaaaaaaaaccgcctaccacgataggctcccggatgagggtccataccgtttgcttgcttcatttacatcgagctggatgtcaaatcacaattctccctgtgacatcccaaagcctgcctctgttgatgaattcgtcaagaatggcaagaagaagaagtcattcatgtcgagcatctttcggaagaaagggaggagcggcacggggagctcggacaagaagctgctatcgcggagggatatcgtcttcggtttggatgagaaatgcgacgataggtcggagctcttggattcttcccctgccgtccgcaagagcttttcagatcggcattgcgccacaaaaattgagagcttgactctaagctgcttggattcaccccacaggcagttcgatacccgggaataccgggtgttcgtaggcacatggaatgtggctgggaagcctcctaacagcagccttaacctggaggattttctacagatagaaggattacctgatatatatgtcttggggtttcaggagatcgttcctctgaacgcaggcaacgtgctggtcatcgaggacaacgagccagcggccaagtggctgggcctcatataccaagctctgaacaagccccaggaccagtcctccggcgacgagctgtctccgccggagacctccgacagccggcagggcggcggcagcggcagccgcgactccatacccaagtcgtcgagcggcggcatgctcttcttccagaagccgtcgctgaagatgctgagcaagaactaccgcgtggacagcgcgctggtgaagacgtgcacctgcctgaccgacccgtccaccatgcagcgccgggcgcgggagatgcgggagttcctctaccgcatcgaggcgtcgccgccgccgtcgttggcgtcggcggcggcggcggccgacgaagacgggggcccggacgccggcggcgagctggcgaggagcagcgtgaactactgcctgatcgcgagcaagcagatggtgggcatcttcctgtccgtgtgggtgcggcgggagctcgtgcagtacatcggccacctcagggtggactccgtcggcagaggcatcatgggccgcctcggcaacaagggttgcatcgcgatgagcatgacgctgcaccagaccagcgtctgcttcgtctgcagccacctcgcctccggcgagaaggaaggcgacgaggtgaggaggaactccgacgtcgccgagatcatcaagagcacgcagttcccgcggatctgcaaggtgcctggccagcgtatccccgacaagatccttgaccatgaccgggtcatatggctaggagacctgaattaccgagtcgcgctaagctacgacgagacgaagacgttgatgggggagaatgactgggatacattacttgagaaagaccagttgatgatcgagagacaggcagggagagtgttcaaagggtggaaagagggcaagatctacttcgcaccgacgtacaaatacaagcagaactctgactcatacgcaggggagacggccaaatcgaagaagaaacgaagaacacctgcatggtgtgaccggatactgtggcacggccagggaatcgagcagctgcagtacatcagaggggagtccaggttctcggatcacaggcctgtttgcagcgtgtttgtgatcgaagccgatgtagataatggaagcatgatcagaaagggctactcaactctggattccaggatccatttcgagtctccgataccacaaagacacagcttctacgatgatttctgacttgtgattagtggttttgtctatactactatacttgtagcttaattacaaaaagcaggaatgtgtctacctttgtagtgggtgggctgcatttttcaagcctagcacttgtcttacactaactggagtaaatggtggcttctgaccaaaatacgtctgaacaacggacaactggctgagcggaagtgctttgtgtcttactaaatttttgatgcgatgtcttagtaaatcacatcatactttcctttt

SEQ ID NO: 26273 - DNA, 2322 bp, Oryza sativa
  Clone ID: LIB4506-016-G8_FLI
gattctgtgtgtgtgtcttggttgcaaaaaccaagacatacacacagaatcaaataataacaaaggtttcctagcctcaaaggatacatatatatagtttccctacaatacaatggagcctgtcaatgatttccaggaaggcatttcaacagagcatgcctttgaggcagagcctgtgccatcattgtcggaaacaataacgccacgatcaatggtggtgagcttcatccttagtgtaactctcagcatcgtcgccatgaaggtcaccttgagctctggcttcattccgtcgttcagcatcccagccggcctcctcggtttttgtgtatcccgtgcgtcgatccgcattcttgactacttcgcagtggcacaactaccattcacacgccaagagaacaccatcatccagacctgtgtcgtcgcatgcacctcgatcacattcaccggtggctttgggacatatattcttgcaatgggaaagaaagcagctgtaggggatgtcaatgcccaaaataacgttgaggagccaagctttgccaggatgatcaccttcctcttccttatcagctttgctggcatgttcatcatcatgcccttcaggaaggtcatgatcattaggcaccggttgacattccccagcggcacagcaacggcgcacctcatcaatagcttccatacacctcaaggtgtcaagcaagcaaggaagcaagtgacattattgtttaaatcgtttggaggaaccatcgcatggtcgctcttccagtggttcttcgcctctgggccgggctgtggcttcaaattcttccccacatttggcctcgaggcatataaacacggattcttcttcgatttcaccatggccaatgtcggcattggcatgatgtgcccgtacatgatcgtgttctccgttttcattggcaccatcatctcgtgcggtgtaatttggccgtacatcgagtcaaaggagggcatctggtacccaagcaaccttgggcccaacagccttaacggcatcagaggttacaaggtgttcatcggcttgtccatgataatggctgactgcctcttcgtcttcctctgcatcatggtccggacaacatgtgccatgatcaagcggcgtcggcaggcaatgcaaggtggtggcggtaatgcgcagccattccagggtatcgacatcgccgatcagccggtgaagagcttcgatgatcgccgcagggcgcaggtgttcctccgggacgagataccggactcggtcaccattggctgctatgtcctcctgtcgatcatctccatcgccgccatccctcacctctacccacagatgaggtacagccatgttgcgctcatctacctcgccgcgcccgtcttcgccttctgcaacgcctacggcttcggcgtcaccgacatgaacctggctagcacctattgcaagatcgccatgttcgcgttcggctcgtgggtcggcatcaagagcggcggcgtggtcgccgccctggtcgccggcgggatcaccatgtcgatcctgggcaacgcggccgacgtcgcgcaggacctcaagacgggctacctgacgctgacgtcgccgcgcgccgtgttcatcagcgaggcgatcggcacggcgctgggatgcgtcgtcaaccccaccgtgttctgggtgttctacagggtgtacaagatgggcagcggcgacatgggcgacatgccctacgccaagctctaccgcggcttcgccatgctcagcgtcggcgacggcgagcaaggcctgcccaggcacagcatgctcctcttcaaggtcttcttcgtgctcgccctggcgctcagcgtgttccgggaggtggcgagccggaaggagtggcgcatccggcgctacatcccgagcaccatcggcatggccatcaccttcttcatgccgccgcgcgtgcccgtcggcatgtgcatcggcagcctggtggcgtacctgtgggagaagatggacgccggccgcgggcggatgctctcgccggcgctggcgtcggggctcatctgcggcgacggcgtcggctcgatcttgctgtccatgctgacactcatgggtgccagggcgcccatctgcatcaagttcttgtctcgaggtgacaatgtcaagttggacgccttcttggcaacactccatgacatgagatagctactagctagctatccatgtagggaaactagatcattttctcaggtgtcaaaacttttgtacatatgtatccacgtcataggggcttgagttaggagtcgtggcaaactgtataatcaagtttcagttcagtctataaacacagtttgatctcctct

SEQ ID NO: 26274 - DNA, 2320 bp, Oryza sativa
  Clone ID: LIB4506-022-A8_FLI
gcatcaagaggttgtatggcggatcctatttgatcgattgttcccttgcctaactctgtcaaggataacaagaataatagcctcattaagaaggaaggaagcaacagtgggaagggtgcagcaacatctaatgatctagaaagagaaggaaggaggacactagaccctaagacactgaggaggcttgcacagaatagagaggcaccaaggaaaagtagccttagtaagaaggcttacattcaacagttgaagtcaagtaggattaggctaagccagcttgcacagcaagttcacgtggcaagagtacagatgccttttgatctgttctgtgatatatctcccacgagtaagaattggaagatctgtgcaacaatagcaaggaatgaatcttgtcaggttggaacgaggatcagacaatattcctcgagagattgcgagtgttgtgtcccaaaaattcactttctgcgtttctgtcaccgaaaggagcttgatgcagaggaacatcgcgtttcaagtcaatagcattgaaacttctttggcagacaaggcactattccacaggttagggatcagacattgcaactcacatcatctgtcatttcaccttttgctggtggttcaagtatatgtagagaaagtgagtgtcctgatcatacttcgacaccgcctgcttcttctaatacccctgtgggtgatatggagaaagcccatgctgatagcaggaaacgacgccccattatgcgccttcctctaggtgcatcgaagaagctaacttttgaggtgggcgcgtccgaaggaaaggatatagatacagctgttgtttcagaaagggtgcagaattagcctccattgatgggaaaaaaaagggcaccgtcaatcctgctggtgctcagaggacaagagcttcctatatgaaatagaagctacaatttcacgccatcggtcttcactggcaatggacgcgtttgaatcaagtccttagttatgtgctctgctcttgttctgtgattcttgttcacgcgaaggtcactgactttacggtattggagttggagtagaagatcagctgctccatcatcgacgatggcctgatccacaaagatgaattttggtgctgatacttccagggagatacagccatgaatccacctaggtttttcacggttagactaaccacagcaaaccagcgctatgtgcgcagaccagctgcaatcgcacaaggatatcagctggaggatggccagagactcaaattagtaacaacccataacctaatggtctacattgaactaaagagagcatctggcaaaatatacatcactacaggatggccccagttcatagaagccactggtttgcagcttaaagaatatgtggttttcaaagtcttatcacgctccaagatgcatgtcatcatataagccaagagtggttatcttagatgtccagtgccaagcaaaccaagcaactcacagctaaagaaaaacgcgcttcagaaaccaaaaccaccagaaaaaaagaaccaagactaagccacacatgcaacaccccatgcaacagaaattaaaagccgatatagggtcagcttgtacaggcaacaccaaacgcactatcaatgaaatgtgcttctgcaccggggagggacatcaatctatcaactgaactcaaagactacttcaaagatattgcgcaatttctgcacccctcaaacgaattctatgtcacaaccataaatccaactttcatgaagcaggataagcacttttcaaagcaattctctatgacatacattgcactaatcgtgcggaagaagacatcgcagatcgaagtacggattccagggcactcctcaaccaccatggttcttcaccactccacagaaaagcgctttaacctgaaatcaggatggacccattttccaacaagcaacggcatacaagttggaacaatctgcatctttcacttccaccagactaatcagctgcaagcaacaatagatgtgctgtgagcaagatgctcatgcaacacaagctgttatccttttaatatcgtaggctatattttcactctgctacttctatagctgttagtatcattctttgtatgctttgcatgggtactcaatttccatgtaaaaatcacgcccaaactattatgccagcgtgctgttacagaacaggagctgacggtaccttacgtactgtctttggttgttttgcttgtacttatatgcaaccaaagacaattcaccctgtcctgtatgaacaaccatgctatcatattctgtttcacctttatctttatgtgtatgcagcaccct

SEQ ID NO: 26275 - DNA, 3544 bp, Homo sapiens; identical to SEQ ID NO: 26260
  Clone ID: LIB4119-128-G9_FLI

SEQ ID NO: 26276 - DNA, 1895 bp, Homo sapiens
  Clone ID: LIB4119-131-E2_FLI
ccaagaccacctggagctccgcccgggcagcgcggggtcacggcgggaattttcgggtcgccgagtgactcagccccgcaggctcgaaactgcgggcgcatgaggccaccgtagtcctcaccactgccactttgcttcgaggtatctgaatttgagacccttgtccttcctgcgctgaccctcctctgcagctgccgcccctccctgtgtccttccaagaagtgccacatgcactgatctcttgtgtccccagatggtcatcatgggccagtgctactacaacgagaccatcggcttcttctataacaacagtggcaaagagctcagctcccactggcggcccaaggatgtggtcgtggtggcactggggctgaccgtcagcgtgctggtgctgctgaccaatctgctggtcatagcagccatcgcctccaaccgccgcttccaccagcccatctactacctgctcggcaatctggccgcggctgacctcttcgcgggcgtggcctacctcttcctcatgttccacactggtccccgcacagcccgactttcacttgagggctggttcctgcggcagggcttgctggacacaagcctcactgcgtcggtggccacactgctggccatcgccgtggagcggcaccgcagtgtgatggccgtgcagctgcacagccgcctgccccgtggccgcgtggtcatgctcattgtgggcgtgtgggtggctgccctgggcctggggctgctgcctgcccactcctggcactgcctctgtgccctggaccgctgctcacgcatggcacccctgctcagccgctcctatttggccgtctgggctctgtcgagcctgcttgtcttcctgctcatggtggctgtgtacacccgcattttcttctacgtgcggcggcgagtgcagcgcatggcagagcatgtcagctgccacccccgctaccgagagaccacgctcagcctggtcaagactgttgtcatcatcctgggggcgttcgtggtctgctggacaccaggccaggtggtactgctcctggatggtttaggctgtgagtcctgcaatgtcctggctgtagaaaagtacttcctactgttggccgaggccaactcactggtcaatgctgctgtgtactcttgccgagatgctgagatgcgccgcaccttccgccgccttctctgctgcgcgtgcctccgccagtccacccgcgagtctgtccactatacatcctctgcccagggaggtgccagcactcgcatcatgcttcccgagaacggccacccactgatggactccaccctttagctaccttgaacttcagcggtacgcggcaagcaacaaatccacagcccctgatgacttgtgggtgctcctggctcaacccaaccaacaggactgactgactggcaggacaaggtctggcatggcacagcaccactgccaggcctccccaggcacaccactctgcccagggaatgggggctttgggtcatctcccctgcctgggggagtcagatggggtgcaggaatctggctcttcagccatctcaggtttagggggtttgtaacagacattattctgttttcactgcgtatccttggtaagccctgtggactggttcctgctgtgtgatgctgagggttttaaggtggggagagataagggctctctcgggccatgctacccggtatgactgggtaatgaggacagactgtggacaccccatctacctgagtctgattctttagcagcagagactgaggggtgcagagtgtgagctgggaaaggtttgtggctccttgcagcctccagggactggcctgtccccaatagaattgaagcagtccacggggaggggatgatacaaggagtaaacctttctttacactc

SEQ ID NO: 26277 - DNA, 3586 bp, Homo sapiens
  Clone ID: LIB4119-131-G1_FLI
ggcctgtttggcatatgcaatgaacatcaagaaaccatcttgctgtggaagcataattatttttcttctccctttttgaaagatctttccttttgatgccagttttcttccttgtttacacaagttcaatttgaaaggaaaaggcaatagtaagggtttcaaaatggcagagaaatttgaaagtctcatgaacattcatggttttgatctgggttctaggtatatggacttaaaaccattgggttgtggaggcaatggcttggttttttctgctgtagacaatgactgtgacaaaagagtagccatcaagaaaattgtccttactgatccccagagtgtcaaacatgctctacgtgaaatcaaaattattagaagacttgaccatgataacattgtgaaagtgtttgagattcttggtcccagtggaagccaattaacagacgatgtgggctctcttacggaactgaacagtgttacattgttcaggagtacatggagacagacttggctaatgtgctggagcagggccctttactggaagagcatgccaggcttttcatgtatcagctgctacgggggctcaagtatattcactctgcaaatgtactgcacagagatctcaaaccagctaatcttttcattaatacggaagacttggtgctgaagataggtgactttggtcttgcacggatcatggatcctcattattcccataagggtcatctttctgaaggattggttactaaatggtacagatctccacgtcttttactttctcctaataattatactaaagccattgacatgtgggctgcaggctgcatctttgctgaaatgctgactggtaaaaccctttttgcaggtgcacatgaacttgaacagatgcagctgattttagaatctattcctgttgtacatgaggaagatcgtcaggagcttctcagcgtaattccagtttacattagaaatgacatgactgagccacacaaacctttaactcagctgcttccaggaattagtcgagaagcactggatttcctggaacaaattttgacatttagccccatggatcggttaacagcagaagaagcactctcccatccttacatgagcatatattcttttccaatggatgagccaatttcaagccatccttttcatattgaagatgaagttgatgatattttgcttatggatgaaactcacagtcacatttataactgggaaaggtatcatgattgtcagttttcagagcatgattggcctgtacataacaactttgatattgatgaagttcagcttgatccaagagctctgtccgatgtcactgatgaagaagaagtacaagttgatccccgaaaatatttggatggagatcgggaaaagtatctggaggatcctgcttttgataccaattactctactgagccttgttggcaatactcagatcatcatgaaaacaaatattgtgatctggagtgtagccatacttgtaactacaaaacgaggtcatcatcatatttagataacttagtttggagagagagtgaagttaaccattactatgaacccaagcttattatagatctttccaattggaaagaacaaagcaaagaaaaatctgataagaaaggcaaatcaaaatgtgaaaggaatggattggttaaagcccagatagcgctagaggaagcatcacagcaactggctggaaaagaaagggaaaagaatcagggatttgattttgattcctttattgcaggaactattcagcttagttcccagcatgagcctactgatgttgttgataaattaaatgacttgaatagctcagtgtcccaactagaattgaaaagtttgatatcaaagtcagtaagccaagaaaaacaggaaaaaggaatggcaaatctggctcaattagaagccttgtaccagtcttcttgggacagccagtttgtgagtggtggggaggactgttttttcataaatcagttttgtgaggtaaggaaggatgaacaagttgagaaggaaaacacttacactagttacttggacaagttctttagcaggaaagaagatactgaaatgctagaaactgagccagtagaggatgggaagcttggggagagaggacatgaggaaggatttctgaacacagtggggagttcctctttaacaagcagctcgagtccataggcatcccacagtttcacagtccagttgggtcaccacttaagtcaatacaggccacattaacaccttctgctatgaaatcttcccctcaaattcctcatcaaacatacagcagcattctgaaacatctgaactaaaacactcagcagacatttatctttgtattcttcatgaaatgtgttttgtcttttttttattactagtgtttaagtcattttttacttgaatcagatggtgtcatttagtaaggattttatgagttcttgttttttaaaatccagactttctttttctacatgtgagatagttttcattttaactggcatgtcatttgcacacaaaaataaagactagagcaaaataatgcaacgcaggaggagaaaagaaatgcactaagacaagaacattctctcatagaacattgatctgttttacaggaaacaaaccttgccttgaaatttacacagtgagactgtacataattgcatgaaaatagctatttttttcctaagacatttttcattcatgaatattttcaagtttttcatactgtacacatttcttaaaacacatgataccagcagcaactgaaaatgaatgccgaatttggtacacatgtgttatctacctcaaggtaacaagagtatgtggcaaaacatataccacccatagtgcttcacaaaatgcacttctatttagccagcgtttattgtagtaaactattcttaataaaactcactcactgtttataaatgttctggtatgcattctttatagtgaagtgttaatacatcacatcttatttattttagcaaatcagtatattttctgtatttaattataaaaaattaacttagtttttaaaatttatttgcaaatatactttactttttccatttggcactatggtttgttgcctacctagctgcatctataatgtcagcttatcctaaggctgtccacgtacttaatttacttaagtgttcattttaagtaacgtgctcactgtgtataggaatttgtattttggaggtgcttgatctatctacaaagaaaaattaattaggaattactttattataaaatgctcctagaagtcttaattgtgtttattttttaaaaaaacaaatgttagacttgtgtgcatggaagtaattaaggtacatcattattgtagtttgaaagttgtacatgataagacattttgtttttactgtatgtttttactgaatgatctattccccatcccaaggcaagcatgaataaaattaggttaaacgtagcatgtggcatcgcagtctcttagaatttgtttcatctattttattttattgaatactgtctgtatctttggttatcctgtttgaagaaaaaggacaaataaaacatggccagc

SEQ ID NO: 26278 - DNA, 1253 bp, Homo sapiens
  Clone ID: LIB4119-136-D3_FLI
gcccgtggaatcctacggccctgtgacctacattgtgcagtgcagcctagaaggcggcagctggaccacactggcctccgacatctttgactgctgctacctgaccagcaagctctcccggggtggcacctacaccttccgcacggcatgtgtcagcaaggcaggaatgggtccctacagcagcccctcggagcaagtcctcctgggagggcccagccacctggcctctgaggaggagagccaggggcggtcagcccaacccctgcccagcacaaagaccttcgcattccagacacagatccagaggggccgcttcagcgtggtgcggcaatgctgggagaaggccagcgggcgggcgctggccgccaagatcatcccctaccaccccaaggacaagacagcagtgctgcgcgaatacgaggccctcaagggcctgcgccacccgcacctggcccagctgcacgcagcctacctcagcccccggcacctggtgctcatcttggagctgtgctctgggcccgagctgctcccctgcctggccgagagggcctcctactcagaatccgaggtgaaggactacctgtggcagatgttgagtgccacccagtacctgcacaaccagcacatcctgcacctggacctgaggtccgagaacatgatcatcaccgaatacaacctgctcaaggtcgtggacctgggcaatgcacagagcctcagccaggagaaggtgctgccctcagacaagttcaaggactacctagagaccatggctccagagctcctggagggccagggggctgttccacagacagacatctgggccatcggtgtgacagccttcatcatgctgagcgccgagtacccggtgagcagcgagggtgcacgcgacctgcagagaggactgcgcaaggggctggtccggctgagccgctgctacgcggggctgtccgggggcgccgtggccttcctgcgcagcactctgtgcgcccagccctggggccggccctgcgcgtccagctgcctgcagtgcccgtggctaacagaggagggcccggcctgttcgcggcccgcgcccgtgaccttccctaccgcgcggctgcgcgtcttcgtgcgcaatcgcgagaagagacgcgcgctgctgtacaagaggcacaacctggcccaggtgcgctgagggtcgccccggccacacccttggtctccccgctgggggtcgctgcagacgcgccaataaaaacgcacagccgggcgag

SEQ ID NO: 26279 - DNA, 1318 bp, Homo sapiens
  Clone ID: LIB4119-138-H10_FLI
gggcagcccagccagacgcctccggtagtgtaaatgaggacaatgcctgctggcccacatgacggggggatgtagacggcagcggcgccagtcgctcctggcaccatggacgatgccacagtcctaaggaagaagggttacatcgtaggcatcaatcttggcaagggttcctacgcaaaagtcaaatctgcctactctgagcgcctcaagttcaatgtggctgtcaagatcatcgaccgcaagaaaacacctactgactttgtggagagattccttcctcgggagatggacatcctggcaactgtcaaccacggctccatcatcaagacttacgagatctttgagacctctgacggacggatctacatcatcatggagcttggcgtccagggcgacctcctcgagttcatcaagtgccagggagccctgcatgaggacgtggcacgcaagatgttccgacagctctcctccgccgtcaagtactgccacgacctggacatcgtccaccgggacctcaagtgcgagaaccttctcctcgacaaggacttcaacatcaagctgtctgactttggcttctccaagcgctgcctgcgggacagcaatgggcgcatcatcctcagcaagaccttctgcgggtcggcagcatatgcagcccccgaggtgctgcagagcatcccctaccagcccaaggtgtatgacatctggagcctgggcgtgatcctgtacatcatggtctgcggctccatgccctatgacgactccgacatcaggaagatgctgcgtatccagaaggagcaccgtgtggacttcccgcgctccaagaacctgacctgcgagtgcaaggacctcatctaccgcatgctgcagcccgacgtcagccagcggctccacatcgatgagatcctcagccactcgtggctgcagccccccaagcccaaagccacgtcttctgcctccttcaagagggagggggagggcaagtaccgcgctgagtgcaaactggacaccaagacaggcttgaggcccgaccaccggcccgaccacaagcttggagccaaaacccagcaccggctgctggtggtgcccgagaacgagaacaggatggaggacaggctggccgagacctccagggccaaagaccatcacatctccggagctgaggtggggaaagcaagcacctagcatgacaatggccccgttgtgtgtggtgggggtcggggttggggggcatggtgcagtcggccttcacgtaaactaagtaggcaggtaggatctgaagaaggcacaggtgcaagtaaaattcgtcaattaaaccact

SEQ ID NO: 26280 - DNA, 2183 bp, Homo sapiens
  Clone ID: LIB4119-144-D2_FLI
ggcaggaacagcaggcctggccagcccaaaggactctctatccaggatgtaaatgagcacactgctggcccatgcgcctcggggctgtagagggcagcctcagaggcactgggcattcctggcaccatggatgacgctgctgtcctcaagcgacgaggctacctcctggggataaatttaggagagggctcctatgcaaaagtaaaatctgcttactctgagcgcctgaagttcaatgtggcgatcaagatcatcgaccgcaagaaggcccccgcagacttcttggagaaattccttccccgggaaattgagattctggccatgttaaaccactgctccatcattaagacctacgagatctttgagacatcacatggcaaggtctacatcgtcatggagctcgcggtccagggcgacctcctcgagttaatcaaaacccggggagccctgcatgaggacgaagctcgcaagaagttccaccagctttccttggccatcaagtactgccacgacctggacgtcgtccaccgggacctcaagtgtgacaaccttctccttgacaaggacttcaacatcaagctgtccgacttcagcttctccaagcgctgcctgcgggatgacagtggtcgaatggcattaagcaagaccttctgtgggtcaccagcgtatgcggccccagaggtgctgcagggcattccctaccagcccaaggtgtacgacatctggagcctaggcgtgatcctctacatcatggtctgcggctccatgccctacgacgactccaacatcaagaagatgctgcgtatccagaaggagcaccgcgtcaacttcccacgctccaagcacctgacaggcgagtgcaaggacctcatctaccacatgctgcagcccgacgtcaaccggcggctccacatcgacgagatcctcagccactgctggatgcagcccaaggcacggggatctccctctgtggccatcaacaaggagggggagagttcccggggaactgaacccttgtggacccccgaacctggctctgacaagaagtctgccaccaagctggagcctgagggagaggcacagccccaggcacagcctgagacaaaacccgaggggacagcaatgcaaatgtccaggcagtcggagatcctgggtttccccagcaagccgtcgactatggagacagaggaagggcccccccaacagcctccagagacgcgggcccagtgagcttcttgcggcccagggaatgagatggagctcacggcttaaagcccaagctctgaagaagtcaagggtggagccagagaaggaaggcagtcccagatgagcctctattttcatcagcttcttctctctccccttgaacttggtaacccacatggttctcccgtggcccctaggtggatgaggccaaagtcaaatccaaggctgagacagtcgtgcgactcctactcccccagagcgtgacccggagcaggtgctggacacagagcctgtctcagcagagggtccccactggccgcaacggctcagtgacagcaagagcaggaagagcagcaggaaggcaccgctgtccaccttgggcaccatttatcctcctttcatcgtccccggggcagttgcgtgaccctgctgggaggccagaccgggccagactgagggtcaggggaccaggctgggttgggggttgggtggggctggacggggacgaggcgcggagaggcggcgggaaagagcttcggctgggccacgggctcgcgggcactctcggcggcagcctcgggggctccgactccagctctgggcaagatccataaacttttaaagaagcctcaaaacatacttttaaagcattaagctttaaagtgctagaaatcttgtgccccatatgtgcttctttcagtattatcctagatcctcaggagtagcatggcaactggagaaaatgggaggaaagacaagaagaaatagaagctgatttaacatcaagtttattcagttttgatttttcttatctctactggctttctcctgttcaaaccttgcagcgataatatttggaaaagagcacttggaaattatattcctgtttttaactctttatatttaatcattctccttgtaattgattttgtagctaatttactccccagcacccccagaagaaaattttacaaagg

SEQ ID NO: 26281 - DNA, 2080 bp, Homo sapiens
  Clone ID: LIB4119-144-G7_FLI
aatggacagatcctgaagatcttcgtggacaatctctttgctatcgtcctgctgaagcaggccacagctgtgcgctgcttggacatgagtgcctcccgtaagaagctggccgtggtagatgaaaatgacacttgcctggtgtatgacatcgacaccaaggagctgctttttcaggaaccaaacgccaacagtgtagcttggaacacccagtgtgaggacatgctctgcttctcgggaggaggctacctcaacatcaaagccagcaccttccctgtgcaccggcagaagctgcagggctttgtggtcggctacaatggctccaagatcttctgcctccatgtcttctccatttctgccgtggaggtgccgcagtccgctcccatgtaccagtacctggataggaaactgttcaaggaagcctaccagattgcttgcttgggtgtcacagacactgattggcgtgaactggccatggaagcgctagaaggtttagattttgaaacagcaaagaaggccttcatcagagtacaagacctccgatatttagagctcatcagcagcattgaggagaggaagaagcggggagagaccaacaatgacctgtttctggcagatgtgttttcctaccaggggaagttccatgaggccgccaaactgtacaagaggagtgggcacgagaacctcgcgcttgaaatgtacaccgacctctgcatgtttgagtatgccaagatggctgtgctcttccaccacctgttcgaccctggggctgaaggtgtgtttggtggcctgtgatgttgcccaggacctattgttcatcaggacttggacgagctcctgggccccagcctgtcttttcaccttagtgatttcttcactccgtacctgagacccagggtgttcaggctccctctactttttcctcgtcacctttcctaccctccctcaggccccaccaaagacacctagaagatttcataacacattcatactgagatcaccagagtcagtgcatctctgcttccggggataacaaaattttaactcaggatgaacccttaagggatcaagaccctagaggtagaatttagggttgggaacccctgaggcctcctcaaggaggcagctgtgctgcagtagaaaatgcctgaccaggctgggcatggtggctcaaacctgtaatactagcactttgggaggctgaagtgggtggattgcttgagctcaggaggtcgagaccagcctgggcaatatggtgaaaccctctctctaccaaaaatgcaaaaaattagctggtgcctgtagtcccagctactgggaggctaaggtggaaagattgcttgagccccagaggtggaagttgcagtgagccaagatcacgccactgcattccagcctgggtgacagagcaagacccatgtcaaaaaaaaataataaaatgcctggccttggtgccccagagctggtgtgagtgcagtttctttctgtgggatgacctggggaaaggctcttcggtttgccaaacctcccttcccttctcagatggtaatagcgacagctcagtttagtcatgagatttgcacagaataatgtataggaaagcgcattagaaatgccaacctgtagaaagattaggaagatgagaggggccacacgtgaccacagagtggattttcatacctctctccctggctggccccactcctgcccctgctctgaggcccctccttacactgtggtggacttcgtgtgcccacagcctcccaccagaactgcagcccatttacacactccatttgctccgtctctctatgaaggtaaatactctgggacttgtttttggttttagtttttgatcactattccaaggaggttggttccttttcaatcccccctgcccccacctggtagtctgaatttgagaaatatgtacctacacattatgtggggggtgggggagatctagtcctgattaacgtggcatatttttgtttacttgaaaattgcttcccaagattcaatctggttttcagaaaattttaaaattacattcccacgtacaaataaattgtatgctttctgg

SEQ ID NO: 26282 - DNA, 3803 bp, Homo sapiens
  Clone ID: LIB4119-145-F11_FLI
cgggccttgcgccgcgggagcggacggcggcggaggagaccctaggctcgcggcccgaggcgggagggctcggcttctcgactgcccgcctccgaggccgccggccgcttctctctcccagagtggccgccgcccctggagactcgccgtgacacgggcctaagccgccgccgcgggagtcctgaccgctcggacccgtcggatcaggccgggtgggagcgagcttgcgggcaggtgccgctcccggagggtgggccggaggcgaggcgcccaccgcgcggctcgcgggccgggctcggcggaggggccgctcgcgcagcacccccaccgcgggccggagcccgggtcgccgccccgccttctcccgggaccgcccggccggagctgcgggggccgagggacgccgcgcccgccgccgccagccgggctcgcgcgggagagcagggaagagaaactttgccttttattgtttttagtccttaagtgcaaggaactctgtgttgggaggaaaaatgtccttcttcaatttccgtaagatcttcaagttggggagcgagaagaagaagaagcagtacgaacacgtgaagagggacctgaaccccgaagacttttgggagattataggagaactgggcgacggagcctttgggaaagtgtacaaggcccagaataaagagaccagtgttttagctgctgcaaaagtgattgacactaaatctgaagaagaacttgaagattacatggtagagattgacatattagcatcttgtgatcacccaaatatagtcaagcttctagatgccttctattatgagaacaatctttggatcctcattgaattttgtgcaggtggagcagtagatgctgtgatgcttgaacttgagagaccattaactgagtcccaaatacaagtagtttgcaagcagactttagatgcattgaactacttacatgataataagatcatccacagagatctgaaggctggcaacattctctttaccttagatggagatatcaaattggcggattttggagtatcagctaaaaacacgaggacaattcaaagaagagattcctttattggtacaccatattggatggctcctgaagtagtcatgtgtgaaacatctaaggacagaccctatgactacaaagctgatgtttggtccctgggtatcactttaatagaaatggctgagatagaaccacctcatcatgaattaaatccaatgcgagtgctgctaaaaatagcaaaatctgagccacctacattagcacagccatccagatggtcttcaaattttaaggactttctaaagaaatgcttagaaaagaatgtggatgccaggtggactacatctcagctgctgcagcatccctttgttactgttgattccaacaaacccatccgagaattgattgcagaggcgaaggctgaagtaacagaagaagttgaagatggcaaagaggaagatgaagaggaggaaacagaaaattctctgccaatacctgcaagtaagcgtgcatcttctgaccttagtatcgccagctctgaagaagataaactttcacaaaatgcttgtattttggagtctgtctcagaaaaaacagaacgtagtaactctgaagataaactcaacagcaaaattcttaatgaaaaacccaccactgatgaacctgaaaaggctgtggaggatattaatgaacatattaccgatgctcagttagaagcaatgactgaactccatgacagaacagcagtaatcaaggagaatgaaagagagaagaggcccaagcttgaaaatctgcctgacacagaagaccaagaaactgtggacattaattcagtcagtgaaggaaaagagaataatataatgataaccttagaaacaaatattgaacataatctaaaatctgaggaagaaaaggatcaggaaaagcaacagatgtttgaaaataagcttataaaatctgaagaaattaaagatactattttgcaaacagtagatttagtttctcaagagactggagaaaaagaggcaaatattcaggcagttgatagtgaagttgggcttacaaaggaagacacccaagagaaattgggggaagacgacaaaactcaaaaagatgtgatcagcaatacaagtgatgtgataggaacatatgaggcagcagatgtggctcagaaagtggatgaagacagtgctgaggatacgcagagtaatgatgggaaagaagtggtcgaagtaggccagaaattaattaataagcccatggtgggtcctgaggctggtggtactaaggaagttcctattaaagaaatagttgaaatgaatgaaatagaagaaggtaaaaataaggaacaagcaataaacagttcagagaacataatggacatcaatgaggaaccaggaacaactgaaggtgaagaaatcactgagtcaagtagcactgaagaaatggaggtcagaagtgtggtggctgatactgaccaaaaggctttaggaagtgaagttcaggatgcttctaaagtcactactcagatagataaagagaaaaaagaaattccagtgtcaattaaaaaagagcctgaagttactgtagtttcacagcccactgaacctcagcctgttctaatacccagtattaatatcaactctgacagtggagaaaataaagaagaaataggttctttatcaaaaactgaaactattctgccaccagaatctgagaatccaaaggaaaatgataatgattcaggcactggttccactgctgatactagcagtattgacttgaatttatccatctctagctttctaagtaaaactaaagacagtggatcgatatctttacaagaaacaagaagacaaaagaaaacattgaagaaaacacgcaaatttattgttgatggtgtagaagtgagtgtaacaacatcaaagatagttacagatagtgattccaaaactgaagaattgcggtttcttagacgtcaggaacttcgggaattaagatttcttcagaaagaagagcaaagagcccaacaacagctcaatagcaaactgcagcaacaacgagaacaaattttccggcgctttgagcaggaaatgatgagtaaaaagcgacaatatgaccaggaaattgagaatctagaaaaacagcagaaacagactatcgaacgcctggaacaagagcacacaaatcgcttgcgagatgaagccaaacgcatcaaaggagaacaagagaaagagttgtccaaatttcagaatatgctgaagaaccgaaagaaggaggaacaagagtttgttcagaaacaacagcaagaattagatggctctctgaaaaagatcatccagcagcagaaggcagagttagctaatattgagagagagtgcctgaataacaagcaacagctcatgagagctcgagaagctgcaatttgggagctcgaagaacgacacttacaagaaaaacaccagctgctcaaacagcagcttaaagatcagtatttcatgcaaagacatcagctacttaagcgccacgagaaggaaacagagcaaatgcagcgttacaatcaaagacttattgaggaattgaaaaacagacagactcaagaaagagcaagactgcccaagattcagcgcagtgaagccaagactcgaatggccatgtttaagaagagtttgagaattaactcaacagccacaccagatcaggaccgtgataaaattaaacagtttgctgcacaagaagaaaagaggcagaaaaatgagagaatggctcagcatcagaaacatgag

SEQ ID NO: 26283 - DNA, 2301 bp, Homo sapiens
  Clone ID: LIB4119-147-C9_FLI
cttcaccagttcgaaattacagttttcaccatcaactaccttatcctttttggtctggttttcttcctcaaacagtggaaacatttttaaagttgcttttgttgcagagttaaacaaatggctgatagtggcttagataaaaaatccacaaaatgccccgactgttcatctgcttctcagaaagatgtactttgtgtatgttccagcaaaacaagggttcctccagttttggtggtggaaatgtcacagacatcaagcattggtagtgcagaatctttaatttcactggagagaaaaaaagaaaaaaatatcaacagagatataacctccaggaaagatttgccctcaagaacctcaaatgtagagagaaaagcatctcagcaacaatggggtcggggcaactttacagaaggaaaagttcctcacataaggattgagaatggagctgctattgaggaaatctatacctttggaagaatattgggaaaagggagctttggaatagtcattgaagcgacagacaaggaaacagaaacgaagtgggcaattaaaaaagtgaacaaagaaaaggctggaagctctgctgtgaagttacttgaacgagaggtgaacattctgaaaagtgtaaaacatgaacacatcatacatctggaacaagtatttgaaacgccaaagaaaatgtaccttgtgatggagctttgtgaggatggagaactcaaagaaattctggataggaaagggcatttctcagagaatgagacaaggtggatcattcaaagtctcgcatcagctatagcatatcttcacaataatgatattgtacatagagatctgaaactggaaaatataatggttaaaagcagtcttattgatgataacaatgaaataaacttaaacataaaggtgactgattttggcttagcggtgaagaagcaaagtaggagtgaagccatgctgcaggccacatgtgggactcctatctatatggcccctgaagttatcagtgcccacgactatagccagcagtgtgacatttggagcataggcgtcgtaatgtacatgttattacgtggagaaccaccctttttggcaagctcagaagagaagctttttgagttaataagaaaaggagaactacattttgaaaatgcagtctggaattccataagtgactgtgctaaaagtgttttgaaacaacttatgaaagtagatcctgctcacagaatcacagctaaggaactactagataaccagtggttaacaggcaataaactttcttcggtgagaccaaccaatgtattagagatgatgaaggaatggaaaaataacccagaaagtgttgaggaaaacacaacagaagagaagaataagccgtccactgaagaaaagttgaaaagttaccaaccctggggaaatgtccctgatgccaattacacttcagatgaagaggaggaaaaacagtctactgcttatgaaaagcaatttcctgcaaccagtaaggacaactttgatatgtgcagttcaagtttcacatctagcaaactccttccagctgaaatcaagggagaaatggagaaaacccctgtgactccaagccaaggaacagcaaccaagtaccctgctaaatccggcgccctgtccagaaccaaaaagaaactctaaggttccctccagtgttggacagtacaaaaacaaagctgctcttgttagcactttgatgagggggtaggaggggaagaagacagccctatgctgagcttgtagccttttagctccacagagccccgccatgtgtttgcaccagcttaaaattgaagctgcttatctccaaagcagcataagctgcacatggcattaaaggacagccaccagtaggcttggcagtgggctgcagtggaaatcaactcaagatgtacacgaaggttttttaggggggcagataccttcaatttaaggctgtgggcacacttgctcatttttacttcaaattcttatgtttaggcacagctatttataggggaaaacaagaggccaaatatagtaatggaggtgccaaataattatgtgcactttgcactagaagactttgttagaaaattactaataaacttgccatacgtattacagcagaagtgcttcagtcattcacatgtgttcgtgagattttaggttgctatagattgtttaagacagcttattttaaatgtagaaaaataggagattttgtaactgcttgccattaacttgctgctaaattcccaatgtattgattaaatcaataaaaaacagatgttactcagc

SEQ ID NO: 26284 - DNA, 3297 bp, Homo sapiens
  Clone ID: LIB4119-160-F5_FLI
tctcattccctgtgagctgaaaggggccttcaagaagagagttctcagagcagactcagctttaggtgctgaaatgaatttctcaagatcatcactccatttagaaggctaatgctgtgtgctgagaacagaaaggagatggaggattggatcagctcactgaagtctgtacagaccagagaaccctacgaggtggcccagtttaatgtggaacatttctcagggatgcacaactggtacgcctgctcccacgcccgacccaccttctgtaacgtgtgcagagagagtctttctggagtcacctcccatggcctgtcttgcgaagtgtgtaaattcaaggctcacaaaagatgtgcagtgagagcaacaaataactgtaaatggactaccctggcctccatcgggaaggacattatagaagatgaagatggcgtcgcgatgcctcaccagtggcttgagggcaacctgcctgtaagtgccaagtgtgctgtctgcgacaaaacatgtggcagtgttctccgtctacaggattggaaatgcctttggtgtaagacaatggtacacactgcctgcaaagatttataccatccaatatgtccacttggtcaatgtaaagtatctatcatacctccaattgcactaaacagcaccgattccgatggtttctgtagagcaacattttcgttctgtgttagtcctctattggtttttgtcaattctaagagtggagataatcagggagtaaagttcctccgtcgctttaaacagttgctaaatccggctcaggtgtttgatttaatgaatggaggtcctcatttaggtttaagattatttcagaagtttgacaatttccggattcttgtttgtggaggcgatggaagtgtaggttgggttttgtcagaaatcgataagctcaacttgaataaacagtgtcagctgggagtgttgcctttgggtacaggaaatgaccttgcccgagttcttggctggggaggttcatatgacgatgacacccaacttcctcagatcctagagaaactggaacgagccagtaccaaaatgttggacaggtggagtataatgacatatgaactcaaattgccaccaaaagcttccctacttccaggacctccagaagcatctgaagaattttatatgacgatttatgaagactcagttgcaacgcatcttacaaaaatcctcaattctgatgaacatgcagtggtcatatcttctgccaagacgctatgtgaaactgtaaaggacttcgttgccaaagtagaaaagacgtatgacaaaaccttggaaaatgccgttgtagctgatgccgtggccagtaaatgttcagtcctaaacgagaagctcgaacaactgctgcaggctttgcacacagattcccaggctgcgcctgttctccctggcctcagccctctcattgtggaagaagatgctgtggaatcgtccagtgaagagtccctgggtgaaagcaaagagcagcttggggatgacgttacaaaaccttcctcccagaaagccgtcaaaccaagggaaatcatgttgcgggcaaatagtttaaagaaagcagtgaggcaagtcattgaggaagccggaaaagttatggatgacccgacagttcacccgtgtgaaccagctaatcagtcctctgattatgacagcacagaaacagatgaatctaaggaggaagctaaagatgatggtgccaaagaatcaataactgttaaaactgcacctcggtctccagatgcccgggcaagttatggccattcccaaactgattctgtccctggtccagctgtggcagccagcaaagaaaacctccctgtgctcaataccagaataatctgcccaggtttaagagcaggactggctgcctcaattgctgggagttcgattatcaacaaaatgttactggcaaacattgatccttttggtgccacgccgtttattgacccggatctagattccgtagatggatattcagaaaaatgtgtcatgaacaattactttgggattggattagatgcaaaaatttcattagaatttaataataaaagagaggagcaccctgaaaaatgcaggagccgaactaaaaacttgatgtggtatggagtccttggaacccgggagttattacagagatcgtacaagaatttagaacaaagggttcaacttgagtgtgatgggcagtatattcctcttcccagcttgcaaggcatagccgtgttgaacattcccagctatgctggaggcactaacttttggggtggaactaaagaggatgatatatttgctgcaccatcctttgatgacaagatcctggaagttgtagcaatatttgatagcatgcaaatggcagtttcaagggtcattaaactgcagcatcatcgaatagcccagtgccgtacagtgaaaatcactatatttggtgacgaaggagtcccagtgcaagtggatggtgaagcgtgggttcagcctccagggattatcaaaattgtgcacaaaaacagagcacaaatgctaacaagggacagagcctttgagagcactctgaaatcttgggaagataagcagaagtgtgattctggtaaaccagttctccgaacccatttgtacatccatcacgccattgacttggcaacagaagaggtgtcgcagatgcagctatgctcccaggctgcagaggagctcattactaggatatgtgacgcagccacaattcactgtcttttggagcaagaactggcccatgctgtgaatgcctgctcccatgccctgaataaagccaacccaaggtgcccggagagtcttacaagagacactgccactgaaatagccatcaatgtgaaggcgctgtataatgaaacagaatctttgctagttggcagggttcctttgcagctggaatcgccacatgaagagcgagtatccaatgccttacactctgtggaggtggaattacagaaactgacagagattccttggctttattatatcttacacccaaatgaggatgaggaacctcctatggattgcaccaaaaggaacaacagaagcaccgtatttcgaatagtgccaaagtttaaaaaggaaaaggttcagaagcagaagacaagttcacagcctggatctggggataccgaaagtgggtcatgtgaagcgaattctccagggaattaaagagcttggaaggagcactccacagtcggaggtgtaatcatattggtgctattccttggaagagaagttattgccacttaatacaaagtccttggaagc

SEQ ID NO: 26285 - DNA, 2487 bp, Homo sapiens
  Clone ID: LIB4119-174-G9_FLI
cgggagatttgattcccttggcgggcggaagcggccacaacccggcgatcgaaaagattcttaggaacgccgtaccagccgcgtctctcaggacagcaggcccctgtccttctgtcgggcgccgctcagccgtgccctccgcccctcaggttctttttctaattccaaataaacttgcaagaggactatgaaagattatgatgaacttctcaaatattatgaattacatgaaactattgggacaggtggctttgcaaaggtcaaacttgcctgccatatccttactggagagatggtagctataaaaatcatggataaaaacacactagggagtgatttgccccggatcaaaacggagattgaggccttgaagaacctgagacatcagcatatatgtcaactctaccatgtgctagagacagccaacaaaatattcatggttcttgagtactgccctggaggagagctgtttgactatataatttcccaggatcgcctgtcagaagaggagacccgggttgtcttccgtcagatagtatctgctgttgcttatgtgcacagccagggctatgctcacagggacctcaagccagaaaatttgctgtttgatgaatatcataaattaaagctgattgactttggtctctgtgcaaaacccaagggtaacaaggattaccatctacagacatgctgtgggagtctggcttatgcagcacctgagttaatacaaggcaaatcatatcttggatcagaggcagatgtttggagcatgggcatactgttatatgttcttatgtgtggatttctaccatttgatgatgataatgtaatggctttatacaagaagattatgagaggaaaatatgatgttcccaagtggctctctcccagtagcattctgcttcttcaacaaatgctgcaggtggacccaaagaaacggatttctatgaaaaatctattgaaccatccctggatcatgcaagattacaactatcctgttgagtggcaaagcaagaatccttttattcacctcgatgatgattgcgtaacagaactttctgtacatcacagaaacaacaggcaaacaatggaggatttaatttcactgtggcagtatgatcacctcacggctacctatcttctgcttctagccaagaaggctcggggaaaaccagttcgtttaaggctttcttctttctcctgtggacaagccagtgctaccccattcacagacatcaagtcaaataattggagtctggaagatgtgaccgcaagtgataaaaattatgtggcgggattaatagactatgattggtgtgaagatgatttatcaacaggtgctgctactccccgaacatcacagtttaccaagtactggacagaatcaaatggggtggaatctaaatcattaactccagccttatgcagaacacctgcaaataaattaaagaacaaagaaaatgtatatactcctaagtctgctgtaaagaatgaagagtactttatgtttcctgagccaaagactccagttaataagaaccagcataagagagaaatactcactacgccaaatcgttacactacaccctcaaaagctagaaaccagtgcctgaaagaaactccaattaaaataccagtaaattcaacaggaacagacaagttaatgacaggtgtcattagccctgagaggcggtgccgctcagtggaattggatctcaaccaagcacatatggaggagactccaaaaagaaagggagccaaagtgtttgggagccttgaaagggggttggataaggttatcactgtgctcaccaggagcaaaaggaagggttctgccagagacgggcccagaagactaaagcttcactataatgtgactacaactagattagtgaatccagatcaactgttgaatgaaataatgtctattcttccaaagaagcatgttgactttgtacaaaagggttatacactgaagtgtcaaacacagtcagattttgggaaagtgacaatgcaatttgaattagaagtgtgccagcttcaaaaacccgatgtggtgggtatcaggaggcagcggcttaagggcgatgcctgggtttacaaaagattagtggaagacatcctatctagctgcaaggtataattgatggattcttccatcctgccggatgagtgtgggtgtgatacagcctacataaagactgttatgatcgctttgattttaaagttcattggaactaccaacttgtttctaaagagctatcttaagaccaatatctctttgtttttaaacaaaagatattattttgtgtatgaatctaaatcaagcccatctgtcattatgttactgtcttttttaatcatgtggttttgtatattaataattgttgactttcttagattcacttccatatgtgaatgtaagctcttaactatgtctctttgtaatgtgtaatttctttctgaaataaaaccatttgtgaatat

SEQ ID NO: 26286 - DNA, 1740 bp, Homo sapiens
  Clone ID: LIB4119-176-D12_FLI
gcgcagcttcctccgcccaccacggaagtgaggcggggatactaaagcgacggagcccggtggacggaagtgggtgttggaggctttaagtttgccaccgtttacaaggccagagataagaataccaaccaaattgtcgccattaagaaaatcaaacttggacatagatcagaagctaaagatggtataaatagaaccgccttaagagagataaaattattacaggagctaagtcatccaaatataattggtctccttgatgcttttggacataaatctaatattagccttgtctttgattttatggaaactgatctagaggttataataaaggataatagtcttgtgctgacaccatcacacatcaaagcctacatgttgatgactcttcaaggattagaatatttacatcaacattggatcctacatagggatctgaaaccaaacaacttgttgctagatgaaaatggagttctaaaactggcagattttggcctggccaaatcttttgggagccccaatagagcttatacacatcaggttgtaaccaggtggtatcgggcccccgagttactatttggagctaggatgtatggtgtaggtgtggacatgtgggctgttggctgtatattagcagagttacttctaagggttccttttttgccaggagattcagaccttgatcagctaacaagaatatttgaaactttgggcacaccaactgaggaacagtggccggacatgtgtagtcttccagattatgtgacatttaagagtttccctggaatacctttgcatcacatcttcagtgcagcaggagacgacttactagatctcatacaaggcttattcttatttaatccatgtgctcgaattacggccacacaggcactgaaaatgaagtatttcagtaatcggccagggccaacacctggatgtcagctgccaagaccaaactgtccagtggaaaccttaaaggagcaatcaaatccagctttggcaataaaaaggaaaagaacagaggccttagaacaaggaggattgcccaagaaactaattttttaaagagaacactggacaacattttactactgagggaaatagccaaaaaggcaaataatggaaaaatagtaaacattaagtaaatgctgtagaagtgagtttgtaaatattctacacatgtaaaatatgtaaaactatgggttatttttattaaatgtattttaaaataacccatagttttacatattttacatgtgtagtcttccagattatgtgacatttaagagtttccctggaatacctttgcatcacatcttcagtgcagcaggagacgacttactagatctcatacaaggcttattcttatttaatccatgtgctcgaattacggccacacaggcactgaaaatgaagtatttcagtaatcggccagggccaacacctggatgtcagctgccaagaccaaactgtccagtggaaaccttaaaggagcaatcaaatccagctttggcaataaaaaggaaaagaacagaggccttagaacaaggaggattgcccaagaaactaattttttaaagagaacactggacaacattttactactgagggaaaagccaaaaaggcaaataaggaaaaatagtaacattaagtaaatgctgtagaagtgagtttgtaaatattctacacatgtaaaatatgtaaaactatgggttatttttattaaatgtattttaaaat

SEQ ID NO: 26287 - DNA, 2382 bp, Homo sapiens
  Clone ID: LIB4119-204-G9_FLI
tcaaggtgatcggtggccctcctggaagagaaggcctcttagtggggctgaagaatggacagatcctgaagatcttcgtggacaatctctttgctatcgtcctgctgaagcaggccacagctgtgcgctgcttggacatgagtgcctcccgtaagaagctggccgtggtagatgaaaatgacacttgcctggtgtatgacatcgacaccaaggagctgctttttcaggaaccaaacgccaacagtgtagcttggaacacccagtgtgaggacatgctctgcttctcgggaggaggctacctcaacatcaaagccagcaccttccctgtgcaccggcagaagctgcagggctttgtggtcggctacaatggctccaagatcttctgcctccatgtcttctccatttctgccgtggaggtgccgcagtccgctcccatgtaccagtacctggataggaaactgttcaaggaagcctaccagattgcttgcttgggtgtcacagacactgattggcgtgaactggccatggaagcgctagaaggtttagattttgaaacagcaaagaaggccttcatcagagtacaagacctccgatatttagagctcatcagcagcattgaggagaggaagaagcggggagagaccaacaatgacctgtttctggcagatgtgttttcctaccaggggaagttccatgaggccgccaaactgtacaagaggagtgggcacgagaacctcgcgcttgaaatgtacaccgacctctgcatgtttgagtatgccaaggatttccttggatctggagaccccaaagaaacaaagatgctaatcaccaaacaggctgactgggccagaaatatcaaggagcccaaagccgccgtggagatgtacatctcagcaggagagcacgtcaaggccatcgagatctgtggtgaccatggctgggttgacatgttgatcgacatcgcccgcaaactggacaaggctgagcgcgagcccctgctgctgtgcgctacctacctcaagaagctggacagccctggctatgctgctgagacctacctgaagatgggtgacctcaagtccctggtgcagctgcacgtggagacccagcgctgggatgaggcctttgctttgggtgagaagcatcctgagtttaaggatgacatctacatgccgtatgctcagtggctagcagagaacgatcgctttgaggaagcccagaaagcgttccacaaggctgggcgacagagagaagcggtccaggtgctggagcagctcacaaacaatgccgtggcggagagcaggtttaatgatgctgcctattattactggatgctgtccatgcagtgcctcgatatagctcaagatcctgcccagaaggacacaatgcttggcaagttctaccacttccagcgtttggcagagctgtaccatggttaccatgccatccatcgccacacggaagatccgttcagtgtccatcgtcctgaaactcttttcaacatctccaggttcctgctgcacagcctgcccaaggacaccccctcgggcatctctaaagtgaaaatactcttcaccttggccaagcagagcaaggccctcggtgcctacaggctggcccggcacgcctatgacaagctgcgtggcctgtacatccctgccagattccaaaagtccattgagctgggtaccctgaccatccgcgccaagcccttccacgacagtgaggagttggtgcccttgtgctaccgctgctccaccaacaacccgctgctcaacaacctgggcaacgtctgcatcaactgccgccagcccttcatcttctccgcctcttcctacgacgtgctacacctggttgagttctacctggaggaagggatcactgatgaagaagccatctccctcatcgacctggaggtgctgagacccaagcgggatgacagacagctagagattgcaaacaacagctcccagattctgcggctagtggagaccaaggactccatcggagatgaggacccgttcacagctaagctgagctttgagcaaggtggctcagagttcgtgccagtggtggtgagccggctggtgctgcgctccatgagccgccgggatgtcctcatcaagcgatggcccccacccctgaggtggcaatacttccgctcactgctgcctgacgcctccattaccatgtgcccctcctgcttccagatgttccattctgaggactatgagttgctggtgcttcagcatggctgctgcccctactgccgcaggtgcaaggatgaccctggcccatgaccagcatcctggggacggcctgcaccctctgcccgccttggggtctgctgggctgtgaaggagaataaagagttaaactgtc

SEQ ID NO: 26288 - DNA, 1835 bp, Homo sapiens
  Clone ID: LIB4119-205-A2_FLI
ggactatacaagggcatatatactagtaaaagtgttttctcaatagatcaccaaagaatttgccacacctgatatatagaaaagtttattgtgcagcacctctaccttcgctctcctgctcctgctctggccacataaaacgtgctggctcctcctttgccttctgctatcattggaagcttcctgatgcctcccaagaagcaaatgccatcatggttcctgtacagcctgcagaaccccccgaggtactgaagagtgagccgtatggggagaaggctgatgtctgggcagtaggctgcatcctttatcagatggcgactttgagtccccccttctacagcactaacatgctgtccttggctacaaaaatagtggaggcggtatatgaaccagtcccagaaggtatctactctgaaaaagtaacagacaccatcagcaggtgcctcactcctgatgcggaagctcgtccagatattgtagaagtcagttcgatgatatcagatgtcatgatgaaatatttagacaacttatctacatcccagttgtccttggaaaagaagctagaacgggaacgaagacgcacacaaaggtattttatggaagccaaccggaacaccgtcacatgtcaccatgagctggctgttctatctcacgagacctttgagaaggcaagtttgagtagcagcagcagtggagcagccagcctgaaaagtgaactttcagaaagcgcagacctgccccctgaaggcttccaggcctcctatggtaaagacgaagacagggcctgtgacgaaatcctgtcagatgataacttcaacctggaaaatgctgagaaagatacatattcagaggtagatgatgaattggacatttcggataactccagcagctccagttcaagccctctgaaagaatctacattcaacattttaaagagaagttttagtgcttcaggaggagaaagacaatcccaaacaagggacttcactggaggaacaggatcaagaccaagaccagcatcagcaggaattgctgtgtcccagaggaaagtgcgtcagatcagtgatcctattcagcagatattaattcagctgcacaaaataatctatatcacacagcttcctccagctttgcaccacaatttgaaaagaagggttatagagagattcaagaaatccctcttcagccagcagagtaacccttgtaatttgaaatctgaaattaaaaagttatctcagggatctccagaaccgattgagcccaactttttcacagcagattaccatttattacatcgttcatccggtggaaacagcctgtccccaaatgaccctacaggtttaccaaccagcattgaattggaggaaggaataacatatgaacagatgcagactgtgattgaagaagtccttgaggaaagtggctattacaattttacatctaacaggtatcattcctatccatgggggaccaagaatcacccaaccaaaagatgaaaatgctgcattttgagtggacttgattttctcagtgaagttcaagttctggacttcagccgctattgcaagatgcccaaggattgggtgctgctagagggtgtggaaaagaccaagatgccatggggcctgcaggacttctttctgggggtcctgtgctggagtatatgacagctgcggtacttgagggcttcattgccagaacacattatatacaggatgtcagagctaccagtgtgctgctgggagaaaatgctgcaaaattcatcttttggagggtggggggaaaacccaaaaacaacaacaaaaaaactctcttacagaattttccttaacatt

SEQ ID NO: 26289 - DNA, 4176 bp, Homo sapiens
  Clone ID: LIB4119-206-H10_FLI
cccatgtgtctaaagagtgtaaagacctaatcacacggatgctacagagagatcccaagagaagggcttctttagaagagattgaaaatcatccttggcttcagggagtggacccttcaccagctacaaagtataacattccccttgtgtcatacaaaaatctctcggaagaggagcacaacagcatcattcagcgcatggtgcttggggacatagcggatcgagacgccattgtagaagccctggaaaccaacaggtataaccatatcacagccacatacttcctgctggctgaaaggatcctgagagaaaagcaagagaaagaaatacagaccagatctgcaagcccgagcaatatcaaggcccagtttaggcagtcatggccaaccaaaattgatgtaccccaggaccttgaggatgacctcacggccactcctttgtcccacgcgactgtccctcagtctcctgctcgggctgctgacagtgtcctcaatggccacaggagcaaaggcctgtgtgactcagctaagaaagatgacctccctgagttggctggaccagcactctctacggtgccacccgcaagcttaaaacccacagccagtgggcggaagtgtctgttcagggtggaagaagatgaagaggaagatgaggaggacaagaaacccatgtccctctcaacacaagtggttttgcgccggaagccatctgtaaccaaccgcctgacatccaggaagagtgcgcccgtcctcaaccagatctttgaggaaggggaatctgacgatgagtttgacatggatgagaatctgcctcccaagttgagcaggttaaagatgaatatagcttctccaggtacagttcacaaacgctaccaccggaggaaaagtcagggccggggctccagctgcagtagttcggagaccagtgatgatgattctgaaagccggcggcggctcgataaagatagcgggttcacctactcctggcaccgacgggatagcagcgaggggccccctggcagtgagggggatggcgggggccagagcaagccaagcaatgccagtggaggggtggacaaggccagccccagtgagaacaatgctggtgggggcagtccctccagcggctcgggtggcaaccccaccaatacatcgggtaccacacgccgctgtgccggccccagcaactccatgcagctggcctctcgcagtgctggggagctcgttgagagcctcaaactcatgagcctctgcctcggctcccagcttcatgggagcaccaagtacattattgatccacagaatggcttgtcattttccagtgtgaaagtccaagagaaatctacgtggaaaatgtgcattagctccacagggaatgcagggcaggtccctgcagtgggcggcataaagtttttctctgaccacatggcagataccaccactgaattggaacggataaagagcaagaacctgaaaaataacgtgctgcagctacctctgtgcgaaaagaccatctctgtgaacatccagcggaaccctaaggaggggctgctgtgcgcatccagcccagccagctgttgccatgtcatctgactgtggccccatctggccgctagcacgcttcctgctcagagcagtgaagaccggctcacttcactgttccatttggttttactattttaaagtgggcgttaggagcaattatttattacctttccatttgttcgcctgatgatgtgacaatgcatggtctttgtgcatgctgctagacacttttctttcccagccgaaaagcctattatgtaatttttacattcataattttaatgtggatgatcaggattaaatcaagatatatatctggaacctcttataaatggagcacttagaaatttgttgttctgcacttaacctagagagagaaaaaatgctttttctttgtgaaaaatctgaattcctgtcctgaccttctgtgatgtggaaaccctaggctctgagacacactctctggtgtctgagacagaaccaaagcaataacgttgtgatgcccacaggcctggagccagctagcgaccttgtgccgcccagctgtccatggcccgtgcagagcagaggacagtgagtgtctgcactgagaaccttaaaccacagttgaacatacccacacctgtttgtcttaagctatagtgtaaaaacaaagtttgggctctgaaaatttaactgaaaaagatttccttgtttttgtaataggtgagataaagtacttagatttataaggcagcttcccctgtagtgataaattacaagcagacaatcttattttgtaatgtgatgaagtgatgatgtcttaactctacttagagagtgtatgtctgtctaacagaacaaaaagatgctctgtgtaaattccttcctgtagggcacactgcaggatttccatgtagatagaagaactatagggcctagtacagaaggtgcacacaaatgttggcaaagtcaaaaccccatgaattaaaacctactggaatttggtttttaggagtttggtaattagattatctcttttgttattttcattcagttatatcctttggctcagctagctttgaaattggctgatgaaaaaatatacataaaagggtaaaattcacacatacagcaaacaaaaatgcacaaagcctgcttcgtaacttttttttctggaattgtttttcactttgcctttttctgccaaaacaataatcaaagaactcttgctttaacctattcctgtacaaagactgtttttgaccagataatcatctgttgtggcattctatcttgtaggacactgtatattgcaaattgctgattatggaaggggccagttgctgttttttcatgcagtgccctgggagtcttaaaagcagtgcttagcaacattggtgatagcatgtggctgggacccagggcccttccccactcttcagccccgagtcatgtgtctgaggtgacggactgagacgcatctggtcctgtaattcagagagtgggcacatcaccaaagaactgcattgctgtggtcactgtttcttcaagtacacactgactctgctactttaggataaatatattttactcagaactctgaatttcacagtatacttactaaactaagtaaaaatgatacttaaaatacttattttactttctagacctaggctagatgttttaagctacagctctagttcattgtgatatttataatttgaaagctatgagaatagatgtgtgggtgaagccatagaacatatttgcttgaaattcttgagcagggatcttataaagggccagaaataagatgtgtggttcacatagatagtgagcgtaacatctgtattaaacataggagagaagtttataaagggcattggcaataaactctttgttgcagctgttttccaagcagtgtaaatactttttcctgtgattatgtatagccttggaatggcaccttttaactaacccatatgtgtttggtttcaatggttttttatattcagatgtatatatggtgctcactttaggatcagcagtgttgaccatttatgctgcatagctgtattatagccttattagttgtgtggttgacccttggggtatacaaatgtcagtctgagtggtgtcttactcctttgtttataagtgaatgattgtgcatgttttgtatgtcatagtatgtcgtcacataaaagggagggagcgaaaaaccattacattaagataatattggaccaaactacttacttgctctaaacagttacttgtaccccttaacctgtcttcaaaagttgcatatagttacagtagtgtataaattaaatattgtggaaaaacagtcttgtatttttctgtatgtgtgtatatatatataattatgtacttctggcaattctatctgtatttaaagatgtgacaatcttgacaccaattttaagaatagctgtgagaccgaattaaagataatccctaccaagtgaaaattgatgtgtgttaagagggtacagaattatcaactgatttggtcagttgcttccaatgctggttgatttccctcattgtgtaaacattgacaggtatgtgacaaatgggaaaaaaaatccaaataataaagtgacatattggtgttcagcaatat

SEQ ID NO: 26290 - DNA, 3733 bp, Homo sapiens
  Clone ID: LIB4119-210-G8_FLI
atttcattccgtttgagtttcttgttttcgttaaatgtctgcagagttgctgcccctttcttgaactatgagtactgcaatctttttaattctcaatatgaatagagctttttgagctttaaatctaaggggaactcgacaggcctgtttggcatatgcaatgaacatcaagaaaccatcttgctgtggaagcataattatttttcttctccctttttgaaagatctttccttttgatgccagttttcttccttgtttacacaagttcaatttgaaaggaaaaggcaatagtaagggtttcaaaatggcagagaaatttgaaagtctcatgaacattcatggttttgatctgggttctaggtatatggacttaaaaccattgggttgtggaggcaatggcttggttttttctgctgtagacaatgactgtgacaaaagagtagccatcaagaaaattgtccttactgatccccagagtgtcaaacatgctctacgtgaaatcaaaattattagaagacttgaccatgataacattgtgaaagtgtttgagattcttggtcccagtggaagccaattaacagacgatgtgggctctcttacggaactgaacagtgtttacattgttcaggagtacatggagacagacttggctaatgtgctggagcagggccctttactggaagagcatgccaggcttttcatgtatcagctgctacgggggctcaagtatattcactctgcaaatgtactgcacagagatctcaaaccagctaatcttttcattaatacggaagacttggtgctgaagataggtgactttggtcttgcacggatcatggatcctcattattcccataagggtcatctttctgaaggattggttactaaatggtacagatctccacgtcttttactttctcctaataattatactaaagccattgacatgtgggctgcaggctgcatctttgctgaaatgctgactggtaaaaccctttttgcaggtgcacatgaacttgaacagatgcagctgattttagaatctattcctgttgtacatgaggaagatcgtcaggagcttctcagcgtaattccagtttacattagaaatgacatgactgagccacacaaacctttaactcagctgcttccaggaattagtcgagaagcactggatttcctggaacaaattttgacatttagccccatggatcggttaacagcagaagaagcactctcccatccttacatgagcatatattcttttccaatggatgagccaatttcaagccatccttttcatattgaagatgaagttgatgatattttgcttatggatgaaactcacagtcacatttataactgggaaaggtatcatgattgtcagttttcagagcatgattggcctgtacataacaactttgatattgatgaagttcagcttgatccaagagctctgtccgatgtcactgatgaagaagaagtacaagttgatccccgaaaatatttggatggagatcgggaaaagtatctggaggatcctgcttttgataccaattactctactgagccttgttggcaatactcagatcatcatgaaaacaaatattgtgatctggagtgtagccatacttgtaactacaaaacgaggtcatcatcatatttagataacttagtttggagagagagtgaagttaaccattactatgaacccaagcttattatagatctttccaattggaaagaacaaagcaaagaaaaatctgataagaaaggcaaatcaaaatgtgaaaggaatggattggttaaagcccagatagcgctagaggaagcatcacagcaactggctggaaaagaaagggaaaagaatcagggatttgattttgattcctttattgcaggaactattcagcttagttcccagcatgagcctactgatgttgttgataaattaaatgacttgaatagctcagtgtcccaactagaattgaaaagtttgatatcaaagtcagtaagccaagaaaaacaggaaaaaggaatggcaaatctggctcaattagaagccttgtaccagtcttcttgggacagccagtttgtgagtggtggggaggactgttttttcataaatcagttttgtgaggtaaggaaggatgaacaagttgagaaggaaaacacttacactagttacttggacaagttctttagcaggaaagaagatactgaaatgctagaaactgagccagtagaggatgggaagcttggggagagaggacatgaggaaggatttctgaacaacagtggggagttcctctttaacaagcagctcgagtccataggcatcccacagtttcacagtccagttgggtcaccacttaagtcaatacaggccacattaacaccttctgctatgaaatcttcccctcaaattcctcatcaaacatacagcagcattctgaaacatctgaactaaaacactcagcagacatttatctttgtattcttcatgaaatgtgttttgtctttttttattactagtgtttaagtcattttttacttgaatcagatggtgtcatttagtaaggattttatgagttcttgttttttaaaatccagactttctttttctacatgtgagatagttttcattttaactggcatgtcatttgcacacaaaaataaagactagagcaaaataatgcaacgcaggaggagaaaagaaatgcactaagacaagaacattctctcatagaacattgatctgttttacaggaaacaaaccttgccttgaaatttacacagtgagactgtacataattgcatgaaaatagctatttttttcctaagacatttttcattcatgaatattttcaagtttttcatactgtacacatttcttaaaacacatgataccagcagcaactgaaaatgaatgccgaatttggtacacatgtgttatctacctcaaggtaacaagagtatgtggcaaaacatataccacccatagtgcttcacaaaatgcacttctatttagccagcgtttattgtagtaaactattcttaataaaactcactcactgtttataaatgttctggtatgcattctttatagtgaagtgttaatacatcacatcttatttattttagcaaatcagtatattttctgtatttaattataaaaaattaacttagtttttaaaatttatttgcaaatatactttactttttccatttggcactatggtttgttgcctacctagctgcatctataatgtcagcttatcctaaggctgtccacgtacttaatttacttaagtgttcattttaagtaacgtgctcactgtgtataggaatttgtattttggaggtgcttgatctatctacaaagaaaaattaattaggaattactttattataaaatgctcctagaagtcttaattgtgtttattttttaaaaaaacaaatgttagacttgtgtgcatggaagtaattaaggtacatcattattgtagtttgaaagttgtacatgataagacattttgtttttactgtatgtttttactgaatgatctattccccatcccaaggcaagcatgaataaaattaggttaaacgtagcatgtggcatcgcagtctcttagaatttgtttcatctattttattttattgaatactgtctgtatctttggttatcctgtttgaagaaaaaggacaaataaaacatggccagcaaatc

SEQ ID NO: 26291 - DNA, 3246 bp, Homo sapiens
  Clone ID: LIB4119-235-B11_FLI
ggcttattataacacttaacatgatgccctacaggttcatctgtgttgaaaatgacaggatttgctcctttcagtggctgaatagtattccattgtgtatatatatatcatattttctttttttactcatctgtgttttttgttttttttttactttttacacatctgttttttaattttttttttaagctaacatgcaagaaatgaacacttatctgttaatagatacttaggttgattccatatcttgtatattgtgaatagtgctgcaacaaacgtgggcctacagcatgcttcatgatgatccaagcagaagaattcctgctgaaatggcattgtgcagcccattctttagcattccttttccccctcatattgaagatctggtcatgcttcccactccagtgctaagactgctgaatgtgctggatgatgattatcttgagaatgaagaggaatatgaagatgttgtagaagatgtaaaagaggagtgtcaaaaatatggaccagtggtatctctacttgttccaaaggaaaatcctggcagaggacaagtctttgttgagtatgcaaatgctggtgattccaaagctgcgcagaaattactgactggaaggatgtttgatgggaagtttgttgtggctacattctacccgctgagtgcctacaagaggggatatctgtatcaaaccttgctttaatcagtaacctaaggactgtttcctttttctcctcttccatttcttgggttattccacatatgaatgcaggactacccccttaccattttaagaaggtactttatacatttatttaatcctactaatgtgcagccattgcccaagcagtgactgcgttgcatacatttggcactgagtaggacaagacctctcagctatacattgaggggttttagagcatccatgtgggcaaccctttttttgtgcgggagagcaggtgttgctcttcagtatgtagcctaaaaaaatcttaattatttcatggatcatgaagcaaggatgaataatatcatgtcttggtaaatactaacaaatttgttaggtttggtgacatcatttacagattatttctttatgttgtccagtggttcttccttattgttgatatccataagctggcactggatgctctcagtaatgttaagtaattgtcaagcagcagttacctactgtgttcttaacactgagttgtgaattttttcttaaagcagtactgtagtactgaatattcctttaaaggaactgcagtgagcctatctaagtttttttaaattaaggcttttaaaatagaaagctgatgcttgatcttgcacaatttttatgtctagtatgtatgcttgagtgaatgtgcgagtatgaatgattagagaaaatttgagtcagtgtactttatagtgtgaatcctgtgagctaatacagtctatacttatttcttccctacctgtttcacatccgtaagatttaagatatacattttttgagaggtagtctgtctgatacaatgtaaatgacaaaacataattcctgagaggcccagaacaaactggagtctagcctggagttaaattgagacttctaaaatgattggaacaaagactaagttgtgccagatgtaaatcaacccctcttttagtttactttagactttgtattagctcatcttttttgtagtaaatctatagttttaaggtttctcaagatgtggctctacctactatgatgaaaattgaagtgggtcaaaagaattagatgtacagtgaagggaaaagaaaaaaaatgggcgaagagagggtggaaaataaaaggattcttttttcttcctttctgtttctcgtatccctgctccctttttcctccccttccctcattctttgcctctatccttagctgaagacaaactagaggagcagcatcccaggtagtttggcttttgactgcaaggtagttaagaaaggtgtagatataatgaggtagaagtagaaaggaagaaaaactcaaagaattcttaaaaggattcatagcaacataatgtgtccctgagtagaggatgctgctatgcgtgagttcatggacacaagttgattacatggtttttagaattataattatggattcttcttatttcatggtaggttgtctttaaagatataaaaattaggatgcctttatgaagcactgattataccaaaaaaaaaagacaagttatatacaggttattaatttttttatttatttattttttcctaaggaaaaagtcttctatctttccctgctggaagcctcctcatatttccttatgtttgccatgcaggttgctgagagtccagttagaatttgcattttacagaatgaaatactttaccccattcaaacaattattgtttgacattttagttatttataattgtcaaattcaggactctcctttaatgtttattatgaaaccaaatttggcataaggaggctgatttatgaattaccaaagggtcttgtggcatgttccccaatacatgcccttagaaggaagaactattattttttattttggccctttcaggagttgattataaattggtttgttttcaagtcagaattcaagtgggcagaacccgtattgtgaagacctaaactttcctaaatgttcatatgggtagcagattttgtggtgattagaaacatcaggtccttaaatacgatgaacatgggatacaaaggaattctttataagggcaagtatcctaagttagcacatttacttttctctcccctccgcccccaaaagaaaaatccttacaaataaactgcaggtaggcttctaagcctagtcctgcagtatgctgctaacatcttgatgccaatcttcacagcattctttgattgtcatcttattgctgatacattcatacatatatttagtgcttgacactgtagaattttgttacagaagatggttactagattttaagggagctgagggaataattgatgagccttgaattaaccatgcatttaattagattttttgttgttgttgttgttgttttgagatgatgtcttgctctgttgcccaggctggagtgcagtggctcaatctcggctcactgcaacctctgcctcgcaggtttgagcgattctcctgtctcagcctccccagtagctgggtttacaggcgcttgccaccacacctggctagatgttttatattaaagccagagaattgaaaaag

SEQ ID NO: 26292 - DNA, 2991 bp, Homo sapiens
  Clone ID: LIB4119-256-F5_FLI
ttggaaaggatcgggcactgaactttgacccctgctgcatcagctactttactaaaggcgagtacattttgctggggggttcagacaagcaagtatctcttttcaccaaggatggagtgcggcttgggactgttggggagcagaactcctgggtgtggacgtgtcaagcgaaaccggattccaactatgtggtggtcggctgccaggacggcaccatttccttctaccagcttattttcagcacagtccatgggctttacaaggaccgctatgcctacagggatagcatgactgacgtcattgtgcagcacctgatcactgagcagaaagttcggattaaatgcaaagagcttgtcaagaagattgccatctacagaaatcgattggctatccaactgccagagaaaatcctcatctatgagttgtattcagaggacttatcagacatgcattaccgggtaaaggagaagattatcaagaagtttgagtgcaacctcctggtggtgtgtgccaatcacatcatcctgtgccaggagaaacggctgcagtgcctgtccttcagcggagtgaaggagcgggagtggcagatggagtctctcattcgttacatcaaggtgatcggtggccctcctggaagagaaggcctcttagtggggctgaagaatggacagatcctgaagatcttcgtggacaatctctttgctatcgtcctgctgaagcaggccacagctgtgcgctgcttggacatgagtgcctcccgtaagaagctggccgtggtagatgaaaatgacacttgcctggtgtatgacatcgacaccaaggagctgctttttcaggaaccaaacgccaacagtgtagcttggaacacccagtgtgaggacatgctctgcttctcgggaggaggctacctcaacatcaaagccagcaccttccctgtgcaccggcagaagctgcagggctttgtggtcggctacaatggctccaagatcttctgcctccatgtcttctccatttctgccgtggaggtgccgcagtccgctcccatgtaccagtacctggataggaaactgttcaaggaagcctaccagattgcttgcttgggtgtcacagacactgattggcgtgaactggccatggaagcgctagaaggtttagattttgaaacagcaaagaaggccttcatcagagtacaagacctccgatatttagagctcatcagcagcattgaggagaggaagaagcggggagagaccaacaatgacctgtttctggcagatgtgttttcctaccaggggaagttccatgaggccgccaaactgtacaagaggagtgggcacgagaacctcgcgcttgaaatgtacaccgacctctgcatgtttgagtatgccaaggatttccttggatctggagaccccaaagaaacaaagatgctaatcaccaaacaggctgactgggccagaaatatcaaggagcccaaagccgccgtggagatgtacatctcagcaggagagcacgtcaaggccatcgagatctgtggtgaccatggctgggttgacatgttgatcgacatcgcccgcaaactggacaaggctgagcgcgagcccctgctgctgtgcgctacctacctcaagaagctggacagccctggctatgctgctgagacctacctgaagatgggtgacctcaagtccctggtgcagctgcacgtggagacccagcgctgggatgaggcctttgctttgggtgagaagcatcctgagtttaaggatgacatctacatgccgtatgctcagtggctagcagagaacgatcgctttgaggaagcccagaaagcgttccacaaggctgggcgacagagagaagcggtccaggtgctggagcagctcacaaacaatgccgtggcggagagcaggtttaatgatgctgcctattattactggatgctgtccatgcagtgcctcgatatagctcaagatcctgcccagaaggacacaatgcttggcaagttctaccacttccagcgtttggcagagctgtaccatggttaccatgccatccatcgccacacggaagatccgttcagtgtccatcgtcctgaaactcttttcaacatctccaggttcctgctgcacagcctgcccaaggacaccccctcgggcatctctaaagtgaaaatactcttcaccttggccaagcagagcaaggccctcggtgcctacaggctggcccggcacgcctatgacaagctgcgtggcctgtacatccctgccagattccaaaagtccattgagctgggtaccctgaccatccgcgccaagcccttccacgacagtgaggagttggtgcccttgtgctaccgctgctccaccaacaacccgctgctcaacaacctgggcaacgtctgcatcaactgccgccagcccttcatcttctccgcctcttcctacgacgtgctacacctggttgagttctacctggaggaagggatcactgatgaagaagccatctccctcatcgacctggaggtgctgagacccaagcgggatgacagacagctagagattgcaaacaacagctcccagattctgcggctagtggagaccaaggactccatcggagatgaggacccgttcacagctaagctgagctttgagcaaggtggctcagagttcgtgccagtggtggtgagccggctggtgctgcgctccatgagccgccgggatgtcctcatcaagcgatggcccccacccctgaggtggcaatacttccgctcactgctgcctgacgcctccattaccatgtgcccctcctgcttccagatgttccattctgaggactatgagttgctggtgcttcagcatggctgctgcccctactgccgcaggtgcaaggatgaccctggcccatgaccagcatcctggggacggcctgcaccctctgcccgccttggggtctgctgggctgtgaaggagaataaagagttaaactgtc

SEQ ID NO: 26293 - DNA, 2404 bp, Homo sapiens
  Clone ID: LIB4119-266-G8_FLI
ctcatcccaagccaggagggtttctggggaggggtgcagcccctggcagactgacagtgtggcctgggggtttgggggtgccagggaagcaggggccaacctcataggaggagacacgagtgcggttctctttcccccactggggggcctgctgtgtcagcagccaggcgggaggcctgggcggcagagccagtggtacaggggcctgggcagggcggtgtctggcagcagcggcaccatgtccaccatccagtcggagactgactgctacgacatcatcgaggtcttgggcaaggggaccttcggggaggtagccaagggctggcggcggagcacgggcgagatggtggccatcaagatcctcaagaatgacgcctaccgcaaccgcatcatcaagaacgagctgaagctgctgcactgcatgcgaggcctagaccctgaagaggcccacgtcatccgcttccttgagttcttccatgacgccctcaagttctacctggtctttgagctgctggagcaaaaccttttcgagttccagaaggagaacaacttcgcgcccctccccgcccgccacatccgtacagtcaccctgcaggtgctcacagccctggcccggctcaaggagctggctatcatccacgctgatctcaagcctgagaacatcatgctggtggaccagacccgctgccccttcagggtcaaggtgattgacttcggatccgccagcattttcagcgaggtgcgctacgtgaaggagccatacatccagtcgcgcttctaccgggcccctgagatcctgctggggctgcccttctgcgagaaggtggacgtgtggtccctgggctgcgtcatggctgagctgcacctgggctggcctctctaccccggcaacaacgagtacgaccaggtgcgctacatctgcgaaacccagggcctgcccaagccacacctgttgcacgccgcctgcaaggcccaccacttcttcaagcgcaacccccaccctgacgctgccaacccctggcagctcaagtcctcggctgactacctggccgagacgaaggtgcgcccattggagcgccgcaagtatatgctcaagtcgttggaccagattgagacagtgaatggtggcagtgtggccagtcggctaaccttccctgaccgggaggcgctggcggagcacgccgacctcaagagcatggtggagctgatcaagcgcatgctgacctgggagtcacacgaacgcatcagccccagtgctgccctgcgccaccccttcgtgtccatgcagcagctgcgcagtgcccacgagaccacccactactaccagctctcgctgcgcagctaccgcctctcgctgcaagtggaggggaagccccccacgcccgtcgtggccgcagaagatgggaccccctactactgtctggctgaggagaaggaggctgcgggtatgggcagtgtggccggcagcagccccttcttccgagaggagaaggcaccaggtatgcaaagagccatcgaccagctggatgacctgagtctgcaggaggctgggcatgggctgtggggtgagacctgcaccaatgcggtctccgacatgatggtccccctcaaggcagccatcactggccaccatgtgcccgactcgggccctgagcccatcctggccttctacagcagccgcctggcaggccgccacaaggcccgcaagccacctgcgggttccaagtccgactccaacttcagcaacctcattcggctgagccaggtctcgcctgaggatgacaggccctgccggggcagcagctgggaggaaggagagcatctcggggcctctgctgagccactggccatcctgcagcgagatgaggatgggcccaacattgacaacatgaccatggaagctgagaggccagaccctgagctcttcgaccccagcagctgtcctggagaatggctgagtgagccagactgcaccctggagagcgtcaggggcccacgggctcaggggctcccaccccgccgctcccaccagcatggtccaccccggggggccaccagcttcctccagcatgtcaccgggcaccactgatggtgattccacccctgcccatcactgggggctgcgctagctgggctggcattccctcccaacctgaactgctcctcagagccatctcctgaacccacaaattattcttacagaaagatagttatccagaaattctcattccccgtctgcggtgcggtgcgtgcctgcacacctctcctaaacacagcagggctttggagtctggcccatgctccttggccagaaggacagcaggaaagggggctgcaccccgctggccctgcgctcgcccttggccctgctgcctctgtctatttcaatatagaactgttcagc

SEQ ID NO: 26294 - DNA, 1278 bp, Homo sapiens
  Clone ID: LIB4119-276-B1_FLI
ggacaatgcctgctggcccacatgacggggggatgtagacggcagcggcgccagtcgctcctggcaccatggacgatgccacagtcctaaggaagaagggttacatcgtaggcatcaatcttggcaagggttcctacgcaaaagtcaaatctgcctactctgagcgcctcaagttcaatgtggctgtcaagatcatcgaccgcaagaaaacacctactgactttgtggagagattccttcctcgggagatggacatcctggcaactgtcaaccacggctccatcatcaagacttacgagatctttgagacctctgacggacggatctacatcatcatggagcttggcgtccagggcgacctcctcgagttcatcaagtgccagggagccctgcatgaggacgtggcacgcaagatgttccgacagctctcctccgccgtcaagtactgccacgacctggacatcgtccaccgggacctcaagtgcgagaaccttctcctcgacaaggacttcaacatcaagctgtctgactttggcttctccaagcgctgcctgcgggacagcaatgggcgcatcatcctcagcaagaccttctgcgggtcggcagcttatgcagcccccgaggtgctgcagagcatcccctaccagcccaaggtgtatgacatctggagcctgggcgtgatcctgtacatcatggtctgcggctccatgccctatgacgactccgacatcaggaagatgctgcgtatccagaaggagcaccgtgtggacttcccgcgctccaagaacctgacctgcgagtgcaaggacctcatctaccgcatgctgcagcccgacgtcagccagcggctccacatcgatgagatcctcagccactcgtggctgcagccccccaagcccaaagccacgtcttctgcctccttcaagagggagggggagggcaagtaccgcgctgagtgcaaactggacaccaagacaggcttgaggcccgaccaccggcccgaccacaagcttggagccaaaacccagcaccggctgctggtggtgcccgagaacgagaacaggatggaggacaggctggccgagacctccagggccaaagaccatcacatctccggagctgaggtggggaaagcaagcacctagcatgacaatggccccgttgtgtgtggtgggggtcggggttggggggcatggtgcagtcggccttcacgtaaactaagtaggcaggtaggatctgaagaaggcacaggtgcaagtaaaattcgtcaattaaacc

SEQ ID NO: 26295 - DNA, 2325 bp, Homo sapiens
  Clone ID: LIB4119-283-F3_FLI
ccgcaccggaacaaagactcaaatggatgctaaaaagccaaggaaatgtgatttgactcccttcctggttttgaaagcaagaaagaaacaaaagttcacctctgcgaaggttggaagtaaactttcggttcagatccagaagccaccttccaatatcaagaactccagaatgacccaagtctttcataagaacaccagtgttacttcactcccctttgtggacaccaaggggaagaagaatacggtaagcttcccacacattagcaagaaagtcctgctgaagtcatccctgctgtatcaggagaatcaagctcacaatcagatgccggcctcagagctcaaggcttcagaaatacctttccaccctagcattaaaacccaggatcccaaggcagaggagaagtcaccaaagaagcaaaaggtgactctgacagcggcagaggccctaaagctttttaagaaccagctgtctccatatgaacaaagtgaaatcctgggctacgcggagctgtggttcctgggtcttgaagccaagaagctcgacacggctcctgagaaatttagcaagacgagttttgatgatgagcatggcttctatctgaaggttctgcatgatcacattgcctaccgctatgaagttctggagacaatcgggaaggggtcctttggacaggtggccaagtgcttggatcacaaaaacaatgagctggtggccctgaaaatcatcaggaacaagaagagggggcaaagaggaggtttcaccagcaggccctgatggagctgaagatcctggaagctctcagaaagaaggacaaagacaacacctacaatgtggtgcatatgaaggactttttctactttcgcaatcacttctgcatcacctttgagctcctgggaatcaacttgtatgagttgatgaagaataacaactttcaaggcttcagtctgtccatagttcggcgcttcactctctctgttttgaagtgcttgcagatgctttcggtagagaaaatcattcactgtgatctcaagccctatatcaagggagggcatttcgtgggaatgtcgaacaaattcagtcaatggcatttctaaggccgtgcaagcaaggcctagaaccaggtgccaaagaagataaaaacaaagtcactatcttcaggagttgcagaatcaatagggggaaagtgacaaatatatgcaaaagaaactgtgcaaagcagtgactatgaggtctgaatgagaaacgccgaccacaagtcaaatggaaaatatagtgctataccaaaagggccaagcctctgttaaagtcattgactttggatcaagctgttatgaacaccagaaagtatacacgtacatccaaagccggttctaccgatccccagaagtgatcctgggccacccctacgacgtggccattgacatgtggagcctgggctgcatcacggcggagttgtacacgggctaccccctgttccccggggagaatgaggtggagcagctggcctgcatcatggaggtgctgggtctgccgccagccggcttcattcagacagcctccaggagacagacattctttggtttgggctgccaactgctcctctgccccgggcgactcctagttaatacccctaattagcagcaaaatggtgttgtctcaaggctgattccaaaggttttcctaaaaatataaccaacaacagggggaaaaaaagatacccagattccaaggacctcacgatggtgctgaaaacctatgacaccagcttcctggactttctcagaaggtgtttggtatgggaaccttctcttcgcatgaccccggaccaggccctcaagcatgcttggattcatcagtctcggaacctcaagccacagcccaggccccagaccctgaggaaatccaattcctttttcccctctgagacaaggaaggacaaggttcaaggctgtcatcactcgagcagaaaagcagatgagatcaccaaagagactacagagaaaacaaaagatagccccacgaagcatgttcagcattcaggtgatcagcaggactgtctccagcacggagctgacactgttcagctgcctcaactggtagacgctcccaagaagtcagaggcagctgtcggggcggaggtgtccatgacctccccaggacagagcaaaaacttctccctcaagaacacaaacgttttaccccctattgtatgacctttgctgagggtatgtcctgctcctttccaccagtgatttgtattaagacagcacttatattgtacaatacttcagactgttttttttaaatacataaaactttatgtt

SEQ ID NO: 26296 - DNA, 2134 bp, Homo sapiens
  Clone ID: LIB4119-294-E10_FLI
tggacatgcccgggatgccttttcatttggaacattggtggaaagtttgctcacaatcttaaatgaacaggtttcagcggatgttctctccagctttcaacagaccttgcactcaactttgctgaatcccattccaaaatgtcggccagcgctctgcaccttactatctcatgacttcttcagaaatgattttctggaagttgtgaatttcttgaaaagtttaacattgaagagtgaagaggagaaaacggaattctttaaatttctgctggacagagtcagctgcttgtcagaggaattgatagcttcaaggttggtgcctcttctgcttaatcagttggtgtttgcagagccagtggctgttaagagttttcttccttatctgcttggccccaaaaaagatcatgcgcagggagaaactccttgcttgctctcaccagccctgttccagtcacgggtgatccccgtgcttctccagttgtttgaagttcatgaagagcatgtgcggatggtgctgctgtctcacatcgaggcctacgtggagcacttcactcaggagcagctgaagaaagtcatcttgccacaggttttgctgggcctgcgtgatactagcgattccattgtggcaattactctgcatagcctagcagtgctggtctctctgcttggaccagaggtggttgtgggaggagaacgaaccaagatcttcaaacgcactgccccaagttttactaaaaatactgacctttctctagaaggcgatccattttctcagcctattaaatttcccataaatggactctcagatgtaaaaaatacttcggaggacagtgaaaacttcccatcaagttctaaaaagtctgaggagtggcctgactggagtgaacctgaggagcctgaaaatcaaactgtcaacatacagatttggcctagagaaccttgtgatgatgtcaagtcccagtgcactaccttggatgtggaagagtcatcttgggatgactgcgagcccagcagcttagatactaaagtaaacccaggaggtggaatcactgctacaaaacctgttacctcaggggagcagaagcctattcctgctttgctttcactcactgaagagtctatgccttggaaatcaagcttaccccaaaagattagccttgtacaaaggggggatgacgcagaccaaatcgagccgccaaaagtgtcatcacaagaaaggccccttaaggttccatcagaacttggtttaggagaggaattcaccattcaagtaaaaaagaagccagtaaaagatcctgagatggattggtttgctgatatgatcccagaaattaagccttctgctgcttttcttatattacctgaactgaggacagaaatggtcccaaaaaaggatgatgtctccccagtgatgcagttttcctcaaaatttgctgcagcagaaattactgagggagaggctgaaggctgggaagaagaaggggagctgaactgggaagataataactggtgacaatagatgtgagttaaactttaggaaaaaggattccctttttttaaaaaaaatcaatacctcaaaagcaggctttgggacaagaaaaccccaaagtggcctgcttttcccatcccaggagctcattatccagtctgtgccaactgaagtaggagactgactgtgagtgctggctaaaagccctgggtggtgaggctcacagtactggtttccaggaggaagagcctttgtgcatttgactgaggccagtttctatgaagagcaagtagctgaggagaggtcgaatttactgctttttccaggacaattctggaagtaaagaaaatgtaattcaagctggttagcttaattttgtgccattctttaacataagagtaagctctattatgaaatacaactttaaaaaattttagctataaattatataaatgattttaaattgctgaggtttccttaggcagcttatttatttgtttacagttagactatctgagtaaatggttctttgtggacctaggcagttcctgactgttccacatgtagtacattgtaccaaagttcttaataagaatattccccacaatcctgttctctaaatgtcaaataaagattattttcact

SEQ ID NO: 26297 - DNA, 1344 bp, Homo sapiens
  Clone ID: LIB4119-308-E10_FLI
ggaggttactgagaccgttatttcttcatggcctgcctagcttaagcagtagctggaaaagatgtctcgggctgttcgtcttccagtcccctgtcctgttcaacttggtaccttaagaaatgactccctggaagctcagcttcatgagtatgtcaaacaagggaactatgtgaaagtgaagaaaattcttaagaaaggaatttatgttgatgcagttaactccttgggccaaacagcactttttgttgcggcgttattgggccttaggaaattcgttgatgttctggtggattatggatcagatccaaatcaccgctgctttgatgggagcacccctgtccatgcagcagcattttcgggcaatcagtggatccttagcaaactgctggatgcaggaggtgacctgcgactccacgatgagaggggtcaaaacccgaagacttgggctttgacagcaggaaaggagcgtagcacccagatagtggagttcatgcagcgctgtgcctcacacatgcaggccatcatccagggcttctcttacgacctcctgaagaagatagactccccgcagcggcttgtctacagcccgtcctggtgtgggggcctcgtgcagggaaaccctaatggctctcctaaccgactgcttaaagctggagtcatttctgctcaaaatatctacagctttggttttgggaagttttatcttactggggcgacacagatggcctatctaggatctcttccggtcattggagaaaaggaagtgattcaagctgatgatgagcccaccttctctttcttcagcggcccctacatggtcatgaccaacctagtgtggaatgggagcagggtcacagtgaaagagctgaatctccccacccacccacactgcagcaggctgcggctggccgacttgttaattgccgagcaggaacacagcagcaagctgcggcacccctacttgctacagttgatggctgtgtgtctctcccaggacctagagaaaacccgccttgtgtacgagcgcatcactatcggcacattgttcagtgtccttcatgaacgacggtcccagttcccagtgctgcacatggaggtgattgtgcacctgctgctccagatatctgatgccctgagatacctgcatttccaggggtttatccaccgctccctcagctcctatgctgtccatatcatctccccaggtgaagcgaggctgaccaacctggagtacatgttggaaagcgaggacagaggtgtacagagggacctgactcgagtgccccttcctacgcagctatacaactgggccgcaccagaagtgatcctacagaaggcggccgc

SEQ ID NO: 26298 - DNA, 1091 bp, Triticum aestivum
  Clone ID: LIB4126-002-G4_FLI
ctccacactcgcctccgatcgagacccctctgctcacccaccagctccgcgccgaccgtctcctcctcctcagcgccgccctccctccgcttccgcttcggcttcccccgccgtggctgcgccgccgaccggagccggagggcgacgacgatggccgcggtggtctccccgggggatggcggcctggtccacgacctcgtgtcctcgggcgtcaccgcggccatcgccctcggcctcctccgcttcttcgaggagctcgccaagcgcggcgtctgcgaccagaaactgaacaggaaacttgtgcacataactattgggatggtattcttgctcttttggcctcttttcagctcgggaaggtatgctcctttctttgctgcacttgcaccagggattaatattataaggatgcttctattggggctaggaataatgaaaaatgaagctatggtcaaatcaatgagccgatctggagaccacagggagcttctcaagggaccactgtattatgctactactataactttggccacttctgtattatggagaacatctccaattgctatcgcacttgtctgcaacttatgcgctggagatggtatagcagacgtagtggggagacgcctaggaaaagaaaagcttccatacaaccccaacaagtcatatgcaggaagcatagcaatggctgtggctggtttcttggcctcaattgggtacatgcattacttccacagtttcggtctcatggagaaaagctggtacatgaccttgggcttccttgtggtctccgtagccgcggcacttgtagagtcacaccccatcagcactgaactggatgacaatttaactgttcccttgacatcattcctagtcggtagcctcattctctgatgtttagcgccaaaggaagaatactgtgacgtttcttttcgccacgtgaacttccgacatgtaacaagattatcgacaagcatgcgatatttttgttgttgtaaatgctgctgaaccataggaacagttttctagtgtcaaaaaacgtcttacattatggggcggagggagtaactatttatccagccgtttacatactg

SEQ ID NO: 26299 - DNA, 1728 bp, Triticum aestivum
  Clone ID: LIB4126-005-E4_FLI
atttcatttcatttttggtctcaagcaaggcacagaagaaagcagagcagaggtccttgacggccggcaacatccatggcgctcaaggcctccttccccggcgagctcgctgccctcctcgactccggcaacaccaggagcaggaggggagccgccttccgcccccgccagcaccagcgcaaagtggatttcacgtttcaaaggagggacaaaagagcagcctacctgaggacatgctgctcgatgcagcagggcccgccgcctgcctggcctggccgagccgtcgtagaacctgagaggaggtcatgggagggccccaagcccatctccatcgtcggctcaaccggttccataggaacacagacattggacatcgttgcggagaatcctgacaagttccgggttgtcgctcttgctgctggctccaatgtcactcttctagctgatcaggtgagaacgttcaagccaaagctggtggctgtaagaaacgagtcactactcaatgagctaaaggaagcgttagctggttgtgaagagatgccggaaattattcctggggagcaaggtgtcattgaggttgctcgccacccggacgcagttacagttgttacaggcatagtagggtgtgcaggactcaagcctacagttgcagcaattgaagctgggaaagatattgcgttggcgaacaaagagacacttatcgcaggcggtccgttcgtgcttccccttgcgcacaagcacaatgtgaaaatacttcctgctgattcagagcactctgcaatatttcagtgtatacaaggtttgtctgaaggatcgctccgtcgcgttattctgactgcgtctggcggtgctttcagggactggccagtagagaagctgaaagacgtaaaggttgcggatgctttgaagcacccaaactggagcatggggaagaaaatcacagtagattctgctactttgttcaacaaggggttagaagttatcgaggcgcattatttgtttggtgctgaatatgatgacattgagattgtgattcacccacagtccatcatacactctatgattgaaacccaggattcatctgtcctggctcagctgggatggccagacatgcggctaccgatcctatacaccttgtcttggccagacagagtctactgctccgaggtcacctggccccggctagacctttgcaagctgggttcgctgacatttaaagctcccgacaacgtgaaatacccatcggtagatctcgcatacgcagcagggcgagcagggggcaccatgacgggagttttgagtgctgctaatgagaaggcagtggagctgttcatcgacgaaaagatcagctacctggacatcttcaaggtggtggagatgacgtgcgacgcgcaccgcaacgagctggtgacaaggccgtcgctcgaggagatcatacattacgaccagtgggcaaggaagttcgccgccaacctagagccatcgtcgtctggacggagccctgtgctcgcctaaggcccttcttcctggagctggccgatgaagcacagaagatgtacactactactcccatggcctggccttgctaagactggccatgtggaaatcaagcttagatatttcaacaaggcacacataggttgccttcctgaaatgtaaatcatgtgttcgcacaaataaatcacgtaaattttgaaataggcaagaatcaaacacatgcatccctcc

SEQ ID NO: 26300 - DNA, 1187 bp, Triticum aestivum
  Clone ID: LIB4126-013-C10_FLI
tcagcctatctgggaaacctgggaactttctccttccagagctccggcagctagatccacccagcttatctatctccatcgccatcttgctctgcaccgggtagcttagcttgtcctctgcgtgtgggaggtagttgaagatggggcggggcaagatagtgatccggcggatcgacaactccacgagccggcaggtgacgttctcgaagcggaggaacgggatcttcaagaaggccaaggagctgggtattctctgcgatgccgaggtcggtctcgtcatcttctccagcaccggccgcctctatgagtacgccagctccagcatgaagtcagtgatagatcgatatggacgagccaaggaggagcagcaacttgttgcaaaccccaactcggagcttaagttctggcaaagggaggcagcaagcttgagacaacaactgcacaacttgcaagaaaatcatcggcagttgacgggacaagatctttctggaatgggtgtcaaggaactgcagactctagaaaatcaactggaaataagcctgcgttgcatccggacaaaaaaggaccaaatcttgattgatgagattcatgaactgaatcacaaggggagtcttgtccaccaagaaaacatggaattatacagaaagattaacctaattcgtcaagaaaatgctgagttacaaaaaaagctctctgagacggaggcagcgactgaagttaaccgagattcaagaactccatacaattttgcagttgttgaagatgccaatgtttctgttgatcttgaactcaattcaccgcagcaacaaaatgatgttgagcatactgcgccccctaaactaggattgcaactacatccatgacgatcgtggggtatgggattactcttgttgttattattctcaagggatacaattcagagcagccagaatactcttggttgtaaagaacctaaacccatagcaagacataagtggttcgcatgacgaccgattgataaacggtagtgtaaatctgttacaaataaaatgtactccatggaaggattaatctgttgtgcaaatggttgtattagaactatttaacacattctgcgagtttgttcaactgcatgagcggctagcttattgacaaaaggtgtgaagtgtggattgagcaaaattcagttaccacttttttctgtcttc

SEQ ID NO: 26301 - DNA, 758 bp, Triticum aestivum
  Clone ID: LIB4126-025-C10_FLI
gccaaggaggagcagcaacttgttgcaaaccccaactcggagcttaagttctggcaaagggaggcagcaagcttgagacaacaactgcacaacttgcaagaaaatcatcggcagttgacgggacaagatctttctggaatgggtgtcaaggaactgcagactctagaaaatcaactggaaataagcctgcgttgcatccggacaaaaaaggaccaaatcttgattgatgagattcatgaactgaatcacaaggggagtcttgtccaccaagaaaacatggaattatacagaaagattaacctaattcgtcaagaaaatgctgagttacaaaaaaagctctctgagacggaggcagcgactgaagttaaccgagattcaagaactccatacaattttgcagttgttgaagatgccaatgtttctgttgatcttgaactcaattcaccgcagcaacaaaatgatgttgagcatactgcgccccctaaactaggattgcaactacatccatgacgatcgtggggtatgggattactcttgttgttattattctcaagggatacaattcagagcagccagaatactcttggttgtaaagaacctaaacccatagcaagacataagtggttcgcatgacgaccgattgataaacggtagtgtaaatctgttacaaataaaatgtactccatggaaggattaatctgttgtgcaaatggttgtattagaactatttaacacattctgcgagtttgttcaactgc

SEQ ID NO: 26302 - DNA, 1389 bp, Glycine max
  Clone ID: LIB4127-121-G6_FLI
atctaattggtatagaatagtgttttagaaagagtgtctagcattttgaataaatatgtgatccaagtccatgaataggccagattgttatggggtggttggattcagtgtggggaagaggacgaaagtttattaaaaggaaagacagtgatgctggcgatgcaggtaaagcactggaagaactcagagcttctctctacaatgagatccgaacatcagaaggagccaagcgccaacagcaaagatattgtggaccagtggtggcactgtccttcaattttatggtttctgttgggattatcatggcaaacaaattggtgatgggtaaagttggcttcaactttccaattttcctcacatttgtacactacatcactgcatggcttctccttgccattttcaagacactctcagtgcttcctgtgtcccctccatctaaaacaactccattctcttctttatttgcacttggtgttgttatggcctttgcctctggccttgcaaacaccagcctcaagtataacagtgttggtttctaccaaatggctaagattgctgttaccccaacgattgttcttgcggagttcattctttttggaaacaccattgattttaaaaaggttttggctttggctgtcgtgtcagcaggtgtagctgttgcaactgtaacagatttagagttcaacttatttggtgctctaattgcaattgcatggataatcccaagtgccataaataagattttatggtctactttacaacagcaaggcaactggacagctctggcattgatgtggaagacaaccccgatcacagttttcttcctcggggcattgatgccgtggatagatccaccaggagtcctatccttcaagtgggatgtgaacaactcaactgcagtttttgtatctgctctccttggttttctcttgcagtggtcaggggcattggcattgggggccacttctgctacaacccatgttgttttaggacagtttaaaacatgtgtgattctgttgggagggtatctattatttgagtcagatcctggggttgtgagtattggtggtgctgttgttgctctctctgggatgtcagtttacacgtcattgaatttgcaagagcctcaggagccttcatcgaagccgaaatcaacaagtgaagacaccaaatccacagattcaaatgtaaatactactaccactaccactacctctaccaccattgtctgtgtcatatagtagatgatgaatcatgaatacaagaacatcccatttttcagacactcatcttaagtccttggttttagcaattagcgaaactttatgtatagacagtaatggaaattcgttgagattttttaagggtagcttgcttttcacaaagttc

SEQ ID NO: 26303 - DNA, 1088 bp, Glycine max
  Clone ID: LIB4127-341-A7_FLI
caaggctattcggcggcaaggtcatcgtaaagggcaaaccaccccttcctccctccggcgaaaactccggcgtcctctttgtctgcacccaccgcaccctaatggaccccgtcgtcctctcctccgtcctccgccgcaaaatccccgctgtcacgtactccgtctcacgcctctcggagatcctctcccccatccccaccgtgaggctcacaagaacacgcgacatagacgctgaaaagatcaaacgtgagttatccaaaggtgacttagtagtgtgtcccgaaggaacaacatgtcgcgaaccctttcttttaagattcagtggtcttttcgccgaactaactgaccggatagtgcccgtggccatgaactatagggtagggttcttccatgcaacaaccgcgaggggttggaagggtttggaccccattttcttcttcatgaaccctaggccggtgtacgaggttactttcctgaaccagttgcccgttgaagccacgtgttcttcggggaagagtccacacgacgtggctaactatgtgcagaggatattggcggctacgctagggtttgagtgcaccaactttacgaggaaggataagtatagggtgcttgcggggaatgatggcactgtgtctcctacttattccttcgttgatcagatggtgaaggtggtgagaacgttcatacagtgaaaataaaattgtggtactagttgaaagattgtaagattgattaattgttttattttgttgatttgtataatggatgcaccggcttgtgcattgaacatcataaatttgtgtattttatgatatatatatatatataaatatatatatatataaatatatatatatatatatatatatatatatatatatatatatatatatatatatatatatatatatatatatatatatatatatatatatatatatatatatatatatatatatatatatatatatatatatatatatatatctgtgtgtgtatatgtttcacgggtacgtaattttatgattgattcattattcctaatttaaaattgataatatgtaacatacatgtacttaattatt

SEQ ID NO: 26304 - DNA, 957 bp, Glycine max
  Clone ID: LIB4127-341-D4_FLI
gctgtcttggtcagcatagccggggttgtgatgacaactctggggaaaacatgggctgcagatgacgcgatatcaagtgcttccaatggacaacgctctcttgttggagatctttttggccttctctctgccatgtcatatggtctatttacagtgcttctcaaaaaaatttctggtgaagaaggagaacgagttgatgtgcaaaagttgtttggatatgttggattgtttacacttgtagcactatggtggcttatttggccattgtcagccttaggaattgaaccgaagtttacaattccccattcagccagagtggacgaagtggttcttgccaacggatttggcactttgtgttgtatggacaactccccttgtggccactttgggcatgtcacttaccattcctcttgctatgatggctgacatggtgatccatggtcggcattattcggcattgtacattcttggctcaatccaggtatttgcaggctttgtgatagctaatatttcagataggccaaccaagaagcagggattatagcacattgtttcctatactgattctttctttggttggttatctttccacaatactcacactgagtgagagtcaactgttgaaaaaatcaatgcctggttttgtaattttcaaggaaagcaacaagagtgtgctttccatcttgtattgttctgtgtatattgttctagagtgagaattttgttgtaaattttaagtgtccaagatgagcttgtggtcatggatgtaaagaagcatttttacatacatagtggctacgtaaagtaaatgccttctagaagaaattcaggatttcattaaaactttaaagtaattggaaacaatttaatcttgtttcctcttcgattataaaaacaacttgtacataaatacttacaaaataaatatatatttaatatgcacttaattgtttatcc

SEQ ID NO: 26305 - DNA, 692 bp, Triticum aestivum
  Clone ID: LIB4145-003-G10_FLI
cggcgggttcatggccggctccgcgttcgacgaggcggccacggtcatcaacgcggcgctcgagcgctacttcggggagcttccctgcgtggaggtgataggcgagccggggaggtacttcgccgagaccgccttcacgatggcggcgcgggtcatcgggaagcgcactcgcggcgaggtacgcgagtactggatcgacgatggcctctacgggaccctcagctgcatccccatggaccactacgtgccgcacccgaggccgctcgccgtgccgcgcgccggcgagaaggcgtacacgtcgacggtgttcgggccgacgtgcgactccctcgacacggtggtgaccgggtaccagctgccagagatgaacgtgggggactggctcgtgttcgacgacatgggcgcctacaccaccgcctccggctccaacttcaacggcttctccacctcggacatcaagacttacttggcctactccagctgatatggaacctatgatgtggcgacgtactacgtagcacacgccattcgatttgttttcgcagtacacaaaacgaagagttgtaattaagctcgtacacaatgtatgtgcttttgtttgttctattttttattttaattaggtatatatatatgtatccaatgtggctattcttttgtttcctgaaacgaaactttcttttcaaaaaatc

SEQ ID NO: 26306 - DNA, 582 bp, Zea mays; identical to SEQ ID NO: 13952
  Clone ID: LIB4148-001-B5_FLI

SEQ ID NO: 26307 - DNA, 829 bp, Zea mays
  Clone ID: LIB4148-001-C8_FLI
ggagaagaaacttacgaggattcccctagtaacggcgagcgaaccgggagcaccccaacatgcgcgaggtcgagtccgcgcaggacctcgccgactcgctgctcagcgccggcgacaaactcgtggtcgtcgacttcttctccccaggctgcggcggctgccgcgccctccaccccaagatcgcccagttcgccgagaagaacccgggcgtgcagttcctgcaggtgaactacgagacgcacaagtccatgtgctacagcctccgcgtccacgtcctccctttcttcaggttctaccggggagccgagggccgggtcagcagcttcagctgcaccaacgcaacgatcaacaagttcaaggacgcgctcgccaagcacggggctgagaggtgcagcctcgggcctgcgcgggggctggacgagtcggagctcatggctttggctgagaacagggacctgcacttcacctacgacaagccgggcggcctcgtccccctcgcggaagccattgccaaggaggctgccgcgccgggaggcccgtggcttcctctgcctgcgtccctgctcggccagggatcggccgataactcattgctgccgtctggaagatagaccgtgctccgtgctcggttggtttcattcattggaggtggctcctccgtcttgtacagatttcattcgttcgtagtggtctgatgatgctggagtgacagaaatattcagacgcgggatgcgcagtgactatcgcgggatgcgcagtgactatcgcgtctgtattgttgcatctagacctttgctgaaacatgaaaaaatccattgcttggcgaacc

SEQ ID NO: 26308 - DNA, 946 bp, Zea mays
  Clone ID: LIB4148-001-D12_FLI
gcgaagagaagctgaggcctagcgccgcacccgccgccgcatcagccatcagccatggcgatggccgctcgcctcgtctcgcgctcccgtcagctacattcggttcaagcagcttttgcgaatggaggtgccactcaagttcgctcctttgccaaggatgcagctccagctgaccgtcctcctgttggtggggatgatctcctgaagggcatattctttgaggtaaagaagaagtttgagacagctctcggcgtccttaaaaaggaaaagatcactattgatccagatgacccagcggcagtttctcaatatgctcaagtcatgaagactgtaagggaaaaggcggatcttctttctgattctcaaaggattaaatataccattgagaccttcaccaagggcatccctgatgcacggacttacttgaatactcttcaacagctcagaataaagagtggtcttatagatcatattggaatcgaacctttgatgatggaagctcttgagaagattgagaaggatattaagaaaccacttttaaggagtgacaagaagaacatggccacccttatggcagagtttgacaagattaacgcaaagcttggcattcggaaggaggatcttcctaagatcgagaaagaacttgaattggagattgccaaaagtgagctgactgaacttaagaaggaatgtgttgaggcaatggagactcaactcaagagggaggagttccaagatgaggagatgcctgatgtcaggaaactggacatccgaaacttcctgtaggcctgatcgacgataacctttgaggcattgcaaatcacccagcccacctgtgattttttttttctttggttttggtttcaagttgatcggtgctgtaagctacacctatgaatgctgctccttcctttttttgtaataaaaaaactgcaccgaggtacac

SEQ ID NO: 26309 - DNA, 1649 bp, Zea mays
  Clone ID: LIB4148-001-H3_FLI
cgcagaggcgcagagacaggcgtcttcgtactcgcctatctccgcgactcaaagcttcttccatttcctaccgccgccgctgcagctccaccccattccgtcgacaccatgagggagtgcatctcgatccacatcggccaagccggtatccaggtcggaaacgcgtgctgggagctctactgcctcgagcatggcattcaggctgatggtcagatgcccggtgacaagaccattgggggtggtgatgatgctttcaacaccttcttcagtgagactggtgctgggaagcacgtccctcgtgctgtttttgttgaccttgaaccaactgtcatcgatgaggtgaggactggcacctaccgccagctcttccaccctgagcagcttatcagtggcaaggaggatgcagccaacaacttcgcccgtggtcactacaccattggcaaggagattgttgacctgtgccttgatcgcatcaggaagcttgccgacaactgcactggtctccagggcttcctcgtcttcaacgctgttggtggaggaacaggctctggccttggttccctcctcctggagcgtctgtctgttgactacggcaagaagtccaagcttggtttcactgtgtacccatccccccaagtttcgacctcagtggttgagccatacaacagcgtcctgtccacccactccctcctcgagcacactgatgtggctatcctgctggacaacgaggccatctatgacatctgccgccgttcccttgacattgagcgcccaacctacaccaacctcaacaggcttgtgtcccaggtcatatcatccctgactgcctccttgaggttcgatggtgctcttaacgtggatgtgaatgagttccagaccaacttggtgccctacccgaggatccacttcatgctttcctcctatgctccagtcatctctgctgagaaggcctaccacgagcagctgtctgtggccgagatcaccaacagcgccttcgagccatcctccatgatggccaagtgcgatccccgccatggtaagtacatggcctgctgcctcatgtaccgtggtgatgtggtccccaaggatgtgaatgctgctgtggccaccatcaagaccaagcgcaccatccagtttgtggactggtgcccaactggctttaagtgcggtattaactaccagcctccaagtgtggtgcctggtggtgacctggccaaggtgcagcgcgctgtgtgcatgatctccaactccaccagtgttgtggaggtgttctcccgcatcgaccacaagttcgacctcatgtacgccaagcgtgccttcgtgcactggtatgtcggtgagggtatggaggagggcgagttctctgaggcccgtgaggatcttgcagcgctcgagaaggactacgaggaggttggtgctgagtttgatgagggtgaggaaggtgatgatggtgatgagtactagaagtatcctgatgctgtcatcgtcaggcttgtgtgctgctcttgtccccgttgtggtttgcaacacctgatgttgtaagactttctggttatgtccgccccgctttgccactgggttattaagaacgtcgttatggatggttgtctacattattgcttctcgatattggaaaactgttatgcgcc

SEQ ID NO: 26310 - DNA, 919 bp, Zea mays; identical to SEQ ID NO: 23065
  Clone ID: LIB4148-002-D11_FLI

SEQ ID NO: 26311 - DNA, 1491 bp, Zea mays
  Clone ID: LIB4148-002-E10_FLI
tgagcaacagggaggaaatctatacaaagcagtggaactgcgaactcgtcgccgtcgtgttcacaaagccggcgccttttgctccccgatctcagttcccgcccatctctaagctcccaaggcgacgctgcggcggcggggcaagcgggaggacaagaagcggacttgtctccctgcccccaccccctccctcgcttcgcgcgtacccccttcagttcagccgggcggtaccgtcgacggcgccggcattgtacttctgctgcgcagctatcactgctctgagaaaatggttgcatcagcctttactgttgatttggacaagcctctagtattccaggttggccatctagaggagcagtatcaggagtgggttcaccagccgattgtttgcaaggaagggccacgattttttgaaaatgatatattggagttcttaacacgcacgaaatggtgggcagttcctcttatctggttgcctattgtatgttggtgcctgagtacttctatcaagatgggcaatactatcacagatgtagctatgatgattgggtttggaatatttctgtggacactgatcgaatatgtgttacaccgattcttgttccacataaaaaccaaaagttactggggaaacacagcacattatcttcttcatggatgtcatcacaagcatccgatggatggacttcgacttgtctttccaccagctgccgcagctattttgtgctttccgttctggaacatgatcaagctattttcgaccccgtctacaactcctggtctgtttggaggcggcctgttgggctacgtgatctatgattgcacacactactacctgcatcatggccagccatcatcagatcctgcaaagtatctcaagaagtaccatctcaaccatcacttcagaattcaaacaaagggctttggaataacttcgaccctgtgggatcacgtatttggcacgctgccttctacgaaaactgtcgacaagagcatttgattttgactggatcttctgctttgcgaagctcttatagtgatgttaggctttgctcgcattgcctgtgtccactttttgaggccagcttccctgttccatcatgtagatttggctttggcagtgtctctatttttttttatctctagcagaggactttaaaatcatcaattacagattggtcatcatcggtggaggttctgttggacaaatttctatccagtttctgattcttctccatggaccaactgtatgaaggcgatcaccagttgctggctcacagacgcgactgaagcgatcaccagtttggtttcaagtcaatgccatcagcggtcgtgttcacattatgtctagctagtgccagctgttagatcagcatgtaatgtatgtacagtgttttcttctctagtagcgtagcctctctgcaagggctgtttggtagcctgtgtctgcttaattttgctacaagtaattgcttgacaggttgaactttc

SEQ ID NO: 26312 - DNA, 1959 bp, Zea mays
  Clone ID: LIB4148-002-G10_FLI
ttaattgcacgtctcctccccacctctccttccctccacccgtgccgtcgcctcgcctatccgatctgccacctcctcccgtctcgcacgttccttcccaactccgcagcgtagcctctccgcggcgcgatccagatccaggtttttcagcatgggcctggtgaaggaaggcatcgacatggaggagggaacccttgagatcggcatggagtacaggactgtatctggtgttgctgggcctctggtcatattggataaagtaaagggcccaaagtaccaagaaattgtaaacatccgacttggagatggcaccaatcgccgtggtcaagtcctggaagttgatggcgaaaaagctgttgtgcaggtctttgaaggaacttctggaatagacaacaaatacacaaccgtgcagtttacaggcgaggttttgaaaactcctgtctcacttgatatgcttgggcgcatttttaatggttctggaaaacctattgacaatggccccccgatattgcccgaagcctacttggatatctctggaagttctattaaccccagtgagagaacctatccagaggagatgatccaaactgggatatccaccattgatgtcatgaattccattgctcgtggacaaaagattccactgttttctgctgctgggctccctcacaatgaaattgctgctcagatttgtcgtcaggctggtcttgtgaagacattggagaaaggaaagcatgctgagggtggtgaagatgacaactttgctattgtgtttgctgctatgggagtgaacatggaaacagctcaattcttcaaacgtgattttgaagagaatggttccatggagcgggtcaccctttttctgaatctggctaacgaccccaccattgaacgtattatcacccctcggattgctctaacaacagcggaatatttggcatatgaatgtgggaagcatgtacttgttatcttgacagatatgagctcttatgcagatgcacttcgtgaggtttctgcagcccgagaagaggtgccaggtaggcgtggttatcctggatatatgtatactgatttggcaacaatatatgagcgtgctgggcgtattgaaggaagaacaggctccattacccagattcctattctaacaatgcctaacgatgatatcacacacccaactcctgaccttactggatacattactgagggacagatatacattgataggcagctccataacagacagatttatccacctattaatgtcctgccatctctttcacgattgatgaagagtgctattggtgagggcatgacacgtcgagaccattcggatgtatctaatcagctttatgccaactatgctattggaaaggatgttcaggccatgaaggctgtcgttggagaggaggcactctcgtctgaggatctgctttacttagagttccttgacaagtttgagaggaagtttgtgacacaaggagcatatgacacacggaacatcttccagtcactcgatcttgcatggacattgcttcggatcttccctcgcgaacttctccaccgtattccagcaaagaccttggaccagtactatagcagagatgcttcccactgaatcactgatcgttgatcagtgttccaatattttggcaagtgcagctttgaataaattgaacagattggcctcgtggccattttcctgtatttatctgtagtcaggtccaattcttttctgttggtgagcgcaagttattcatagatgactcggtcatgggaatatttgtaatattatgtcatgtatcgttaaatttcagttgttttgtttcagctgccagaactgttagcaagagtattctggagctggaagctcgaacgcaactggttgtatctatatccttgaatgccgaataaaggaggggcaataaactgcagcgaaatatgtgctgtcagacattgttg

SEQ ID NO: 26313 - DNA, 759 bp, Zea mays
  Clone ID: LIB4148-004-A12_FLI
gccacaacaacagctctactgaacattaccgctcatcatcagggtacacagagagaagagagagagacctacagagatggcctccggcggctccagcaagcagctgaaggctagtcttctcatggtggtagcagctctgctcctcctcatctgcacctgcactaccagggggcaagcggcaaggccggatccaggatccgagggccacacgccacagcagctgcgcgctgctgtatccgtctccgttgctgctggtaatgagaaggagagtggctcatcagtggccgtggtggaaatgcgtcggcagcaagagccggaggcggtgagtgaatgtgaggacgacgacggagacgacgaacaggcggagtgcctgatgaggaggacgttgctcgctcacaccgactacatctacacccaggggaagcacaactagctagtcactgctcactagcctgtgctgctggctcatgctcatgtcatgtcgaggaaacaagttcaagggacaaaaacaaaacaaaaaagctcgcatggttcacgagctagcctagccaacctgaagttctacagtgccgtacgtcaactgtgtggattgttttaaaatatatatacctagtcttttcctttctgcagttctgccaggctgtggattattttcatatttacttcgctaattactccctgtgatttccccatcggctttctcgagatcatgtacaatatagttagtagagaaaaatataaacgcatatattggagatt

SEQ ID NO: 26314 - DNA, 1003 bp, Zea mays
  Clone ID: LIB4148-005-C10_FLI
ctctccctttccctcgccgcgtataaagattcgctgcccgcgacaagaagatgcagctcattaccacctccgcctccgcgatcgaagctcctcacaaactgttatcgtcgccatggcagccgccgcgcctgcaagctccgtgaaggaagtgctgccgtctcccctgacctccgcctccgagccccctcccctcttcgatggcaccaccaggctgtacgttgcctatcattgcccgtacgcgcagcgcgcttggattgccaggaactacaagggtttgcaggacaagattaagatagtcgccatcgatcttgctgacaggccagcatggtacaaggagaaggtttatccagaaaacaaggtgccttctctggagcacaacaaccaggtgaaaggtgagagtttagatctggtcaagtacattgacagcaactttgaaggcccatcgttgctcccagaggatccttcaaaaaagcagttcgctgaggagctgcttgcatatactgatgcatttaacaaagcattatacttttgtatagtctccaaggaagatgtgtctgaggaagctgtcgctgctttggataaaatagaagacgccctcgggaaattcaacgagggtccattctcccttggtcagttcagtctggtggacattgcgtatgtaccattcatcgagaggtttcagatattctattccaacataaagaactatgatattacaaagggcagacccaaccttcagaagttcattgaggaagtggacaagattgatgcatacacacagactaaacaggacccacagtttttacttgagcagacaaagaagcggcttgggattgcttaaagcttgcggccgaggatgactctcgacagaaataccagcatagtagatcgacacttgtttagtcatttgtgtgcttgaataatgaatactacatatatggttttcaataagacatggtcctctatactgggttgtacttctgaaaacaaactagttgtcctg

SEQ ID NO: 26315 - DNA, 2846 bp, Zea mays
  Clone ID: LIB4148-005-C12_FLI
tagccgccgtcgccacagagccctcatctcgtccgtcctcggcggcctccgcggagcagccgtcgctggagcctggagaccaaagatccggccagatctgatgtcaggagggactggctcatccgggcgcgcggccccgcggtacgccccggatgacccgacgctgcccaagccgtggcgcggcctcgtcgacggcaccaccggctacctctactactggaacccggagacgaacgtcacgcagtacgagcggcctgtgccccccgagagccagctcctcccgcctccgcctccgttgccacccccgcctccacggagccgcgaccgccgcgacaggtccagatcccgatcccgcaccccaccccggcgcgaccacagggaccgcgaccgtgaccgtgacaggcgccacgacgagcacgcgtcctccaagacggcgtcttcccaccaccatccggctccggtagccgtcgccgacgatccttccaccgaggcataccgccgccgccatgagatcaccgtcacgggggataatgtgccgactccaataacttcatttgaggctggtggcttcccgtcagaaattctgaaggagatacaacgtgctggattcgcaagcccaacacctatccaagcccagtcatggccaattgctatgcaaaatcaagatgtagtagctattgcaaagactggatcaggcaaaactcttgggtatctacttcctgggtttatgcatatcaagcgcctgcagaacagcactaggaatggcccaacagtgctagttttggccccaacaagggaacttgcaacacagattctggatgaagctgtgaaatttggaagatcttcaagaatttcttgcacgtgcttatatggtggtgctcctaaaggtcctcagttgagagatttagatagaggggttgatgttgttgttgcaacacctggaaggttaaatgacatcttggagatgcgaaaggtaagtcttaagcaagtgtcatatcttgttctggatgaggctgatcgcatgctggacatgggctttgagccacaaatacggaagatagtgaaagagatacctcaccgtcggcaaacccttatgtacaccgctacatggcccaaggaagtccgaaggattgcagatgatcttcttgttcatcctgtacaggtgacaattggaagtgttgattcacttgttgctaatagttctattactcagcatgtagagatcataacaccctcagaaaaacaacggcgcctggagcagatattacgatcccaggattcaggttcaaagatattaatattttgtaccaccaagaggatgtgtgaccaacttgcaaggacactcaccaggcagtttggagcttcggccattcatggtgacaagtcccaaagtgaaagggagaaggttctgaatcagtttcgatctgggcggtctcccattttagtggcaactgatgttgctgcgcgaggtttggacatcaaagatatcagggtagtgatcaactatgacttccccactggtgttgaagactacgttcacaggattggcaggacaggaagggctggtgccactggtgttgcatatacatttttttgtgatcaggattcaaaatatgctgctgacctaatcaaaattctggaaggggcaaaccaacgagtgccccgtgatttagaggatatggcttctcgtggcggtggacgaggtaggaagaggaaccattgggcatcccgccctgacaggggtggttcacgttctgaactggattcaaggtacagcagcagagatggactagcatcttctgggaaatcagagagtggtcgcggcagtcgtggaagggatgataatggtagccgtggcaggtacgaccctggtgaaaccgatgggcgatctcgtaggtctactagaggccgcagtagaagccgtagcaaaagtgacagtagaagccgtagcccaagtcccaagaagtcacgtcgtcatgaaggtagacgtagcaggactaagagcaggagcaggagcaggagccgtagaaatcatggcgctagccacagcaagagtcgcagccctgtcgctagccgtaggtatgaaaagactgcttcaggatctgctcggcctaactcggggcatgcagagcacaaaagccctccaagatctcactctagggatgaccatgtgaaccactctgaccacaaggatgaccacaaggatgaccacatggaagatgggaagatggaaagggttgatcttgatcgctcgcccagcccacacgatgacaagtctgctccatatagtcctgtgtacaatggcaaagccagtggctcaatgagccccaacggtcagccagaggcaggtgccaaatttgttgaaccttctgggaaacctgagcctgcatctccagtgcgctgcagcaaaggcagagatgatgatgaggaaggtatcatagacgaggatggagagattggtgaggatgatccgcgtgcaaatgcagctgtgcagaatggtaataactgacggagagtggcctgcatcttctgtgacaaccaagacttatctgttatgcaaaatgcagtcattcccatctgcaagtcctgaatacggaaatgcatttgtgtgccattaaatatctcgtagaacatgtgatactgatgcctctgccatcgatgaaccaaaactgttgatgcatgtcatgtcatgttgttaaacttaatgacattgttgtgttctggtgttttacagccagttctgtaagtgatttatgataaaatatattgtcaggtctggaagtggtagtttatgataactagcaaagttatgttgctacggtttctatttataaagtatagaatat

SEQ ID NO: 26316 - DNA, 791 bp, Zea mays
  Clone ID: LIB4148-006-B1_FLI
aggaagatggggctcgcgttcgggaagctcttcagccggctcttcgccaagaaggagatgcggatcctcatggtcggcctcgacgccgccggtaaaaccaccatcctctacaagctcaagctcggcgagatcgtcaccaccatccccaccatcggtttcaatgttgaaactgttgagtacaagaacattagcttcactgtctgggatgtcgggggtcaggacaagatcagacctctttggaggcattacttccagaacacccagggtcttatctttgttgtggacagcaatgaccgtgaccgtgttgttgaagccagagatgagctccacaggatgctgaacgaggatgagctacgtgatgctgtgctgcttgtttttgccaacaagcaagatcttcccaatgccatgaatgctgctgagattactgacaagcttggattacactccctgcgccagcgacactggtacatccagagcacttgtgccacaactggcgagggtctgtatgaaggcctggactggctgtccagcaacattgcgagcaaggcttgaggcctaccttgaatgtcaaccgcgaactgactaggagctccggatgtatcatggaaactcaggacagaatcgcagttgcaacctgttagatgtcttctaccggcactatatatattttttgtttgatgtgtaatgatgttactgttcaacgtttattaccctactatactgttggatgttctttggacctgtttcatttcgcacaaggattggacttccaatatcatgctacattttac

SEQ ID NO: 26317 - DNA, 827 bp, Zea mays
  Clone ID: LIB4148-008-F3_FLI
gttatcctttgagcagtttgggcgctgagcaagtccagtgagagagggagagcggcgagaggatggctgggatggcgtcgctgcagggcgccatggcgtcgctctccatctccgcgctaggtgcggcgacggcgagcagcagcagcttctggggcaaccggctcgccacctactccgcgccgcagcctggggtaaggtttatggtcaagatatgcccaattgaaatgagacttaagagatgggagcgaaagaagtgtaaaccaaacagtcttcctgtgctgcacaagatgcatgttaggatcggggacacggtacaggttattgcaggccgtgagaaaggaaaggttggagaagtcacacgccttttcaagcacaacagcacggtgatcgtgaaggacctgaacttgaagtcgaagcacaagaaaggcacagacgatgaacctggtgaaatcgtcatgattgaaggccccattcatagctcaaatgtgatgctctactctaaggagaagagtgtggtaagcagggttggccacaaattcctggaggacgggaccaaggtccgatacctggtcaagaccggtgaagtaatcgacagtgtcgagaagtgggtaaaggtttttaaggaaggaaattcggagtaacagttttagcatgaaaacctgcaaaatgctctgaacgctgactgcgtcttgcatgttgaattgagcctgtttatccctctatgttgttatttacgccagtttttccccctgtaaattatacagttgtcaccaaatcttgcaacgcaagtcaatgcacatcagcatatgctgatcttgttccgcttc

SEQ ID NO: 26318 - DNA, 392 bp, Zea mays
  Clone ID: LIB4148-009-C5_FLI
cgccccgccccgcccaagaacttcaatcgtccaacaaaagcaggagtcgcatcccagatccccccgcattagagacaggcagggagggaaccgagatccatccatccgagtcgatggagtcaacggtggagcggataagctcgtcggtgcagtcctaggtgaagggccacgagctcgcagccatcatgttcaagtacgactcgacggcgcacaacgtggtggcggtgaacgcggccggctacaaaggctgctcggcgccgcggggcgccaaggtgtacacgtccggcaacgaccgcgtcacgctggcccgcggcaccaactacttcatctgcagcatcctcggccactgccagtccggcatgaagatcgccgtcaccgccgcctgaccgatc

SEQ ID NO: 26319 - DNA, 1159 bp, Zea mays
  Clone ID: LIB4148-010-D2_FLI
tccacaccaccaaatccctacctcctcagtcctcacccattcattcgtccatcccacctaccatggccaccgcctccggcactgacgccggtgcccagccgcgcgacgaccccagcctcctccccttcgcgtccttctcgctcggcctctccatccgcgcgccggccacccccacactcgcctccgtcccctccaccctccacctccccactcaaatctctacactcgccgtctgcaaaaggctgtggagaaggagggtatcaacgtgaagtacttctggggtagcacgctataccacgtggaagaccttcccttccgcctcgaggacatgccgtccaactatggcggcttcagggaggccgtgaaggggttggaggtcagaaaggtgctggaggctcccgaggaggtcaagtgcgtgcccatgaagaatgtgctcgagcccggtgacatccccacgcttgctgagctcgggctcactgcgccaccagccatgtcacaggactcaaaacctgctgttggctctactctcattggtggtgagacagaagctctggagaggttgaagaagtttgctgcagaatgctctatgcagccaaacaaagtagacaaaagcaatacccaagatagcatatatggtgctaatttctcttgcaaaatttctccatggcttgctacaggttgcctctctccacggttcatgtatgaggagttgaagaagcatgctactaaagcaattccttttgggtcaacacccaagaataatgatggcacatctgatgctggaacaaattggttaatgtttgagttgctgtggagagatttcttcaggttcatcacaaagaagtacagctctgtacagaagacatctgaagttgccactggctgcactcccgccccagcgcttgcatgaacttacttagacaagctgattgccagctgcttttttggggtgataaacttatgtgcattttcaatggagtcttttttttgccgccaataatgttggtagtcaaagtgaacgccgaatgcgcattcctgcgttttggtttggtcgatgtatttaatgctgtcgacatccctccaaatgactgttgaatgcaaatgatactgtgagcaacctatcatctgctgtgtaaatgtgttctgtcgacgttcctcc

SEQ ID NO: 26320 - DNA, 543 bp, Zea mays
  Clone ID: LIB4148-010-F11_FLI
ccctgatggcgtcgcctcctcccgtggcgaccgcggggcctcacagcgtcttcgtgtacggcacgctgatggaagaggaggtggtgcgtgtgctcctgggccgcgccccgccctcctcctcccccgcgctcctccccgaccaccgcaggttcagcctcaggggccgcgtctacccggccatcctccccgcccgcgcccacgcggtgagcggaaaggttatccaggggctcaccgacagggaactccatgtgttcgacatgttcgaggacgaggagtatgtgaagacaaccgtcgaggtctcactgactgagtggaggaaggtgcatttgaagtactaccttgagatgactcgggaattcatgctggaactcgggcaattttaaacacttctctggtttgtaactacacaggagtcagaggatccttgcaaaactaccatagaataatttgtgtcttgtgctcgacgagttcttgctactatgctgctttgggaacatacacatgttatttgagccatttagtcatttggatgtgaacaaatca

SEQ ID NO: 26321 - DNA, 732 bp, Zea mays
  Clone ID: LIB4148-011-A6_FLI
ctcgaaggttccagcgagcgactgtgtcgagcaggagagagcgcgatggggaagatgcggcagctgatctgcctcgtggccgccgtcgccgccgcggccatcctcctgacagcgtcggccaagaagtccggcgacgtcaccgagcttcagatcggcgtcaagtacaagcctgagtcatgtacgctgcaagcacacaaaggagacaaaattaaggttcactatcgtgggacactcactgatggatcagttttcgattctagctatgacagaggtgacccgtttgaattcactcttggaaatggccaagtgataaaaggttgggaccaaggattgctcggtatgtgcgtgggtgaaaagaggaagctaaagatacctgcaaagatgggttatggtgagcgaggctccccaccaaagattccaggtggagcaactctgatcttcgacacggagcttatcgccgtcaacgggaagacatccggcggtgcaaaggcagagagtgacagtgagctctgatacaatgcattggagagtttcaaagctcgggggggaatagtagcagcgtcgcatagttcattaggtgaaagggttgctgtttcctccacatagcagtttatgctatagagatgtcacagaaacaagtcaggttttgcccgatggtcgaacagtttcctttccatcttatgaaaactcgaatttgtctataaagctaccatggtcttcaacattgcagcc

SEQ ID NO: 26322 - DNA, 913 bp, Zea mays
  Clone ID: LIB4148-012-A6_FLI
catcgcatctctgagtctgaaaccctagccgcctgtctccctgtccggtctccactcgtccgggcgacgagacgacgacggaggctttgcttttgtctactttgaggatgaacgtgatggcagtgatgccatacgtgctcttgatggttatccatttggccctggcagacgcaggctttcagtagagtggtcacggggtgatcgagctgctagacgtgatggcaacaaaccagaagtaaatactaagccaactaaaacattgtttgtcattaactttgatccaatggacacaagagtcagtgatatcgaaagacactttgcaccatttgggaacatatcaagtgttaggataaggaagaactttgcttttgtccggtttgaaacactagaagaagcccgtaaggctcttgaagctactcatgctaccatgcttttggatagggtgatttctgttgagtatgcctttagggatgatgatgaacggagtgataggtacgacagcccaagaagaggtggtggatatggtaggcggggggatagcccagcgtacagatcacgtcctagtccagactatggtcgcccagcaagtcctgtatatggttcgtatggcaggagcagaagtcctgttcgtgaccgctatcggagatctcctgcttaccgatcaagatccccacctgccaaccgaagagcatatgactaatcaagaactatattatgatgctataaatgctagcggcaactcgtgtcgggctttttcagggctgcagccagcgggaagaacttactgtgcctgtaccggagtgtcaccttaattgctttaaactcctgtctttaaaatggcatgttatgttatgcgactgtcggagtttagtacatgcaatatcgtcacatgcatgctggcattttgtttttc

SEQ ID NO: 26323 - DNA, 907 bp, Zea mays
  Clone ID: LIB4148-017-G4_FLI
ccactcgaaccagaaccaccaggctgctggtgctggaagggggcgcggcagctgggcagctggcaacggacatggcggcggccggcggcgagaccatgatgacgagggagcagctgctccacctcttctcccgcttctccttcgtcacctccctccccgaggtcaagcagcggattgccgacgccgtcagggacaagcaggaggctgtggccgtgaccactgaaatacaagaggagattcttcgcgagatgggagtagatccaagttttggtattggttgcctaggaaaggtgaatgttgtttacaaaaatgacaaggacttgatgattaaattctatcaatttgttgccaaagaagaaatggctattgatgaagctgagcttgaacccagagaattggctgaaaaactacatgctcaacaaataatgcaagaaaagcaactgaacatgctagttgaaatgaggaaatatagccgagagagccaatctgtcatacttgggactttgcacaaagaattggaagaagctaattttgacatcaatgcatcgatcttgagcccagagcaaatgcaagagattgttcaaaagtgatatatttccaacaaatgagatcagtacctgccttgtctacctttgtggtgcttgtgtctacctttgtataaattgctaaaaatagcaagcactcctgtctatatgagaagtgtagctgttacaagtaaccctgtagaacatattgatcgtgcaaagatagttcacagggatgtaaaacattctgaattttacaaacataatactttttgtggatgctactttcttagcttgaatatggtcatgtaaaccactacagacaatactgtttacagagtgaagtttaaaatataacatgtgataggagagctgttggagac

SEQ ID NO: 26324 - DNA, 731 bp, Zea mays
  Clone ID: LIB4148-019-H11_FLI
ctcgaaggttccagcgagcgactgtgtcgagcaggagagagcgcgatggggaagatgcggcagctgatctgcctcgtggccgccgtcgccgccgcggccatcctcctgacagcgtcggccaagaagtccggcgacgtcaccgagcttcagatcggcgtcaagtacaagcctgagtcatgtacgctgcaagcacacaaaggagacaaaattaaggttcactatcgtgggacactcactgatggatcagttttcgattctagctatgacagaggtgacccgtttgaattcactcttggaaatggccaagtgataaaaggttgggaccaaggattgctcggtatgtgcgtgggtgaaaagaggaagctaaagatacctgcaaagatgggttatggtgagcgagctccccaccaaagattccaggtggagcaactctgatcttcgacacggagcttatcgccgtcaacgggaagacatccggcggtgcaaaggcagagagtgacagtgagctctgatacaatgcattggagagtttcaaagctcgggggggaatagtagcagcgtcgcatagttcattaggtgaaagggttgctgtttcctccacatagcagtttatgctatagagatgtcacagaaacaagtcaggttttgcccgatggtcgaacagtttcctttccatcttatgaaaactcgaatttgtctataaagctaccatggtcttcaacattgcagcc

SEQ ID NO: 26325 - DNA, 820 bp, Zea mays
  Clone ID: LIB4148-020-A9_FLI
cgccggcgccgccgcgacaggaggaaggagggagtagcagcggcaggggaggtccggcgatctcggctgctgtggcgcggtaagggaggaagcggagccgcgacaggatgcactcgtttgggcaccgcgccaacgcggtggcaacgtttgcggtcaccatactggccgcgatgtgcttcgccgcctccttctccgaaaattttaacaccctgacacccaccgcatccgtcaagatcttgaatataaactggttccagaaggaggccaacggcaatgacgaggtcagcatgacgctgaacatttcggctgacctttcatctcttttcacgtggaacacaaaacaggtatttgtttttgtggcagcagagtatgagactcgacaaaatgctttaaatcaagtttccctttgggatggcattatacctgcaaaggagcatgccaagtttttgatccatacaacaaataagtacagatttattgaccagggaagcaatctaaagggcaaggaattcaacttgacaatgcactggcacattatgccaaagactggcaaaatgtttgcagataagatagtcatgacaggctatcagcttcctgagcagtacagatagtcatatagatcatgaacagtagcagaggcctgcaagaagtgatagttgcatagctgatgctgaactttttgttctaatctagttggaacatgtaatcttataagcttgtacttaagctgaaccaggcaaaactaagttgcaaatttgagatatttattgctcaacttttaagaataggtctcggttaatggtgagaagacttttcactg

SEQ ID NO: 26326 - DNA, 809 bp, Zea mays
  Clone ID: LIB4148-020-F8_FLI
gggcttcctcactccctcgtgctctctcagaggtgggctggcttctcctccccctcttaccaagtcctcctcgggttagggttccttagggttttgtggaggggcgatggcggcggctgatgtggagtaccgttgcttcgtcggcgggcttgcctgggccaccagcaacgagtcgctggagaatgccttcgcctcctacggcgagatcctcgactccaaggtcatcaccgaccgggagacggggaggtctcgcggcttcggcttcgttaccttctcctccgagaactccatgctcgacgctatcgagaacatgaacggcaaggagctcgacggccgtaacatcaccgttaaccaggcccagtcccgtggcggtggcggtggcggcggtggctacggcggcggtcgcggcggcggcggctatggtggcgggcgccgtgacggcggttatggcggcggtggcggctacggcggtcggcgcgagggtggtggcggcggctacggaggcggtggcggctacggcggtcggcgcgagggtggtggtggcggctacggcggcggcggcggcggctggagggactgatgtgtgggcccatcctggcttcggccgagttatcttatctatctatagtatcgtgttaccgttcgcttctgtcaccgtgttagtgtccgttctacctttggattaggtgttggtacccctgttgttccctttgtttgctcccgctatgaaacgagacgagagaagaatgagcaaggtttttgttcgcagctatttttgtccaatgatattgatatgttgttcccctgtc

SEQ ID NO: 26327 - DNA, 493 bp, Zea mays
  Clone ID: LIB4148-021-B1_FLI
ggaagattttttcaagaggatcattggtctgctagcggaaacatcagagatatgtttcagcggaataaaggacatcaagtgcatcacatgccctcacaagccagaaggttccatgtttgtcatggtgaaactaaatctgtatcttttggagagcatccatgatgatattgatttttgttgcaagctggcaaaagaagagtccgtgattttgtgtccagggagtgttttgggaatggaaaactggatccgtatcactttcgccattgattcatcttctcttcttgatggtcttgagaggctgaaatctttctgccaaaggcataagaagaagaatttgcttaatggccattaactatattcgacttcaaagttgttacccacttccatcgttttccactgtatcatcaacaaaagtgtaacattgaaatccctcagaagtaataaagttaatgtttacatatgaggatatgcatgtcagtgtacatttttagtc

SEQ ID NO: 26328 - DNA, 1453 bp, Zea mays
  Clone ID: LIB4148-021-G2_FLI
cctctcctccttcagatcaaccctcccctccccggcccgacgcccctcgccccccccctcctgaccagccatggcgaccgctgctgctgcgtcccgggtggctgtctcggcgccggtcttcggttcggacggcggcgccaggagctccgggatcaagggcaacaacaatgttagcttcggcagcaaatcatgggtcggcggcacattggcctgggagagcagctgctcggtgcggcccaggcgcgccagcaaggtgctctgcatgtccgtccagcaggcgagcaggagtaaggtctccgtcgcgccgctccatctcgagagcgccaaggagccacctctcaacacgtacaagcccaaggagcccttcacggccaccattgtctcggtggagagtctggtcggccccaaagctccgggggagacttgccacatcgttatcgaccatggtggcaatgtgccgtactgggagggccagagctacggcgtcattcctcctggagaaaatcctaaaaagcctggagccccacaaaatgtccggctttattcaattgcatcgactaggtatggagataactttgatgggcgaaccggaagcttgtgtgtccgccgtgcagtttattatgatcctgagactggcaaggaggacccctcaaagaatggtgtctgcagtaatttcctgtgcaactcaaaacctggggacaagattcaattaacaggtccctccggcaaaataatgcttctgcctgaggaggatccaaacgcaacccatatcatgattgccacgggcaccggtgttgcccccttccgtgggtacctgcgccgcatgttcatggaagatgtcccgaactacagatttggtggcttggcctggctcttcctcggcgttgccaattcagacagccttctgtatgacgaagaattcaccagctatcttaagcagtatccagacaatttcaggtacgacaaagccctcagcagggagcagaagaacaggagcggcggcaagatgtacgtccaggacaagatcgaggagtacagcgacgagatcttcaagctcctggacggcggcgcgcacatctacttctgcggtttgaaggggatgatgcctggaatccaggacacccttaagaaggtggcggagcggagaggcgagagctgggaccagaagctggcccagctcaagaagaacaagcaatggcacgtcgaggtctactagggctcggattgctgtggttgcgacccttgatgctgccggggcagcgtcaggagacaaacacatgattgaaattgaatcgatggatggttctcggggcggtgtaaagtcacaaaagttccctttgtgagaaaaatcgccttttgtaattcataaaagcttccgcgccacggttatccgtggaacggaccgtgtaactttcagccgtttacatttgcagtgcagttgcttttggcagtc

SEQ ID NO: 26329 - DNA, 684 bp, Zea mays
  Clone ID: LIB4148-021-G3_FLI
ctcgaggtgaccctgttctgattctcgtggtttcaggggaggatctaggtccagggagattaatctcgaggttggacctcacatttttatggcctttgactgcaacaaggaaagaggagtttcttcgcctgacagttgctcccgcatttgcaccgagggcactctcgtccaggcaaatcccttatctcactactggaagcctaaacgtttggagaacttcaacaagttggagaaccagaagtccagttatgaatctgctccgagtggctctgatccaaaacaggatgctgaagcgagtgatgaggcaactgcctcactgtgtggcttcaggtgcttcactgatctgccagcttcgttggtctgcgaggtccttgcacgtctcgatgcgaaggaccttggaattgtatcctgtgtctccaccctcctgcacgccttagccacagatcatcagggatggaagaagttatactgcgaaaggtgggggcttccagacctccccaccaccctgaatgggcccttgctgccgggtgtccccctagatgggaagttttggaaaacatttttcgtggagcgggagtttaggagcaaatccttcatgggaagattcaatctggatattctccgtggccacaatgaggatgtgcgtgctgtgtcccttttggtatcagcaaatctgatattcac

SEQ ID NO: 26330 - DNA, 544 bp, Zea mays
  Clone ID: LIB4148-021-G4_FLI
caactacgggcccgccgggagggacatcggcttcaacgggctcgccgaccccaacagggtggcgcaggacgccgtgatcgcgttcaagacggcgctctggttctggatgaacaacgtgcaccgtgtgatgccgcagggcttcggcgccaccatcagggccatcaacggcgccctcgagtgcaacgggaacaaccccgcccagatgaacgcgcgcgtcggctactacaagcagtactgccagcagctccgcgtcgacccagggcccaacctcacttgctaggcgacggcgtccacgttgtacccatggctcctgctagtgctagctcgtccacaataaatgctcggcgtcgcaccctcgcgaaaagtaaaccaagagtttactgactagtacgagctagctagcatgcagtaataataatcatcgtaataataataataaaacgactgggctgagccactttgttcgacctgaatgaataatgaagcaactgtatgttccctctgtacatagttgtgtatgcttgtgcttttactttccgtttgc

SEQ ID NO: 26331 - DNA, 497 bp, Zea mays
  Clone ID: LIB4148-023-A6_FLI
tcttaagcatccgtgcacctggcccagtgactgcctgcctttgccttccactggttcgctgctccctctcctgtgcttggctgctgcttgcccgttgagcacagcagggaggcgatgagggactgggcgccgtcgatcatcgccacggcgctgttcgcgctcctgtgcccgggcggcgtgctgcagatgcccggccggcaccgccccgtcgacctcatgaacatgaagaccagcttcccgtccatgctcgtccacgccgtcatctacttcctgctgctcatgctcttcctcgtcatcctgcagcctcacctctacatctgacgtgagcgtgttccccaccccttcacacaagcttctagcatgtttcagtttcttctttcttgggatgcagttttgggcccttttaatagctttgtaaccttatgaaccagaggattatatacgtaatatgcgatccgtagcttccgttgggcaataaagaactgaagtttccctgc

SEQ ID NO: 26332 - DNA, 460 bp, Zea mays
  Clone ID: LIB4148-023-A8_FLI
gcgagccccgagagcgggtttagttagaggctacgggcggtcgggcgcggcggcggcggcggccatgagcagcgggagcgagagcactaccgccagcaggtggcccgagctggccacgctgcgcgcgctggcgcgcgacgccgcggagcagcttcggctgccgcgggccggcacgtcggcgtcggcgtcgtcgccgtggcgcgggcgcgaggaccacctccacggccacggcaagacggccaaggtgatgcacctgctgctctggggacccaagtgaagcggcgagaggccaccgtaccgccgggctctcccgctggcgttgctcgttttgctctgcctgcaatccgccccgcacggactgtactgtacctatatatacacctacatactacgacgtgcacctgtactacgacgtgctgctgtaccatactaaatactagtgcgctgctgctcccttgcc

SEQ ID NO: 26333 - DNA, 849 bp, Zea mays
  Clone ID: LIB4148-023-C10_FLI
ccgctgcccttgcgagaagcagtgcgagggccaccacgaccgggaaagcaggcagcagtgcgtccaggcttgcgagcgccggcgacaggagcgcggcggcagccgtgactccgacgtcgacgaggacgacagcgaccggcggtgccagatgaaatgccggcgccacagcgatcggcaggcgaggcagtggtgcgtgcagcgctgcgagcgtaagcaacaggaggacgccgccgccgacgacgacgagaacagcgaccggtgccagaagagatgccagcaccacagcgactggatgaaaaggctgcggtgcatgcaacggtgcgggcgacaggaggagggcggcgcacgcgacgacgctgacgacgaggccagccacggcgaccggtgcgagaagaagtgccagcagcaccaccgcgactacgacaagaagcagcagtgcgtgcgcgactgccgccgcggccgtggctgggaaacggtggccggcgccatccttgaggtggtgtgacgatcgacgacgtgcatggcgtggcgcacagagctagtaataaaagggtagtgtacgcttaccgcgtacgtacgtgtcaccgggcgtggcactctccagtctccagggacccatccaccaaatgctactgctccttcgtagggagacgtgggaataaagagtggtagctgcatgcacgtacggcggccatggctctccgatgagagagctagctgtgtacgtgtgttcttgatgttgttccatgcatgacatgtatacgtcttgcctaagtacgcttgtactagttgagagactgtgtaagtgaaatgtgctataataataaataagtaaaaggcgccttctcc

SEQ ID NO: 26334 - DNA, 1507 bp, Zea mays
  Clone ID: LIB4148-023-D11_FLI
ctactcctccacccagctcgctgcttccggaatccggagagctcgcgtcgcgcgtgcgcgggcgtgggtgcgtgcggcggcgaagcaccagcaccaccctctcgcgtcgcgcgcgcgtctcgatggccgacggcgagccttccctcacgcgctggaccttcgaggatttcgtggtccactacgaagcgcgcttcggcctccggcgcgaggccgacggcgacggcgacggcgatggcgacgatgcacccccgccgcgcggatccgatcatggggccagtcgccccgccactgcccgcgccaacggcggcgcagacctcgccgtcttcgagcagttcgagcggatggagaggaaggtggagataagcaatggagctatagaggacggtccactgcagaaatctctacttccttcatttgaatctgcagaaatgcgcaacttagctgagacattgttaagggatataattcgtggaagtccagatgttaaatgggaaagcataaaaggtctggagaatgcaaagcgtcttctcaaagaagcagttgtaatgccaattaaatatcccaaatacttcacaggtctattatcaccttggaaaggcatattactgtttggtccacctggaacaggaaagacaatgctagctaaagctgtggctactgagtgcaaaacaacttttttcaatatttctgcctcgtcgattgtaagcaagtggcgcggtgactcggagaaactagtgaaagtgttattcgaacttgcaaggcatcatgcaccatctactattttccttgatgagattgatgctatcattagtcaacgtggtgaagctcgtagtgaacatgaagctagccggcgattgaaaactgagctattaatacagatggatgggttgactaagacagatgagcttgtttttgttctagcagcaacaaatttaccatgggagttggatgcagcaatgctgcgtcggctggagaagcgtattcttgttccattgccagagccggatgctagacatgctatgtttgaagagctcctgccatatacacctggcacaatggagattccctatgatgttcttgtggagaaaactgaagggtattctggctctgatattcgcctggtatgcaaggaagcagcaatgcagcccctaagacgggtaatggcagttcttgaaggcaggaaagaagaggtccctgagagtgagttgcctgaagttggcccagtaactacagaagatattgaacttgctttgaggaatacaagaccgtctgctcatcttcatgcacatagatacgaaaagttcaaccaagattatggcagtcatgtacatggctaaaggggagaagcttgttgtagggtttaatttgtatgctcatgcgtgggccaataggtgactactgaattcatcgacatgctgaggtatccttgtaaacactatgcttatccttgtatgctgtacactatcattcatttgatgagcaataagctgtttggtaactcagtctc

SEQ ID NO: 26335 - DNA, 606 bp, Zea mays
  Clone ID: LIB4148-023-H7_FLI
tctcgcagacgcgcctaggtctagctagggtctggtctcgctgccccgccgcgcgcgcattcacaagcttctagacgttccgaggaggaggggaggtacccgccgccgcagccatggcgtcgactaaggtccagcgtatcatgacccagcccatcaacctcatcttccggttcctacagagcaaagcgcgcatccagatctggctcttcgagcagaaggacctccggattgagggtcgcattatcggattcgatgagtacatgaacttggtcctcgaagacgctgaggaaatcaacgtcaagaaaaacactaggaaatcactgggccggatactcctcaaaggtgacaatataactttgatgatgaacagtggcaagtgaagattcttatggcaggaacgatgtttggtgctcgcttcgattatctgtgacacaatgtactccatccatccgtccagacttaaatgatgtatcatgtcattgtggtttagtgagagttgtataactacctgaggaaactcacgtgttactatatgctaagatgctgtgacggtgagctattcagtgctcacttgtgttccaaagattagcccgacttgtgtgtgcc

SEQ ID NO: 26336 - DNA, 828 bp, Zea mays
  Clone ID: LIB4148-024-A2_FLI
ctgagcaaccaggccagttccaccaagctaaggaggtgagaatctctgtaaaacgctaaagaagaaaaaaaaatgaaaggatccagcgagcctggcgagacctcgaagcaggcgcccctgggcagcaggggtgtcagcaaaggagtgtccgtgcttgatctaatacttcgcttcattgccatcatcggcaccctcgctagcgccattgcaatgggcaccaccaacgagacgctgcctttcttcacgcagttcatccggttcaaggcgcagtacagcgatctccctactctcacgttcttcgtcgtggcgaattccattgtctgcgcttatctcaccctgtcgctcccactatctatagtgcacatcattaggagcagggctaaatacagcaggctgctcttggtcgttcttgacgcggcaatgctagcactggtgactgcgggagcatctgcggcagcggccattgtgtacttagcgcacaaaggcaacgtcagagcaaactggcttgccatttgccagcagtttgactcgttctgcgagcgtatctctggatccctcattggttcgttcggagccatggtcatgctcgtactgctgctactactctccgccattgctctagccaggcgctaggcggtgcgtgttgcggttatcggactccgctatcctcgtgtaatcatacgtgtgtctattatacctctcctgctatgatcctctcatatatccccaattgttggcttgattctgcacttcttttcttctgatggtgtgcactatcatgtatatatataagctacgaaaaaaatgaatatacgtgaaccattatgt

SEQ ID NO: 26337 - DNA, 863 bp, Zea mays
  Clone ID: LIB4149-001-A1_FLI
tgctaatcttcaagcaggagagaaaaaagcataagctgagcatccatcaatggcggatgctggcaacgaggccgagggtctgacgctgttgggcctgcacgtgagccccttcgcgttgcgcgtgcgcatggcgctgagcctcaagggcctgagctacgagtacatcgagcaggacctgttccacaagggcgagctcctcctcagctcaaaccccgtgcacaagaaggtgcccgtgctcatccaccacggcaagcccatctgcgagtccctcgccgtcgtggagtacgtcgatgaggtctggcccggcgccgccgccaccatcctccccgccgacccccacggtcgcgccaccgctcgcttctgggccgcctacatcgacggcaagctgtttccggcgtggacagggatcatgaaggcggcgacggaggaagcgagggcggataagctgagggagacgcacgccgcggtcctcaacctggagaaggccttcgccgagatcagctctagctccagcaacgacggcgcggccttcttcggcggcgactccgtcgggtacctggacctcgcgctcgggtgctccctgccgtggttcggggcgctgcgcgccatgctcggcgtcgagatcatcgacgccgcccaggctccgctcctggtggcgtgggccgagcgatttggggagaccccggtggccaaggaggtgctgccgcagccggacgaggctgtggcctacgccaagaagattcaggcctactgggcttctgctaagaactgatgagcaccgaatcctgtcatgatgaaattgaagcagcaatacttgtataacactccaatcatggtgaataaaggcctctaaactgttggtt

SEQ ID NO: 26338 - DNA, 1190 bp, Zea mays
  Clone ID: LIB4149-001-H4_FLI
cgagcagagcagcgaaaagcatggatgccgaagccgccgccgccgccgagggccaggtgcggcactggaccgcggacgtcaacggcatttccctccacgtcgccgagcgcggcgccgccgacgcgccggcggtcctcctcatccacggcttcccggagctctggctctcgtggcgccaccagatggccgcgctcgccgcccgcggcttccgcgcgctggcccccgacctccgtggctacggcgactcgtccgtgcccaccgaccccgccgcctactccatcctccacatcgtcggcgacttggtcgcgctccttgaccacctccaactcacaaaggtgttcgtggttgggcacgactggggcgcgatggtggcgtggcacctctgcctgttccggccggaccgggtgcgcgccgctgttgtcctggggatcccctacttcccccgcggccctcgcccgatgacggactcatttgccaagctcggcgatggattctacatcaatcagttccaggagccaggaagagccgagagggcatttgctcgctacgatgttgcgacggtcctaaagaagttctacgccttgaaaatcgacgagatgattgctcctcctggagtggagatcatagactttctccaggcaccttcttcgccgattccctggatgacagacgaagaactgggacagtacgccgagaagttcgagaagactggcttcacaggacccctcaactactaccgcatgcttgaaacaaactggagactgactgcaccttggagtggatcgaaaatcacagtgcctgcgaaattcatactcagcaagaacgacgtcggcctgcagtccttcggaaccgagaagtacgtcaagagtggcgctctgaaggagaacgttccagaccttgagatttcgatcatcgaggggcaccatttcgtccagcaggaagaggccgggacagtgaattcggaaatactctccttccttggcaagtttcccagcgagggaggatcagcgtgattgttatttattgtttgcagccagtcccggactcctgagaggaagatggcctcagaatgatccgagggtttatgattgaataaagtgagagctcagatcgatagccgtctgttggcttgcattaaaaaaataaagagcttgcatgtaaaactatttatgaacgaataaacttctgtc

SEQ ID NO: 26339 - DNA, 719 bp, Zea mays
  Clone ID: LIB4150-001-G8_FLI
cttcaactgtatgagtttgaggcatgtcccttctgtaggagagttcgggaggccatgaccgagcttgacctttctgcagaggtttatccttgtccaaaagggtcgctaaggcacagggacatagtcaagaaaattggagggaaggagcagtttccactccttgttgacgccagtactggtatctcaatgtatgaaagtggagatattgtgaagtacctgttcaggaactatggacaaggaaggagtccttcacctggtctccttgagagtacgattttcacaggatgggtgcccactcttctcagagctggaagagggatgacactgtgggacaaagccggtgctgtacctgcagagaagctggagctcttctcgtacgagaataatccctgtgcaaggatagttcgagaggctctctgtgaactggagcttccttatgttctccagaacgtcggagagggatcgtcgaggacggatttgcttctaaggaagtcgggctctaagcaggtgccatatctgatcgaccctaacactggattccagtcgggcgaccataagaagatactaccttacttattccagcagtacccagttagtagtatctagcagaaaaagcagacgtccacaactttaactgtgtatggtttatgtgatcttacatatgtatctgcgggtacagtgttaccagacgtggtttgtacgtatactttggctgctgc

SEQ ID NO: 26340 - DNA, 1512 bp, Brassica napus
  Clone ID: LIB4153-013-B3_FLI
cttcactgaagctgctaagcttttcaatggcgacgtttgcgctcaaatccttcaccggacttcgccaatctccaacggaccagataactttcgtctcccatgtcccgtcgtccctctctcgctcccagcgacggacctccctcaaagtaaccgcgtcaagagccagtcccaagctcgccaaccgcagcctccgcgtcgccgtcatcggcggaggcccggcaggaggagccgccgccgagactctcgcccaaggaggcatcgagacgatcctcatcgagcgcaagatggacaactgcaagccctgcggcggcgccatccctctctgcatggtcggagaattcaacctgccgctggacatcatcgaccgtagagtcaccaagatgaagatgatctctccgtcgaacatcgccgtcgacattggccgtacgctcaaggagcatgagtacataggtatggtgaggagagaggttcttgaccagtacctgagggagagagcggagaagagtggagccaccgttatcaacggtcttttcctcaagatggatctaccggagaattgggactcgccgtacgtgttgcattacacggagtatgatgggaagacgggagctacgggacagaagaagacgatggaggttgacgccgttatcggagctgacggagctaactctagagttgcaaagtctatcggtgccggagattatgactacgccatcgcgtttcaggagagaatcagaatcccagatgataagatgacgtactacgaggatctagctgagatgtacgtcggagatgacgtgtctccagacttttacgggtgggttttccctaaatgcgaccatgtagctgttggaacgggaaccgttactcacaaaggtgacatcaagaagttccagctcgcgacaagaaacagagccaaggacaagattctaggaggcaagatcatccgcgtggaggctcaccctattcccgaacacccgcgtccacgcagactctccaagcgtgtggctcttgtcggtgatgccgcagggtacgtgaccaaatgctccggcgaagggatctacttcgctgcaaagagtggaagaatgtgtgctgaagccatcgttgaaggctcacaaaatggtaagaagatgattgacgagagtgatttgaggaagtacttggagaaatgggacaagacgtacttgcctacgtacagggtgcttgatgtgttgcagaaagtgttttaccgatctaacccggctagagaagcgtttgttgaaatgtgcggtgatgagtatgttcagaagatgacgtttgatagttatctgtacaagagggtcgcaccgggtagtcctttggaggatttgaagttggctgtgaacactattgggagtgtgtttagagctaatgctctaaggagagagattgagaagctaaatgtttaagcttaatgtcttgtccttaaaaatatcagtttcttatttatgtttttgttgaatgatcagtggctttaaaatccaaatccttaat

SEQ ID NO: 26341 - DNA, 1183 bp, Brassica napus
  Clone ID: LIB4154-004-A3_FLI
caccatcatccttcaacccaatccaaaacacccagatctagatctccttctctcatcacccttaaacccatcaccctcaccccaaaacgcaccgtttcgtctgcttcccacaccatctcctcttccctcgtcaccaaagaagacaacaacctcaaatccaccacctcctcctccttcgacttcatgtcgtacatcctccgcaaagccgactccgtcaacagagccctggactccgccgtccccctccgggagccgctcaagatccacgaggcgatgcgctactccctcctcgccggcggcaaacgcgtcaggcccgtcctctgcatcgccgcctgcgagctcgtcggcggcgaagagtctttagccatgccggcggcctgcgccgtcgagatgatccacaccatgtcgctgatccacgacgacttgccgtgcatggacaacgacgacctccgccgcgggaagccgacgaaccacaaggtttacggcgaggacgtggcggtcctggccggagacgcgcttctctccttcgccttcgagcatttggcgtcggcgacgagctccgaagtttctccggcgagagtggtccgagccgtcggagagttggcgaaagctataggaaccgaagggctggtggcgggacaggtggcggatataagcagcgaaggattagagttaaacgacgtcggattggatcatttagagtttattcatttgcataaaacggcggcgttgcttgaggcttcagccgttttgggcgggatcgtcggtggagggagcgacgaggagatcgagaggctgaggaagttcgcgaggtgtatcggtctgttgtttcaggtggttgatgatatcctggacgtgaccaagtcgtctcaggagctggggaaaaccgccgggaaagatttgatcgctgataagctgacgtatccgaagctcatgggattggagaaatcgagagagttcgctgagaagttgaatagagaggcgcgtgatcagcttttggggtttgattccgacaaggttgctcctttgttggctttggctaattacattgccaatagacagaactgaaactgtgtgttccttttttttaagttcttgtcggaattattctctctgctcgtgtttcagatcgaattgtagaaatattggtatgattgctatgttatagatttaatattaagag

SEQ ID NO: 26342 - DNA, 1125 bp, Brassica napus
  Clone ID: LIB4156-010-D3_FLI
catacgtcttaacacactctttttccaatattatacaaatggcggggaaggaggacagtgagacgttttactcggcggcaactcctttggcgtttgagttaggcagccttccaacaaccgtgatccccgcagacccgtcggcaaccgatttgaccgcacctccaaagcctgtaataatcacctccccaaccgtcgccggaacttaccccgtcgtcttattcttccatggattctatcttcgtaactacttctactctgatgttattaaccacgtagcttctcatggctacattgttgtagccccacagctgtgcaagattttgccgccgggagggcaagtggaagtggacgatgctggaaaagtgataaactggacttcgaaaaacctcaaagctcacctcccaagctcagtaaacgctaatggcaactacaccgcactcgtgggccatagccgcggtggtaaaaccgcgtttgcggttgcgttaggccacgccgcaacactagacccatccatcaagttttcagctcttgtaggaatagatccagttgcaggaatcagcaaatgcataagaaccgatcccgaaatcttaacgtacaaaccggaatcattcgacctggacatgccggttgcagtgatcggtacgggtctcggaccgaagagtaacatgctgatgccaccatgcgcaccagcggaagtgaaccatgaggagttttatattgagtgtaaggctaccaaggggcatttcgtggctgcggattacggacatatggatatgttggacgataatttgcccggttttgtcgggtttatggcgggttgtatgtgtaagaacagtaaacgcaaaaagagtgagatgagaagctttgttggtggaattgtggttgcgtttctaaagtatagtctttgggtgaaaagtcagagattcgacagattgtgaaggatccctctgtttctccggcgaggcttgatcctttgccggagctggaagaggcttctggttatctcgtctagatttgtggttaaggaatgtattggtatcctcagggaagctccaaactcgtaataaacttattgcatgtttcactactttaataaacatattgaatatgtatcctccaaactat

SEQ ID NO: 26343 - DNA, 679 bp, Glycine max
  Clone ID: LIB4164-004-D6_FLI
ctaaaaccctaataccttcaaagaacgaagtagtggatcagtgatggcacctaaggcagagaagaagccagcggagaagaagcccgcggaggagaagaagtcgacggtgggagacaaggctccggcggagaagaagccgaaggccggaaagaagcttccgaaggagggaggagccggcggagaaggggggaagaagaaaaagaggaacaagaagagcgtggagacgtacaagatatacatattcaaggtactgaagcaggtccaccctgacattggtatctcaagcaaggccatgggaatcatgaacagcttcatcaacgacatcttcgagaagcttgctcaggaatcttccagacttgcccgctacaacaagaagcccaccatcacttcaagggaaatccagaccgcggtcaggcttgtgcttcccggtgaattggccaagcacgccgtttctgagggtaccaaggccgtcaccaagttcaccagctcatgaaccgactattatttggattttgtttctggttgcacacacaaatctgttctatgtatctggagacttatgtttggattttgatcagtaattgtgcatgaacgttgtagtggtgctgatatagttagtatattcttggtatggtacatggagtgggctgtttcagtattaatgcatttaagattctct

SEQ ID NO: 26344 - DNA, 1722 bp, Glycine max
  Clone ID: LIB4164-026-D11_FLI
ctcttcctcacctaggaaaaaccgtttccaactctaccattttcccaccaaccctccactctcttcctcaaaacaatcgttaatctcttctacattgtgaagtctgatattctctaagtagacaacacaaacacacctcaatttatagcacccatctttcttttctcccacaaattcagctccattttgttacacgttcaaataataagccaagaagccaccatgatctcttcaatgaagtgcacagcctcatctctcacatgttccgctttctcaaacagaaagattcccattgcaaggccacaacttgtcacgttaccaaccattaacaacgttgaacaaaacacgggtctctctcagttgtgttcacagaaaccgctctacctttcatccactgagaacttggcattggtgaagagaaggagggagactgagtgccaggcctatgaagccgataggtcacggcctctggagattaacattgagctgccgggcgaagaggcggcgcagaggttcaagattgggctgtattttgctacatggtgggctttgaatgtggtgttcaacatttacaacaagaaggttttgaatgcttttccttacccatggctcacctccactttgtcccttgctgctggctccctcatgatgttagtctcctgggccaccagggttgctgaggtcccaaaagttaacttggacttctggaaggccttgtttcctgttgcggtggcacacacaattgggcatgttgctgcaactgtgagcatgtccaaggttgctgtttcattcactcacatcatcaagagtggagagccagctttcagtgttcttgtgtcaaggttcttgctcggagaagcattcccaatgccggtatatctgtcactgctgccaattattggtggttgtgcattagctgcagtgactgagctcaatttcaatatgattggctttatgggggctatgatatcaaatttggcattcgtcttccgcaatatattctcaaagaaagggatgaagggaatgtctgttagtggaatgaactactatgcttgtctttccataatgtcactactaattctcacaccttttgccattgctgttgagggccccaaggtttggattgcaggctggcaaacagctgtgtctcagattggtcccaattttgtatggtgggtagctgcccagagtgtcttctaccacttgtacaatcaagtctcatacatgtctcttgatcagatttctcccttaacattcagcattggaaacacaatgaagaggatttcggtcattgtctcttccatccttatctttcacacgcctgttcagcccatcaatgctcttggtgctgccattgcaattcttggcaccttcctctattcacaggctaaacagtaagttgataattttgaagctgttaagtaacacacgcgaacaatgactcatggctggagctcaaagtgtcactaatgaggactacggcattaattagctagttttgttgtcaataggaatttaagtttatttcttttgggccatagcaggagcatttctaatcacgtttcgatctgtgtaaattagctttagaagaatggaatgcactaagccgtacttgatctttaggatgtaggtatatcaattctcgaaaaaaaaaatcgttgtaaagtcatgtaaatcagtacttattattttattggtttgttacttattattgtgcagact

SEQ ID NO: 26345 - DNA, 1195 bp, Glycine max
  Clone ID: LIB4165-016-G3_FLI
caataatcctattagaatatggaagagagcttcgttttccagtggagcgttatcagatctctcttgtccatccttcagtggtgggccttcaatgtcactgtcatcatcgtcaacaagtggatctttcagaaattggatttcaagtttcccttatcagtttcctgtgtccactttatctgttcatccattggagcatatgtggtaattaagttgctgaagcttaaaccactgataactgttgaccctgaagatcgctggagaagaatctttccaatgtcatttgtgttctgtattaacattgttctggggaatgtgagcctacgatacattccagtttcttttatgcagacaataaagtcattcacacctgccaccacagttgttttgcaatggctagtgtggaggaagtattttgactggcgtatttgggcttctcttatacccattgttggagggattcttctcacatctgtaacagagcttagttttaatatgtttggattctgtgctgccttatttggctgtttggctacatctacaaagactattcttgcagaatctcttctgcatggatacaaatttgacagcataaacacagtttattacatggcaccttttgcaaccatgatcttggcgcttcctgccatgttacttgaaggcaatggaatccttgaatggctaaatactcatccatatccttggtcggctctcatcattatttttagctccggggtgttggctttctgtcttaacttctcaattttttatgtgattcactccaccactgctgtaacatttaatgttgccggaaatcttaaggttgcagttgccgtccttgtttcttggctgatatttaggaacccaatttcgtatttaaattctgttggatgtaccgtgactcttgtgggatgtacattctatggttatgtgaggcacaagctctcccaacagccacaagtcccaggaactcctcggacacccaggactcccaggacccctcgtagtaagatggagttgcttcctcttgtaaatgataaattagaagataaggtctagttcatttagctacatatgatgaggtttcagcctttttgaaggcagtaatagcaataggtacaaatacattaaaataacttcggttattatttgttagattacctccgaaatctttaatacaaggttctttttttccccc

SEQ ID NO: 26346 - DNA, 1057 bp, Glycine max
  Clone ID: LIB4167-004-D11_FLI
cacaactccactcttagctgccattggtttttcttcttccatttctcttcctttctaagcttttttcgattacccatttggagattctgtcctaatggctcttgctccttccaaagtttcctccttttccgggttttctcccaaacccagtgttggggatgctctgaaaaacccaacttgctctgtttctctgagctttgcgaatgtgaaacttggaagcagaaaccttagggtttgtgcctcaactgtgcctctctcaggggtgattttcgaacccttcgaggaggttaagaagggtgaacttgctgttccaacggctccccaagtctcgcttgctcgtcagaactacgctgatgagtgtgaatctgccattaatgagcagataaatgtggaatacaatgcttcctatgcgtaccactccttgtttgcatactttgacagggacaacgtggctctcaagggatttgccaagttcttcaaggaatctagtgaggaagaaagagagcacgctgaaaagctcatgaaatatcagaatactcgcggtggaagggttgttcttcacgccatcaagaatgtcccctcagaatttgagcatgtggaaaagggggatgcattgtatgcaatggaattagctttgtctttggagaagttagtgaatgagaaacttctgaatgtgcacagtgtggcagatcgcaacaatgaccctcaattggcagacttcattgaaagcgagtttttgtctgaacaggttgaatcaattaagaaaatttcagagtatgtggctcagttgagaagggttggaaagggtcacggtgtttggcactttgatcaaagacttcttgattaggaagatgctgcttaatcttgaattaccttattagtagtcttcgtttacctttggtcttttctgaagttctgggttgttttctattttaaaatagtatttaaatgtttttcctatgtactgggatttaggaactcggagtaatgtaattgctagtagcacatgtaaaaggctgcaagcctattatgcaataacatttgatatatgcttttc

SEQ ID NO: 26347 - DNA, 1126 bp, Glycine max
  Clone ID: LIB4167-067-E7_FLI
atgaacaacaacgccgccatgtagaacacaaccgcttcctttttcttcttcagaaactcttctctttctcattttcctcttctttgaattcaaagggctctagatggatacagctgaccaaagaaaaggcaagtatgctcctaccagggatacagagaacccactgttgggaaaatttgacaagccgcttccatgttttggctgtggaattggatggttctctcttctgctaggatttgtttgcccgccgatgtggtattatgctacaattctctatttcggaaattactatcataaggatccgagagagcgggctgggcttgctgcttctgcaattgctgctctagttttcacaattgctgcggtggtaacagtagctgttattttcttgtaattttactttctactagcccatgtctagctaaggagacaaaaaaaaaaaaatcacttctaatatcagcccctacacgaagaaggcaagcctgatgcacccacagaccacggtagatcaagctcttatgatcacttttgatcatcaagaaaaataggtaccaaagcaccaaaggtggtacaaagctagttccattccattatgtggatgtagagctgcttttgtttcccttcttggagttgtgtatagaaaaggatgacgtaactcggattttatccaaaatgatggctcagttaacttattttggtgtgtatgtgtcttggtgttggtaactagttactatcattaatttattagaaaaaaaaagtgaaaatatactgctgctggtgtttgatcatatgaaagcctggttttatgtgctgttctccacttggatccagggtgaaggtggtggtatctggtgcatgaggaagacacctaaatggaaagttgatctcctttagaacaaccctcatattgttcacgttcaagtagaagttgcatttttgctaagtacttcaaaatgagaaatattcaagagtcaaaacaggtgtaaagtacttgatgtgtcaacgcttggtcatgaatatttgcagttgctatctaaccttttaattgcaattgcatttcagctatttgtgattcacctaataactttggtatgacatgattcaaacatacgtggagagtatcaag

SEQ ID NO: 26348 - DNA, 1631 bp, Brassica napus
  Clone ID: LIB4169-006-H8_FLI
cagctttcggccaaactatacttcttctcctcgcatcaccgagttagaataaaaaaaacaagtgggttctctgagaaatattcgatttttttttaaaaaaaagactgatgatgacgcttaactcactctctccagctgattccaaatctctttcttctttcttggataccacctcccggttcaatccaacccccaaactcccaggtgggtttagtttgaagaagaggaatcaacggagaggttttggaaaaggagtcaagtgttcagtgcagcaacctcctcctccagcatggcctgggagagctgttcctgagcctcctcgtcaatcttgggatgggcctaaacccatctccatcgttggctctaccggttctattggcactcagacattggatattgtggctgagaatcctgacaaatttagagttgtggctttagctgctggttccaatgttactctccttgctgatcaggtaaagagatttaaaccagcattggttgcagttagaaacgagtcattactcagtgagcttaaagaggctttagctgatttggactataaacctgagattatccctggggagcaaggagtgattgaggttgctcgccacccagacgctgtaactgttgtcaccggaatagtaggttgcgcaggactaaagcctactgttgctgcaattgaagctggaaaagacattgctcttgcaaacaaagagacattaatagcaggcggtccttttgtgcttcctctcgccaacaaacataatgttaagattcttccagcagattcagagcactcagccatattccagtgtattcaaggcttgcctgaaggcactctgcgcaagataatcttgactgcatctggtggagcttttagagattggcctgttgaaaagctcaaggaagttaaagtagcagatgcgttgaagcatcctaactggaacatgggaaagaaaatcacagtggactcagcaacgcttttcaacaagggtcttgaggttattgaagctcattatttgtttggggctgagtatgacgatatagagattgtcatacatcctcagagtatcattcactccatgattgaaacacaggattcatctgtgcttgctcaattaggatggcctgatatgcgtttacctattctctacaccatgtcttggcctgatagggttccttgttctgaagtaacttggcctagacttgacctttgcaaacttggttccttgacattcaagaaaccagacaatgtgaaatacccatcaatggatcttgcttatgctgctggacgagctggtggtacgatgactggagttctcagtgcagctaacgagaaagctgttgaaatgttcattgatgaaaagataagctatttggatatcttcaaggtagtggagttaacatgcgataaacatagaaacgagttggtatcatcgccgtctcttgaggagattgttcactatgacttgtgggcgcgtgagtacgctgctaatgtacagctttcttctggtgcaaggccagttcctgcctgatacatagttgttggagggatattgattagtggaagtgattaagaaatgttgtaacaagtttagtgcaaaatgtatttactttaacaccattttggc

SEQ ID NO: 26349 - DNA, 1730 bp, Zea mays
  Clone ID: LIB4171-001-F7_FLI
cgaaaccaagcaagctttcggtcatggccccgccggcaacgaatagcccgggagaggtcgacagcggcggccgcccgcatgtcatgttcatcccaagcgctggcatgggccacctcatcccattcttccgcttcatcgcggctctcgctgggcagagcgtcgacatctctgtggtgactgtccttcctaccgtttctgccgccgaggaggactacttcaccagcctcttcgctgccctcccccgtgtccgccgcgtcgacctccacctcctgccgttcgacgcgtccaagctcccaagcaacgaccgcgacccgttcgttctccggtgggaggccctgcgccgctcagcgcacctcctgggcccgcttattgccggcgccgccccacgcgtctcggccgtcattacagacgtgaccctgacctcccacgtcatccccatcgccaaggagctcggcgtccagtgccacgtcctcttcccctccagcgccaccatgctctcgctccttgcttacacccctgtacacatcgacaagaaggccgagcaggggagtgacatcggcgacgtcgacatccccggtgtgtgtcgcataccgcagtcttgtctcccgcaggtgctgcttcacctcgacaaactcttcaccaagcagttcatcgccaacggccgcgagatcatcaacgctgacggctttctggtgaacacgttcgacgccttggagccggtggcgctcgctgccctgagagatggcaaggtcgtcccggggttcccaccggtgtacgccattggcccactcatgtcgcagcaacactcagttgacgaaggtgggaaggaagaaggatcgggctcccccgttgcctggcttgacgagcagccagcgcggtctgtggtgtacgtcgcgttcggcaaccgctgcgccgtgagccatgaccagatcagggagatcgccgccgggctggaggcgagcaactgtcggttcctttgggtgctcaagaccacaacggtggatagggacgacagcgccgtgctgacggaattgctcggcgaggggttcctggagcgagtgcagggtcgcggcctcgtgaccaaggcgtgggtggaccaggaggccctgctgaagcacccggccatggggctgtttctaagccacagcgggtggaactcggtgaccgaggcggctgccgccagcgtgccgctgctggcgtggccccgcggcggcgaccaccgcgtgaacgccaaggtagcggtgagcggtggggttggggtgtggatggagcactggagctgggacggggaggactggttggtgaccggggaggagatcgcgaagaaagtaaaagaggtcatgtccgacgaagcggtcagggcaaggacgacgaggaccgccgaggaagcggccaaggcagttgcagagggtggcaccagctaccggagcatggaggagtttatttccagcgtcaaagcaaccgtggcgtcttgattgcgtcgtggggctcctgatttccacaagtttgtgtcccctactcccctaccctaccttccactgatggggagtccggagttgtgacgtcgttgtcgtgtggctggttgcagtgtcaaccaaaacagttctcacacacgtgagttgttgggaggtaggtagcatgtactatcacgtacctaccccatcaagaatagtgcgtcatctgtcatcttgtgatgtcatcttgtaatgaaataaaaacagttgcatttt

SEQ ID NO: 26350 - DNA, 1285 bp, Zea mays
  Clone ID: LIB4171-003-H1_FLI
tcgtgatgcgcgaccgagagacgggccacggccgggggttcggcttcgtcgagtttgaggaagaggctgccgctggcaccgcgctcggcgacggggagaagctcaagcacttcctctgcggccgcatggtggacgttaagagggccaggacaagagctccacgaaaccagggcgagcagcactcgcagcctcagcaggctgagcaaggccggggtcaggggaaccaagacaatcagtcgcccgctggtaatggtaccgctgactgtggcaacagtgtgagctatgattcaaaaaaggtattcattggcggtttgcgggataatatcaccgagaaggagttccgggcttactttgagacgtttggcacggtaacggacgtcgtggtgatttatgacagcgcgacgagccggtcgagggggttcggtttcgtcacctttgattcggaggaagcagtggggaaggtgatgcggcagagctttcacgacctgaacgggaccaaggtagaggccaagattgctatccccaaggatgagcagtattaccgtaacagaggaggccatggtgctcgtccctttggcgggagggatcctgccgctcctggctatggagggttcatgtaccaaacatacaatgctagatctggcccctacaatggctacatgccccaacctgctcccacacatccctactttcctgccccctattttgctgcggggggctatccctatgggagtggatacccaggtcaaggcgtcatgccaaacattcctggcatggggcctaggcggggtcctccggcctatggaacataccctcaaatgtatccggtgtataacattatacatagagctggttatggtggtccagccacttcttttcagcatgaaattaatggtggaggtgattacaaaaaggatcaaacgaatgtagatatgcagcaagttgacaacactgctagcgttgcgacaaagttggaaaatatgaagctaggttgacaatgactttcaggactattacttctacaacgatgacactggagttagtctattgtttgggaacccgcaactgtgaagactttgagctgagagattctttggttgacaagtgcatcattagaattcttcaaacttacgtaccgttcctatccccactgcctgtaaaacagaaagcatgcgagtcgctggctggctgttgacctcacctcccctctcctctcctctcctcttgtaccaatgttaaattcttacgaccgtttaatgtatcttaatcagacaatccagaatcg

SEQ ID NO: 26351 - DNA, 1966 bp, Zea mays
  Clone ID: LIB4171-003-H6_FLI
cacgctcggcttggctgaagcggagagtttcctctgttcccccattccgtcgtgtcaccaccgccgccgccggagtgtgtcatcgccgattcgcctggtatggcagcaccgcccgggggagcggggatagtgtggcagacgccggccaacccgcccgagtcgcacgactacatcatccgcaacggtcggcgctacgtgaggccttactacttcgagttcatctcccatgtgaagaacagatgggctggaaagaccatcgttgacctcttcactgatgagttcaaagggcgttcccgcgattactatgttcatgcagtgaagtgtgggaggcttcaggttgatgggcaaatggttcacacagactatattgtgaaatcatcacaaaagataagccacttcttgcataggtcagttgctttgatcaattttgaaattattacccccactaaacaagtgttcgataatttcacttcataagttcaacatagattactccatacaaacaaatgttccaaagattaggagcagcataaatcttcacaattttctgcagatacattatcctttacatgcttatatcataaaaatggcaagtgaatcaacaggtaagtaacagatgttttggttaatgtctcaatttgctctttctattggaattatttttagaatatcaataaaatattagttatactgatgaactgttgttgattccttgacttctaagttaatgatgtcatttagtttaactttgtgtgccattttaccttcatgtagttctctagttaaccagatacttcctgtggcatgcagacaggaacctagaccctctgtgttctgacttaacaaaaataattcacatgtctttttctcatttacaaatttttagttcaagtctttttctaaaggtgtttttttcttccaggcacgagccacctgtcttggcgggtgatatttcaatacttaagaatgaagttgatgtcgtaactatttgcaaaccagcttctgttccagttcatccatgtggtcaataccgcaagaatactgtagttgggattctgcaggcagagcatgggttaacacccctatttcttttgcagcggtgcatcggttagatcgtttggtttcaggcctccttatatttgcaaaaaatgccgacagagctgaatgtttcaggcaacagattgaagctggtctgctgcaaaaagaatatgtggccaaggttgttggggtttttcctgatggtgagcaaaccgtcgatgccaatgtaaatttcaacgcacgggaaggaaggagtaccgtggagattagtggtggtgctggtgaagaaccaaatggaaaacaagcactcactaggtttcaaaggatttgcacggatgggactcacagtattgtcttgtgcaaacctgtgactggtcgaactcaccagataagggtgcatctaaagcaagctggttatccaatagctaatgatgagctgtacctatcggggaacttttgtccacgatcaacaaaaggaacaaatgccagtaaaaaaattgcaccatcagatccagacagtagtgctgctgatcatggcagcaaagatgcaggaacggatgtggagtttgatatcgaccccatgtgcacaaactgtccaaatcttgctccagtaggttatgatagagatgaggaaggactatggttgcattgtgtgcggtacactggtcctgattggagctacgaatgtccttatcctgattgggcgttccttggtagcgtgtcaacaaagaagatgaagtcatgatgtagttcatggtgattggtgaatagtaagcccataaaaaaactgaacaatcaaatagtattgttttggcgttacctatgactgggcttccgaggttttcattcaaatcaaacacattagatccggttttcctcggcttctcattcagccaattcacggttcaaaatccactccttaaaattc

SEQ ID NO: 26352 - DNA, 1630 bp, Zea mays
  Clone ID: LIB4171-005-C4_FLI
cttctcggcgtctcctctgattccttcctctcctctcgccccacgcccctctccatctgctcccgctccgcctcgcctagggttttgcccccaaacctagcctcccccgaatctcccacgccatggacgtcgagggcgaggtccccgccgccgccgcggcggcggtggcgaacggcctgggcggcgcgggcgcggaggaggcctctccggcgccggtctcggctgagcagctcgacgtggaggcgtacgcggcgcagtactcggggcggacccgcctcgtgcgcctcctctttgtcgccgaccggtgcggggtggaggcgatgcagctcgaggcgctgcggatggcttacgacgagatcaagcgcggggaggacgtgcagctccaccgcgacgtcgtcaccaagatcggcggccgcctcggtccgcgctacggcctcgaccaggcgtgggtcttcagcgtctcccgccgcgccgaccagcgcaaggagaagctcgagagcgagctcaatggatacaggactaacttaatcaaagagagcatcagaatgggctacaatgacattggtgatttcttctatgcccatggccaactttcagatgctttcaaaagctacatcaggactcgggactattgcaccacttccaaacatatagttcagatgtgcatgaatgtgattctggttagcattgagctggggcaatatgcacatgtttcaaactatgtcagcaaagcagagcaaacccccgactctctggatcctaccattgttgcaaagctgaaggcagctgcaggattagccaacttggaaacaaagaaatacaaatttgctgctcgtaagtttgttgagacaggaattgaactaggaaacaacttctctgaagtcatagctcctcaagacgtggcagtctatggtgccctttgtgcacttgcttcttttgaccgttcagacctgaagagcaaagtcattgacaatatcaacttccgtaactttctggagctggtgcctgaagtaagggagctggttaatgatttttatgcaagtcgctatggatcttgcttgggtcatcttgagaagctaaagcctaacctgctcctggatatccatttgcatcagcatgtagagactctgtatatggagattcgccacaaagcgatcatacagtacacacttccttttatatctgttgacctcaacacgatggcagccgcctttaagacttcggtctccatgctgcagaaggagctggccgcactgattactgaggacaaaatacaggcccggatagactcccacaacaagatcctttacgcaaggcatgctgaccagagaaatgcaactttccagcgtgtccttcaaaccggcaatgactttgagagagatgtcaagtccatgcttctgcgtgccaacctcctcaagcatgattacattcagaagacaagcggaccaaggaagatgtaaagattgcgggcgtcgctgctaggcaaggcttcctgctgcatgcctctccacttttttttttgaagaattgttctgtgacataaaagggaccgaagtctgtctaaatgccctccccctctttctttttattggttgatgaaagttattgtcgaagtaatgtatggttgagc

SEQ ID NO: 26353 - DNA, 1422 bp, Zea mays
  Clone ID: LIB4171-005-C5_FLI
caccataaaagaaacgtgacacataattgatgctgtttgtattgagatattttgcaggctcaaacagtttacggagcgcttcatgccttggagacatttagtcaactgtgcagctttgacttcaatgcaaacctgatcgaacttcattcagctccatggactatcctggacgctcccagattcccttaccgagggctcctcatcgatacttcaaggcactatcttcctgtcccagtgataaaaggtgtgatcgactcaatgaccttcagcaagctgaacgttcttcattggcatatcgtggacgagcaatcgtttccgctcgaaatatcttcctacccaaagttgtggaacggcgcttactcttattcagagagatatacagttgatgatgcactcgacatcgtacagtatgctgaaaaaagaggcgtgaatgtcttggctgagattgatgtacctggccatgctctttcatggggtgtcggatatccatcattgtggccatcagctacatgcaaagaaccgcttgatgtcagcaatgaatttacatttcaactgatcaatggaattctttcagatttcagcaagatttttaagttcaagtttgtccatttgggcggagatgaagtaaacacaagttgatgcaacatagcatgaatgaatctgatgcctacagatattttgtactgagagctcaaaagatagcgatatcacatggttatgacatcattaactgggaagagacatttaacaactttggagacaagctggatcgcaaaacagtggtgcataactggcttggaagtggagttgcagagaaagtggttgctgctggtttgagatgcatcgtaagcaaccaggataagtggtacctagatcacttggatgctacatgggaaggattttacacgaatgaaccactgacaaatatctacaacccggagcagcagaaattggtacttggtggtgaggtatgcatgtggggcgaacacattgatgcatcagacattcagcagacaatttggccacgtgctgcagcagctgcagagcggctatggacaccaattgagaagctggcgaaggacacaagatcggtcactgcaagattggcacgcttcaggtgcttgctgaatcaaagaggggttgctgctgcaccactagctggttatggccgctcggcaccatcagaaccaggttcctgcttaaggcagtagatatttttcatagagtagattaataaacataattccaggcatccaatttacttctctgagcgattaaaaatagctcggatcgatgtaaggcgaacccgcagaatgttcctatttttctgatgcgctctattcatttggagatgtctggtcatgttttactttcagtgtaaggtcatgaatatcaagatttagtttcatacaccaatgaaac

SEQ ID NO: 26354 - DNA, 1642 bp, Zea mays
  Clone ID: LIB4171-006-H12_FLI
gtaaaatggaggtcgcgacggcgacggaggcgtctgcgccggcggcaagcggcggcgcggcggggcagggccacccgttcccgtggctagacgctgccatctctgagccctactacttcctgcatctcctcgccttcttctcttactttgcggcccgcagcgcggcgctctccgccgacgacggaggggagctccacgaccgcctcctccgtagggagatccaggcagtgctcgtgttcctggtgctcttcgtagtgaagattgtgaaagaggaaacctgggaagcagtaattgctgactcgttgctttatgcgaagggtttattgctggcagttactttggttattgattggtggctggcctttgcctactttctgggatttcttgttatatatgctgtagctcaacagccaccttatgatggcctaggccattcaaatcacttgaccccattgcaacttgaaagtttgctaactgaagagccaacatcacgattttggctggtatttctgtacatgtttttaatggaattctaatattgttatctcccaaatttccagtacattcctgcccgctttactattttgtcaagacttgtagcctgtaggtgcctacaattgttacaaatgtgtcactctcatcttatagaaggattagaggagcctgagaagaatttcatatggtttgatgggctgatggaaaccagttaaattccttgcccaactgcgcaacttgatttagagacacagttgctatataactttagtgcctatcattaaaaatatagtttgtctacttcgatagcaacggtatcaaaatctgactaccttatgaagtttggagtcttctcatttcttttggttagtgagggaacttgtagggggttcttttttaagaattgccccaaaagtttcttgcccataaagttaggtgtatgtttcaatttccctggttctttgatgactggatatttttatttcaatgcaaacaggtagaattccgaacttcattttcagcaaaatgtgtacaagcaagcagcattctgcctgaactttctatcgtgtactccaacaagaacatctcttttggaacaattgaccttgggcatttcccaaatgctgcagcaaagtttgggatatccatgtgggatcatctccccacttacatattgtttgacaaggtgactgaagtttctcggtttccagaaatcacaagtgaatcaaaagtatttgtgccaaaagttactaagaaacttctttgccagcattttgatctcgacagacgattgattggatacctatccacctgatctgacaccgatcccatatgcctcaaaggatggggacatctcccttttttgtcgctgaaccggacatctgtgtgtcagcagcaatcacttcaggggggtatcgtgagccttgtattattcggcgaactgcttattcccttttaattaaggcccagtaaactttgtggcggaaaaacacacacacacacacacaaccaatttctgtctaatctgtctgatactgaattatagaatttcactaccatgcagaggtttctgtaatgatttgccgactatgttttgtcacattgtgactgcagcagcagtcaattcagacagcatccacttccactg

SEQ ID NO: 26355 - DNA, 1401 bp, Zea mays
  Clone ID: LIB4171-007-B1_FLI
ggacgcacaaggacagcagagtgcaggaccggagcggagcgaccgagagtgtgtgggagagagatggcgtccagcgcctcgtctaccctgccgctgccaacgctctcgctcgccgtgatcctgctcgcgctgtgcgcccgcggcggcgaggccaggccgccaccgccgctccacggcgtgcgcccgctcgccttcgacgaggggtacacccagatcttcggcagcgccaacctcgcgctcctccgcgacggtaggcgcgtccgcctcacgctcgacgagtccaccggagccgggttcgcgtcgcaggacgtcttcctccacggtttcttcagcgccgccatcaagctgcccgccgactacgcggcgggcgtcgtcgtcgcgttctacctgtcgaacggcgacgtgtacgagaagacgcacgacgagctggacttcgagttcctgggcaacgtgcggggccgcgagtggcgggtgcagaccaacgtgtacggcaacggcagcaccgacgccggccgggaggagcgctacgacctcccattcgaccccaccgacgacttccaccactactccatcctctggaccagcgaccgcatcattttctacgtcgacgagaccccgatccgggaggtggtgcggacggcggccatgggcgcggcgttcccgtccaagcccatgtccctgtacgccacgatctgggacggctccgcgtgggccacgctgggcggccggtaccgcgtcaactacaagtacgcgccgttcgtggccgagttcgccgacctcgccatccagggctgcgccgtcgaccccgccgccgaccacgccgtggcgtcgtgcggcgcgggcctgggcctgggcctgggcccgggcccgctcgccgtgtccgcggagcagcgctcggccatggcggcgttccggcgcgcccacacctcctactcctactgccacgaccggcggcggtaccccgtcgcgctgtcggagtgcggggccggcgcggggctcctccccggccgcatgtttggccccgacgggatgaagcagcaccggcgccaccggggcgcggcgcgcggccaccgcggcggcgcccaggacgacgacgtcatgtgatcgccggtccctggcccctcgccacgtcgcggcggcggggcggggatggttgcacgctgtggattggattggattggattgggttgggggggttgggcggggattgtccgggatggaaaagctcgcctcattgtaccattcgcgccatggaagtaggtcgtgtttattgcctgtggtgggacccatgtccgtgccaacgccaattgccagccgcgtagccgttgatgaagaaaaagccattcgcttggccgctctttaccttgtagcgttaaagggtaaggtggtgtttgggaacat

SEQ ID NO: 26356 - DNA, 1890 bp, Zea mays
  Clone ID: LIB4171-007-H12_FLI
gacgaggtcagctgcctccgcggctccctccttcggtcctttgacgcttcaaggagacatcgctccagcgcccctgagctgtccttggtcaatgggagtggctgaggctggcgtgcggacctaaaatccccactgatatcaaggcaactgcgcaagcaatctccctgcccctgctcattggtcagcactcagcaccagcagcaacagcagctgctggagtgctgttgcgttctcctcaagcgcaactgtgcaaggactgctggagtgcaagcacagttctgcttccactacttgaagtcgactccctcccactccagtctccaggccaggggagagccgcattggcagcttgcctctgcccatgcccaggcattggagctcgtccccaatggcaatgcgtcaccagttcggggcttcggtgctgctgcatctactggtgttagcgggggcgggggccatggtcactgctgaccaggagagcgaccggatccgcgagctcccgggccagccgccgaacgtggggttctcgcagtactccggctacgtcaccgtcaacccggcgcgggggcgcgcgctcttctactggctcgtggaggcggtgccggcggccgggcccatcgcgccgctcgtcctctggctcaacggcggccctggatgctcgtcagtcggctacggcgcgtccgaggaggtcggcccgttccgcatcaggccggacggccagactctctacctcaaccccaattcttggaacaaggcggccaatttgctcttcctggagtcgccggccggcgtggggttctcgtactcgaactcgtcgctggatctgtacaccgcaggagatgcaaagacagcactggatgcctacgcttttcttgtgaactggttggagagattcccacagtacaagtacagggagttctatattgctggggaaagttacgcgggtcactacgttccacagttagcccagctcatatatgaaaagaacaagggcattcagaatccaacaattaatttcaaaggattcatggtgggcaatgcagtcactgatgactaccatgattaccttggtacctttgagttttggtggactcatggtctgatctctgacaagacttatcacaacttgaaggcgacatgtttgcttgaatcctcacagcacccttcacctgactgtgtcaagaacttgaatctagccagtgctgaagaaggcaatattgatccttatagtctgaatacaaagccatgcaatgacaccgcctctctcaagcttggcttgggtggacgctacccttggttgtccagagcctatgatccttgtactgaaagatatgcaagtatttactacaacaggccagaagtgcagatggcattgcatgcaaatacaactggaattcattacccttggcaaacatgcagcgatattgttggatcctactgggctgattccccaagatctatgcttccaatctaccaagaactgatagcagctggtatcaagatctgggttttcagtggggacacggatgctgtagttcctgtaactgcgacaaggtactcaatagatgctctcaagcttccaacactggtaaattggtacccttggtatgaccatgggaaggttggaggttggagccaagtttacaaaggactaacccttataaccatagcaggtgcaggacatgaagtgccactgcaccggcctcgacaagctttgatcatgttcagacacttcttgcagaacaaaccgatgccagcacaatagccagtcgaagcagaaatatagtgtaaactaccacagtcatgtttaatattttttaaattcttttttacttgatttgattgttattgttacaacatattgttcaattatctcgattgaatgtatgt

SEQ ID NO: 26357 - DNA, 1598 bp, Zea mays
  Clone ID: LIB4171-009-B10_FLI
gcaaagtcgcgccgccgtcgcctcgcacgcacgaacgccatcacttcggcgcttacccatcagacagacaaacaaggccaaaactccacgacgtcccccgctcggcagcagcaacagccgagaccctagcgcagcatggcttggacaactgcggccacagtgtgctggcgcctgctccacctcccctccgcccgctgccctctctcgtcccgggcccggtgttccgctgcgcagagcccagacgccgtggacaaggagtacgccgacctcaacctccggcctctgtaccccaacaggggccatcacatgcgcatacggcagcacgtgaacccgctcagctcatccttctcggagcccacggggccgccagagtggaaggaggtgttcgacgaccccttgcttcccctcatggtcgacatcggctgcgggagtgggaggttcttgatttggcacgcgaagaattctggcaagagtcagaactaccttgggctagaaatccgccaaaagttggtggagcgggcacagttctgggtgaatgaattggagcttatgaacgtctattttatgtttgcaaatgcaacagtgtcttttgagaaaatcatatcgtcataccctggtcccttgtcacttgtttcaatactgtgtccggatccacacttcaaaaagaggcatcacaaaagaagagttctgcagcaaccattggtcgattcaatcataaataatctctgtttaggtggacaggttttcatacaatctgatgtactggaagtagctgtagacatgagggaaaggtttgatgggtactctggtattttggcacatgttaattatgttgatcaagatcttcagtgtgacaatgaaggatggcttctggacaacccaatgggaatccggacagagcgtgaaatccatgcagagcttgaaggagcaacgatatacaggagggtgtaccaaaaggttagagatgcttctttctagctgtttatcagctacagaagttgtccaaggagtaaggtttccaagaatgttcattgcatgtattccattaagagaagttgggaaaaaaaacaaagcatccaagtacaaagcctggcgaaccaaaacaaagagaagcccaagcagtaacacctgatgtcttcctgcttgaaccatgccacaagttgcctttactacatcaagctgcattacatttctgacagtgcgcttgtgcacatctaatcttttttttttcacctgatgcaatgagtcagattagccaatgcttttgatgaagatgacaactggcataagtgttcctttgttggtcagattgtacttatggtgtttagcatcgggtgctgtcttcgttctgtccagaattcaggtctggaattgctcaccatctatcggtatgcagactgtttgtagaggcaatccagatgaggcaatttgatgtgcgctaggattgttcaaactttggtccgctcaacgttccctcgacttggtagatatacaagaatggacaacgttttcttgacttggtaaagtttggtcattagtttgtgaaacagaatgctgcattgctcttggcatttgataagtgacaggtgaataagacg

SEQ ID NO: 26358 - DNA, 2116 bp, Zea mays
  Clone ID: LIB4171-009-G1_FLI
cccaaatctcccatggcttcttcccctccccagccactcacccgcaccgtcctcgccgctaccctgctcctcctcttgcacaatgccgccgccagagccgacggcgcgtcgccggcggtgaacccattcacggcgaaggcggcattcatccgatactggaaccgcaaggtgcccaacaaccgcccgcacccggccttcttcgtcgccaaactctccccgctcccggccgctgactccgcctccttcccatccgcgctgcccgacatccgcgccagcctacccgcgctctgcaccaaagccgcgctcctctgccccgggccggctactactgatgcggcgtcgctgacatcgggccgcaggggcgggggacctttcaagggctacaacaacgccaacttctccaactacggcaccggcggcgtagcggggaccgactcgttccagaagtactccccggacctcaacatcgccgccgacagcttccgccgctacggccgggactcgtcgggacgcgccgacagcttcacctcttacgaggccgacggcaacgtcgtgaccgccaacttcacctcctacgccggcggcgccacgggtggttcgggctccttcgccgcctacgccgccgagaccaacgtcccggactccaccttcaccaactacgacgccgccgccaacggccgcggccggagcttcgcgtcctactcccaggaggcgaaccatggggagaacggcttctccggctacggcaagaacggcaacggcgtgcgcgagacgttcaagtcctacggcaatgagtccaacgtgctggcctccggcttcgccaactacgggcagtccgccaacggcgccacggacaccttcacgggctacggcgtggaggggaacgtccctgagaacaggttccggagctacggcgccggcggcaacgctggcgtcgacaccttcaagaattaccgcgacgacggcaacgtcggcgacgacaggttcacctcctacgccaagggcgcaaacggcggcgcggcggagttccagagctacggcaactcggccaacccgggcagcaccatcttcaagggctacggcgagggcaccaaccccaaccaccacattgggttcaaggagtacgccggcgagaacaacaccttcaagggctatgccaagagcggtgtggacttcaaggggtaccacaacaccaccgtctccagctccaccgccgcggtgctgacggtgtcggcggaggcagcggcatcgatgcatcacgagcacctgaagtggtcgccggagcccgggaagttcttcagggagcgggagctcgtggccgggaaccgaatgccgatgccggacatcagggacaagatgccgcccagggcgttcctgcccagggccatcgccgcgaggataccgttcgagcccaacgccgtgtcggaggccttcgggctgcccctcgacacggcgctggggaaggccgtggcgtccacggtggcggagtgcgagcgcgcgccgagcaagggcgagacgaagcggtgcgcgacgtcggccgaggacgtggtggacttcgcggtggaggtgctgggcgacgacatcgtggtgcgcagcacggcgtccacggcgggcggcggcgggcgcgtccagctgggcgccgtggccggcgtggacggcggcagggtgacgcggtccgtgtcgtgccaccagagcctgttcccgtacctggtgtactactgccactccgtgcccaaggtgcgggtgtacgaggccgacatcctggccgccgatggctccggctccggcgagaagatcaaccgcggggtggccatctgccacctggacacgtccgactggagcccggcgcacggcgcgttcgtggcgctcggcggcaagcccggcgaggtggaggtgtgccactggatcttcgagggcgacatgacgtggacagtcgcggactgatggagtgagtgacgttcctctctgcctgcttgcaagagcacacgactaagaagaactactaagaagaattattttctccctctctctttctctctctcgcaaattattatttttgtccactcctttctcgatctaccttatatgacgaaggtggtaagaattggtccaggag

SEQ ID NO: 26359 - DNA, 2408 bp, Zea mays
  Clone ID: LIB4171-010-B8_FLI
ggaagctgggccacaccctctcccgcatcgtcacgtccaagccgcgcttcgccttctcccagcccaggcctaggcccaggcccaggcccgcacaacccggtctgccttcctcacaacccgtctcgatcccgccgcagccgccggagcttccccccttcgtccccaccgccatgccgcaccacggcagccaccgcccgccggcgccgccgccgggtggccccgtgttcccgcgcgcaacgtccacggtggttcccgacccgtcccgcttcttcgcgccgccgctcctcgccgcgccgctccccaccaactccttcttccagaacttcgtgctcaagaacggggaccagccggagtacgtccacccgtactccgtccgctcccccggaggcgccgcactcgacatctgctacccttcgcggaaccactcgccgtccttcgtcatccagaccttcgtccccgacctcaccgtctccgacgccgccgggagcgcgcagcgccactgcgtctcggctttcgacgacctctccgtcacgctcgacgtctccccgtccctccgcgcacacctcgtccgcggatgcccgtacgtcaccgtcaccaccacggccggcgccgtcgacatctccgtcgcgtccgtccatgccttcctcgacgtcgcctcctgcgacgactccggcaccaagtggcgcctcgggatgaacagcggccagaccttcctcctctacgcgtcggccccgatccgcctcgcgcagaccaccaccacgcagctctccgcgcccggcttcgccggagccatccgggtcgcctacctccccgacgcgtccatggagcctgtcctcgaccgctacagccgctgcttcccgaccgccggccacgcggccctgaacaggcccttctgtgtcgactacgcctggcgcaaggacgggcctggggagctgctcatgctcgcccacccgctccacctccgcctgctcgccgaggactgccccgtgcgggtgctcgacgacttccggtaccggagcatcgacggcgatatggtcggcgtggtcggcgacgcctgggtcctgcgcaccgacccggtttccccgacgtggcactcgacccgcggtgttagcgaggacggcgtcgccgaggtggtggccgcgctgcgagtcgacgtggccggcctcgcgtccaccgcgataacaaccacctcgtcctacttctacgggaaggcgatcgcgcgggcggcgcggctggcgctgatcgcggaggaggtcgggtgccccgacgtgatcccggcggtgcagcagttcctcaaggccgctgtgacgccgtggctggacggcagcttccaggggaacggcttcttctacgacgccaaatggggcgggctggtgacgctgcaggggctcaaggactccggcgccgacttcgggttcggcatctacaacgaccaccactaccacctcggctacttcctgtacgccatcgccgtgctgtccaagatcgacccgtgctggggccgcaagtacatgccgcaggcctactccatggtggccgacttcatgacgctgtcgcgcaacaaggccggcgccagcttcacccgcctgcggatgttcgacctctggaagctgcactcgtgggccggggggctgacggagttcgccgacgggcgcaaccaggagagcaccagcgaggccgtgaacgcctactactcggcggcgcttgtggggctcagctacggggacgcgcacctcgtctccgtgggctcgacgctcaccgcgctggagatgctggcggcgcagacgtggtggcacgtccgggaaggggagggcatctacgaggacgacttcagcgggaacaaccgcgtggtcggggtgctgtgggccaacaagcgcgacagcgggctgtggttcgcgccgcccgagtggaaggagtgccggctggggatccagctgctgcccgtgctgcccatcagcgaggcgctgttcccggacgtggcgttcgtcaaggacctggtggcgtggacgctgccggcgctagcgagggacggcgtgggcgaagggtggaaggggttcgtgtacgcgctggaggggatctacgacagggaggcagcgctgaccaagacccgcgccctcaaggggcatgatgatggcaactcgctgaccaacctgctgtggtggctccacagccgaggcagcgtcgtctgtgacggcgacgctgggttcggccgctgctgctggtaccgccagtactgccactgacgaaagtgtggtgaccagcacgagtgtggttgttcatgtctgcttgcggagcagagcacgtagatcagtgaagggatggagttgatacgttgcaaagtcattgtggttgttattcgttgatactacacacttctatacagttgaataaagtcagtcctttatgtg

SEQ ID NO: 26360 - DNA, 1600 bp, Zea mays
  Clone ID: LIB4171-011-F6_FLI
ggaattcggaatcggggatcgagtacatctccacttcttcccaggcggccaggccctggcccgcggccgcaccgcaccgtagtttgttccttccgcaaggaagcgagagaaaatcgagtgaaaaggaaggggaaataaggctgaatcacagtttctggatcggaggagcatccccgcctaggtctctgcagccatggttcgcggatcgctcggcaagcttgcatcgcgcgccctctccgtcgccgggagatggcagcaccagcagctccgccgcctcaacatccacgagtaccagggcgcggagttgatgggtaaatacgggatcaacgtgcccaggggcgcggcggctgggtccgtacacgaggtcaaggacgccttgaagaacatgttccccagcgagaaagagatagttgttaaaagtcaaatccttgctggtggccgagggctgggaactttcaaaagcggactgcaaggtggtgtccatattgttaaggctgaggaagctgaattgattgcaagtaaaatgttaggccagattctgataacgaaacaaactggtccagagggaaagattgtgagcaaggtctacttgtgtgagaaactatctcttactaatgagatgtacttcgccatcacccttgataggaaaactgctggtccgctcattattgcttgcagcaagggaggaaccagtattgaagatcttgcggagaagtatcctgatatgattattaaggttcctattgatgtatttaaaggaatcacagatgaggatgcagctaaagttgttgatggtctagctctaaaggcagcggataggcagtcttctatagaacagattaagaagctgtatgaacttttctgcaagtgtgattgcacattgctggagataaatcctctggcggagacagctgacaacaagcttgttgctgctgatgcaaaattgaactttgatgataatgctgcatttagacagaaagaaatatttgcactgcgtgatacaactcaggaagaccccagggaggtcgctgctgccaaagcagatttgaactatattggtcttgatggagagattggttgcatggtgaatggagcaggattggccatggcgaccatggatattataaagttgcatggtggtacgcccgccaattttcttgatgtcggtggaagtgcatcagaggggcaggttgtggaagcttttaagatactgacttcagatgatagagtgaaggcaattctagtgaacatttttggtggcattatgaaatgtgatgtgatagcaagtggaattgttaatgctgccaaacaggttgacctgaaagttcctgttgttgttcggttggaaggcaccaatgtagaccaaggaaagaggattcttaaggaaagtggaatgactttgatcactgcagaagatcttgatgatgcggcagagaaagctgtaaaagcatccgtcaaataactagtgtatcaatctgaagtttctttttttttcactggtacaagatgagcagtgctcttttacggatttcgatttggagcagaagtcgtgaactgcaacgtttttgaagtagggttattttggccttgttttgctgtt

SEQ ID NO: 26361 - DNA, 909 bp, Zea mays
  Clone ID: LIB4171-011-G6_FLI
aacgctccgttgcctttcctttccccacttccccggctcccggctcccggctcccggctcccgccgccgacaccaccaaaaaccctagcagctccaccaccgccgccgccatggatgaccctcggatgttcccatcaggatccgacgaccgctccgacgccgaacgccggctgtacaacccgtaccaggacctcaacatgccctacagctaccggacgctctacgacctccccacttcgccggagttcctcttccaggaggaggccctggcgcaacgacgctcgtggggtgagaacctcactttctatacgggcgtcgggtacctctccggcgccgttggcggcgccgtcctgggcctccgcgacgccgccaggggcgctgagcccggggagaccgccaagatccgcgccaaccgcgtgctcaacgcctgcggcagctctggccgccgcgtcgggaatacgctgggcgtcattggcctcatgtacgccgggatcgagagcgccatggtcgcggcccgtgaccgcgacgactggatgaacagcgtcgccgctgggcttggcacgggcacgctcttccgcgccgccaacgggccgcgatccgccgccgtcgcaggcgccctcggtgggatcctagccgccgccgccgcggggggcaagcagctagccaagagatacgtgaatgtcatatgatcgtgttttttttgtggtagcaatgatgagcgaacaatgatatcgtctagtgctctagtagggaaggggtttgccttttctgagaacaagccctgaatgggaaattttgagcttgcattggaattgcaatgcaacatcgtgcttcaagatgctttagttctgctttgtccttatatgttaagggctagatgaaggtatttttatctccttgtttggatgc

SEQ ID NO: 26362 - DNA, 1534 bp, Zea mays
  Clone ID: LIB4171-013-D9_FLI
cgagcacacgcgcagagcgggggcgaaggcaagagcaaacagagtagccgccgccgccgtcgccgtcgtcgtcgtgtgtgtgtgtggagaggaaagaccgggttttgttttttacggcttagcgttgagcagctgagatgttgcgagcgctggcggcgaggtgctgcggccactggccgccgggcgccgcggcggcggacgggatgctgtggcaggcggagctgcggccgcacgcggcgggggagttctcgatggccgcggcgcaggccaacctggccatggaggaccaggcgcaggtgctggcgtccccggccgccacgctcgtcggcgtctacgacggccacggcggggccgacgcatcccggttcctccgctcccggctcttcccgcatgtccaacgcgtcgtgcaggagcaggggggcatgagcgccgaggcgattcggagcgcgttcggcgcggccgaggaggagttccataggcaggtgaggcaggagtggaggagccggccgcggctcgctgccgtgggctcctgctgcctgctcggggccatctccggggacacgctgtacgtggccaacgccggcgattcccgcgccgtgctcggccgccgagtgcccggcggcggggcggccgtcgccgagcggctctccgccgagcacaacgcggcgtgcgaggaggtgcggcgcgagctcgccgcgctcaaccccgacgacgcgcagatcgttgtgcacgccaggggagcctggagggtcaaggggataattcaggtgtcgagatccattggcgatttttatctcaagaaaccggagtatagcctggaccccttgttccggcaagttggggcccctattgcgctgaagaggccagctctcagcgctgaaccatcggttcaagtacgcaagctgaaaccaaacgacctgttcctgatatttgcttcagatggcctttgggagcacctcagcgacgatgctgcggtgcagattgtcttcaagaatccgagaactgggatagccagcagactggtgaaggctgccttgaaggaagcgaccaggaagagggaggtcaggtaccgtgatctgaggacgatcgagagaggggtgaggcggcatttccacgacgacatcagcgtcgtcgtggtctacctcgatggccaccgcgagcgtcgccacaccagggtcgttgactcgagcagcaactgcaccagtgcgcccgtcgacatccactcctccaactcccgctagtttccggagccccttgcaacgcgagctgaactctgggtgggaggtgaggtgggtgcagccgtagccatcggaatcggaacaagtcgatatgtacataggtaggactgggtgcgtggcattttgatgccggagaagatcatttggtctcgaaactacttagcacaagtggttaatgactgcatttttcttgtttctttttgtctgaaaccagcagcaagcccgtccattggatcggacttatttttaaggtaagaaatagttgatgacgaactggaggttggttaatggagacc

SEQ ID NO: 26363 - DNA, 1772 bp, Zea mays
  Clone ID: LIB4171-013-E9_FLI
ctgtcctcaacctcaagccgccacgcaccaccaacacacgcgcgctggcttcttcaacctcggttgctcgctcgcaacaagacacggatcgtcagagcaagagctctgctgacctgacgactctgttcttgttctcgtacggcgccggtgcctagcgtctgtagcctttttgtgtgtgtgttttttcgcccatatctctccccaccaccaccaccaacctagctcagccgcagttcacccgcgtcaccgcacgagtacacgagcaatccgcaagcgataacctgcaagctgaggggccagctgttttgctcacggagaaagaggttctagctagtcgttgatcagcacggacacaccatggtgaggccgccgtgctgcgacaaggagggcgtcaagaaggggccctggacgccggaggaggacctcgtcctcgtctcctacatccaggagcacggccccggcaactggcgcgccgtcccggccagaaccgggctgatgcggtgcagcaagagctgccgtctgcggtggaccaactacctgcggcctggcatcaagcgcggcaacttcaccgagcaggaggagaagctcatcgtgcacctccaggccctcctcggcaacaggtgggcggccatcgcgtcgtacctgccggagcggacggacaacgacatcaagaactactggaacacgcacctcaagcgcaagctgcagagcggcggcgacggggcggccaagccgccggcgcacaggccgccgtcgtcgtccaaggggcagtgggagaggaggctgcagacggacatcaacctggcgcgccgcgcgcttcgcgaggccctcaccccgctcgacgacctcaagccgcagctgcagcgcgacgccgccgccgacgcgccgggcgctggcgcgggcacgggcggcggtgacagcccggcttcgagctcgtctggcgcgtcgcagtgctcccctttggcgccagcggccgccgtcgccgcggggccgtacgtcctcaccgcggagaacatctcgcggatgctggacgggtgggctggccggaaggtccgcggcggcgggaccccgggcacccccggcggtgccgagagcgcgtccacgggatcctcggacgcgtcggaggtgtcgtacggtggcgccgccgtcgcatcggccgcgccggcgcccgcttgtggtgggccggtcttcgagtacgaggcgaagccgggcgtgccgacgtcccatcagcagatgccgctgtcggcgatcgagtcgtggctgttcgacgacgacagccacttccaccatgctgtccagagcgccagcttgctcgatgccgcccccatggattaccccttctagctctagtgtgtccaagcgatcaagctcaagctaatcccttcaagcaaggacgactgtgattacggcgctgtctcctaaagaaaactacacagatcctgcagtacgacgtcggtggctgattaatcggctagctaagctggttcagatcggtcgcttgatcaggttgtttacgtgggatctgcgtagttttcatttagattccaaagaacataagtagaaccacacttatgacgacgacggagtatgttcttgggccttttcttttactgttttctagccttttctcccaagtaaagcttgggggtacgtagtagatccgcttgtgcaagttgcatgttgtgtggaaaaataattgactccagtaatcctatgtcacatacatgtcataaattgtatcgctatctctaacatagcagatattttaagtt

SEQ ID NO: 26364 - DNA, 1681 bp, Zea mays
  Clone ID: LIB4171-013-G7_FLI
cctcgccgcagctcccaccattcccgcagacgccttgtccccttcccagctttccctccccaccccgccgcacgtccgcaagccccacgccaccgtcatgtctccgaccaccaccccgccgcccgcgcccgtggcagccccgacctccaagggcgccaagcgcagcctcatgtcctcgctcatggacgccactgcgctgctccgctcctcctctttcaaggaggactcgtacgtcgcggccgcgctcccggcgtccgagctccgcgcgctcgccgacctcaaggcgctgctcgccacccacccggaccccatctccatctggggcgtcccgctgaaccctcgctctcctcccgccgcggcggacgacaccgcccctgccccaacccccgtcccggtcgacgagcgcgccgacgtggtgctcctcaagttcctccgcgcgcgggacttccgcgtccgagacgcccacgccatgctgctccgctgcgccgcctggcgcgccgagttcggcgctgacgccgtgctggacgaggagctgggcttcaaggacctggagggcatcgtcgcctacatgcacggctgggaccgcgacggccaccccgtctgctacaacgcctacggcgtcttcaaagacagggacatgtacgagcgcgtcttcggcgacggcgaccgcctcgcgcgcttcctccgctggcgcgtccaggtcatggagcgtggcgtgcgcgcgctcaccctgaggcccgggggcgtcaacgccatcatacaggtcaccgacctcaaggacatgccaaagcgggagctcagagccgccagcaaccagatcctctccctcttccaggacaactacccggagatggtagcgcggaaggtgttcattaacgtgccgtggtacttctccgtgctcttctccatgatctcgcccttcctcacggagcgcaccaagagcaagttcgtcatcgcgcgcgagggcaacgtcgccgagacactctacaagttcatccggccggagctggtgcctgtgcagtacggcgggctgagccgcaccggtgacctcgagaacggaccaccgaagccggcgtccgagttcaccatcaagggtggcgagaaggtcttcctggagatcgacggtatcgaggccggtgcaacgataacgtgggatctggtcgtcgggggctgggacctcgagtacggcgccgagtacgtgccggcggccgaggacagctacacgctctgcgtggagaagacgaggatggtctctgccaccgccgaggagcccgtgcacaatgccttcacagctagggaagccggcaagatggtgctgtccatagacaattctggttcccggaagcggaaggttgccgcctacaggtactttgtgcgcaagtcgtcggcgtaggcctgctgatgtcttgtgaagttgtgatgtcttgtggtggtcgtcgcggccggcaccttgccggcaggtagccgcgagggggaggttaacgtggaacaactggtgaagtgtttacttgggcttgtgggatttggtggggagaggtcaagttaggctgtttaattattagtgctataacgacatgcatgtattatgccatatgtagaatataatgtactccgtaagagctgttgcacttttgtcatcaccactgttataaagctaatgatgagttaagttttttgggct

SEQ ID NO: 26365 - DNA, 1954 bp, Zea mays
  Clone ID: LIB4171-015-C6_FLI
gcacgaggcgagattagggggggagcgcaagtgcctgaagtaagcctaatcctaaccgccgccgtcatgacggcgcccaagctcaagctcctagctcttcctactctgctggtcctcatcctcctcctcctcctctccgccgcccggcggcgcgtccttctggagacgctcctcctccgcgccccggtcctcccgggcgacctcctcccgctcctgccctggcccgtggcgcagccgctgctccgccgcctcgcgctgcggggccccgccgacctgctcccggctttcgtcggggccgcgcgcgcgccggggtccgacgacgcctacccggtcgccgagtggaagggcgcctgcttctacgagaacagggcgtgggtggagttccgcaacgggaccggcggggggctcggaggcggcgtagtccatgtggagacatccaaagcacacagctggacttgcatagatctgtatgtatttgcaacaccatacagagttacatgggattactactttctggggcgagagcacactcttgatatcaaagaatgggaaagcgaggctgagtatgagtatgtgaaacgtaatggtgtgtccatcttcctcatgccatctggaacaattggcacacttcgagcactctgggatgtcttccctctgttcacaaatactgcatggggtgagaacgcgaatcttgcttttctcgagaagcatatgggtgccacctttgaggaacgcccaaaaccctgggtctcagagttaaatcctgatgatatccagtcgggagatttcttggttttatcgaagattcgcgggcgttggggtggttttgaaacactggagaagtgggttactggcgcttatgctggccatactgcggtttgcctgagggactccgatggaaagctttgggttggggaatctggtaatgaaaatgaacagggagaagatgttattgctatcctgccctgggaggaatggtgggagtttgaagtgacaaaggatgactcaaatcctcagattgcactgcttcctttgcatccagatctgcgggcaaaatttaatgagacagcagcttggatttatgcaaaaagcatggaggggaaaccttatgggtatcacaatatgatatttagctggattgataccatcagtgataattatccaccaccattagatgctcatgtggttgcttctgttatgactgtatggagcaagcttcaaccagagtatgctgctaatatgtggaaagaagcccttaacaaacggcttggaactaagggtcttgacctttctgaaatcatagtggaatcagagaaacgtgggataacatttgacaagttactatctgttcctgagaacgatagctgggtctatgaagatggtcagtcagcatcttgtgtggctttcgtccttatgatgtacaaggaggctggactctttgaccctattaccagctctattgaagttactgaattcacaataaaagatgcttatatcctcaacttttttgaggacaactcgacccgacttccggagtggtgcaacaaggatgacgatgtgaagcttcccttttgccagatcaagggcaagtaccggatggagctgcctggatacaacaccatgaaaccctatgcccacatgaacgagagatgtccatccctgcctccagattacaacaggactaagggctgctagtgctaaccagatatgcgtgtgcattttattcacgctcccttgtagccattgcttcagctgtaaatattatacatttatactagtataatagtactatgggggtatgtactgcttgcccttgagaagcgtgtattgattgtaggcaacttatgtgagacttcctcgaataaggaagaacatgaatcacacaaatgtacagtaaccatgcttgatctttttatcagtgtttacttatgtaacagtaaaaaatgtataatgt

SEQ ID NO: 26366 - DNA, 1562 bp, Zea mays
  Clone ID: LIB4171-015-E4_FLI
tagagcttagcatagtagctccacacgcgcacggaggtagtatagccgggagggggcacagagagaggagcgaacgagaggaaggagcagcggcaactacacgccagagagagggaaggggaggttggccagagagccgagagcagccctgcagtcgagagcatccgactgctagctactagcaatagcataggcagataagctcgggccgggccggggcacgcgcacaatgaggtcgcggcggtggcacagcgtggtcgccgtagcgctggcagcggcggcgtggtggtggtgcgcggcggcgcaggcgcaggcgcaggcgcaggcgcagctgagccagagctactacgcgtcgacgtgccccgacgtggagacgctggtccgcggcgccgtcacccagaagctgcaggagaccttcaacgcggcgccgggcacgctccgcctcttcttccacgactgcttcgtcaggggctgcgacgcgtccgtgctgctgtcgggccccgacgacgagcacagcgcgggcgccgacaccacgctgtccccggacgcgctcgacctggtcacccgcgccaaggccgccgtggacgccgacccgcgctgcgccaacagggtgtcctgcgccgacatcctcgccctcgccgcccgcgacgtcgtctcccagacgggcgggccgtactaccaggtggagctggggcggctggacggcaaggtaggcacgcgtgccgcggtgaagcacagcctcccgggcgccggcttcgacctggaccagctcaacaagctcttcgccgccaacgggctcacgcagaccgacatgatcgcgctctcaggtgggcacacgatcggggtgacgcactgcgacaagttcgtgcggcggctgtacccgttcaagggcgccgccgccggcccgccgatgaacctctacttcctgcggcagatgcggcggacgtgcccgctgaactacagcccgtcggcgttcgcgatgctggacgccgtgacgccccgcgcgttcgacaacggctactaccggacgctgcagcagatgaagggcctgctggcctccgaccaggtgctcttcgccgaccgccgctcccgcgccaccgtcaaccgcttcgccgccaaccagaccgccttcttggacgccttcgccaacgccatggccaagctcggccgcgtcggcgtcaagaccgccgccgcggacggcgaggtccgccgggtatgcaccagggtcaactagcccagctccagatgcaatgcgagccacgtccacgtgcacatgaagtgaagctagctagcgctagcctagctttagctagctcgttattactaggggccgggagcgttgggaaagaatgctcatgagtcatgtccatccatccatcacacggttcacagtcagtcacagtgtactattgattcgttggtccgccgattcttttcttttccttggtgattgttgtgtatgtagcagaagtaataataattaaaaaaccatgtaacaagaagagggatgagctccacacttgtattgcatccaatgtaaatgaatgccacggttcgtcgtc

SEQ ID NO: 26367 - DNA, 2141 bp, Zea mays
  Clone ID: LIB4171-015-G1_FLI
gcacgaggattctcttgctcaatacaacctccggcttcagcaagccgcagcgccaagcctagaagcggagcgcggaacacacgaggccaggaagaggaggtgctgccgtccccgcgccgccgctgtgggagtgcggggaatggggcggcacggcgtggaccagatcggcgctgtggcagcgttcgtctgggtcaccctccttcccttgctgcttgtgtgcgtcgtgtggccgggcgcccaggccggccatacaagcgagtaccggcgccaactcggctccgccatcgacatgccactcgacgccgatgtcttccgccctccctcgggctacaatgcgcccgagcaggttcacatcacacaaggcaatcatgatggcacagccatgataatctcatgggtgacaacaagtgagcctggctcgagtactgtgatctacgggacttcagaggataacctcaactatactgcaaatgggaagcatactcatttgacacaaagtattactatgctgttgggattggacaaactgtgaggaagttttggtttttgacccctccaaaaagcggcccagatgttccatatacactcggtctcataggtgatcttggtcagagctttgattccaatgttacgctcacccattatgagtccaatgcaaaagcacagggagttctttttgttggggacttgtcatatgcagataactacccatatcatgataatgtgagatgggatacgtgggcaagatttgtagaaaggagcgtcgcgtaccagccttggatctggactgctggaaatcatgagatagatttcgctcctgaacttggtgaaacaaagccattcaagccattcagccataggtaccccacaccctacaaggcttctggtagcacggcaccttattggtattccatcaaaagggcctctgcctacattattgtcttggcatcgtactcagcatacggcaaatacactcctcagtacaagtggcttgaagctgaatttcccaaggtcaacaggagtgaaacgccatggttggttgtcctcatgcatgctccatggtacaatagctataactatcactacatggaaggtgaaaccatgagggtgatgtatgagccatggttcgtgaagtacaaagttgacgttgtgtttgcaggacatgtccacgcctacgaacgcacagtaagcagctccatactatcaatttcttctgttgcaaatggttgggttatttttttccactctgctatggacttctgagagttatactaagtaggatgtcgtctttgtgcgcaggtgagattttcataggttgtaaacctaatgagtatacacactgaacctctaaaaaaacttctgagaattatgtgtatatatgtttgtcgtcatattagtgcaagcttccagctcaatttgttagggttcagtactctggttatgacagtatcataatcctaagtcttgatgctgattgatgttctctgattgcagcacaggatatcgaatgtcgcatacaatgttgtgaatggcctgtgcactccaatccctgatcaatcggccccagtttacatcaccatcggtgatggagggaaccaggaaggattggctaccaacatgtcgcagccgcagccgagctactcggccttcagggaggcgagcttcgggcacgccatcctggacatcaagaaccggacacacgcgtactacacgtggcaccgcaaccaggacgggagcgcggtggccgccgactccatgtggtttaccaatcggtactgggaaccgacggacgattcggccgacgatttccagtgaggacgagagctgcagctgggttggttattcgttgcggttcctcacgaccaataagcatcgccctgaatacacgaagcctccgaagctccgatgcaggcctctgccacttcttatagctctccttggtcgttgcccgtcttctcttggagagagaaaaaaacgtgtgaagagtaaaacggagtgtctctactctgattgtgtaaagaactcacgttcacagcatacgttgccggtcgcatgtcgacgtggtgtgtaaattgctaagcagcgtgtactagtcatctaggtgctgctcattggtcaatagtaccgtttcctcttcaccg

SEQ ID NO: 26368 - DNA, 1944 bp, Zea mays
  Clone ID: LIB4171-016-D9_FLI
gtggtctgccactgccagtctgccactgccaggcgccgtcctgcagagatggcagcggcgctgaggccgaggctgctcgtgctgctcgcggtggcggccgcggcgaccgggccgtcgtgcgccggcgccggccgcgtcgacctgtggccaatgccggcgtcggtcgcccgcggcgcgcagacgctcctcgtcagcaaggacctcaggctgtccacggccgggagcagctaccccgacggcaagggcatcctcacggaggcgttccggcggatggtggccgtcgtggagctggaccacgccatcaacgggacctactcccggggcgcgcccgtgctcgccggcgtccacgtcgccgtccgctcgcccaacgacgagctcaacttcggggtggatgaatcgtacaggttgtctgtgcctgccactggggatccgctgtatgcccagatcgaggctcaaacagtttacggagcgcttcatgccttggagacatttagtcaactgtgcagctttgacttcaatgcaaacctgatcgaacttcattcagctccatggactatctggacgctcccagattcccttaccgagggctcctcatcgatacttcaaggcactatcttcctgtcccagtgataaaaggtgtgatcgactcaatgaccttcagcaagctgaacgttcttcattggcatatcgtggacgagcaatcgtttccgctcgaaatatcttcctacccaaagttgtggaacggcgcttactcttattcagagagatatacagttgatgatgcactcgacatcgtacagtatgctgaaaaaagaggcgtgaatgtcttggctgagattgatgtacctggccatgctctttcatggggtgtcggatatccatcattgtggccatcagctacatgcaaagaaccgcttgatgtcagcaatgaatttacatttcaactgatcaatggaattctttcagatttcagcaagatttttaagttcaagtttgtccatttgggcggagatgaagtaaacacaagttgctggagtaccacaccacacattaagtcgtggttgatgcaacatagcatgaatgaatctgatgcctacagatattttgtactgagagctcaaaagatagcgatatcacatggttatgacatcattaactgggaagagacatttaacaactttggagacaagctggatcgcaaaacagtggtgcataactggcttggaagtggagttgcagagaaagtggttgctgctggtttgagatgcatcgtaagcaaccaggataagtggtacctagatcacttggatgctacatgggaaggattttacacgaatgaaccactgacaaatatctacaacccggagcagcagaaattggtacttggtggtgaggtatgcatgtggggcgaacacattgatgcatcagacattcagcagacaatttggccacgtgctgcagcagctgcagagcggctatggacaccaattgagaagctggcgaaggacacaagatcggtcactgcaagattggcacgcttcaggtgcttgctgaatcaaagaggggttgctgctgcaccactagctggttatggccgctcggcaccatcagaaccaggttcctgcttaaggcagtagatatttttcatagagtagattaataaacataattccaggcatccaatttacttctctgagcgattaaaaatagctcggatcgatgtaaggcgaacccgcagaatgttcctatttttctgatgcgctctattcatttggagatgtctggtcatgttttactttcagtgtaaggtcatgaatatcaagatttagtttcatacaccaatgaaacaaaaaaaataattagcatgtgttctaaagaaaggtgcttcaaaccttgcaagaaccaacattttagttcggatgttttaatggaaattgcatccat

SEQ ID NO: 26369 - DNA, 2134 bp, Zea mays
  Clone ID: LIB4171-020-E3_FLI
gcaatcgagaaaaacacaaaccgaaaaacctcctctacagtcccatctaggcgcccctcctcggctccgatccagtttcgccggcggccatgtcgcagccggcggcgacggtggccgcggcggcgcagccgcagggtcgcggccccgcggggcgccagggcggcctggggcagagcatcgcaggcatcgtgcggatggcggtgttctggtactttgcgtccaagttcttcgggcccaagcgcccacccgcggaccccgggatgctcatgtccaacctcttccagaagggcgagccaatggatatgtggatgtatttgtcagagaacgagaagttcaacgattttgctaatgaggatgcacttatttggcacgaggcaaacataccatatgcagtctggggacctaccagtactagaacacggtcattaacatactatccgtcagaggctctcaagcataatggctctttgtatgctcatgtttacttcgcccgttcgggttatcctgtggaccctacagatccagaatatgagcagaaatcttcgtttgggaggatccatcctgttgtggcattcttgccaaaatcaaaagctggtaaaaagaagagcttgcttggagattcagaagagcctgaagagaaaacaccgcgcaataaggagaataaagaatctgaggataaagatgagggtccgactgaatatatatcttattggaaaccaaatgtaacaataaatcttgttgaagatttcacacggtatcccaacaataatgtacctcccattgttgctccatatctgaatgtggatccagttacgggcgattattatcctacagtattcttcaatgagttttggctactgaaggataaattaatagcgctcaacgagactgtggaggaattgcccttaaaccttgaagttggtccttttagcatgaccaagtggcaattatttttacagattgagcagtccttccaggttcatcgtagttatggaagtatgcttgaaggcgaggctgatgaactcaagagggtttttcttgaaggaaatccttatcttcttggattgactatggtcgtttctctattacactccctgtttgattttctggccttcaaaaatgatatccagttctggaacaagaacaagtccatggaaggtctatcggcaaaatctgtggttctgaattttgtgtgtcaactagttgttttcctgtaccttcttgacaatgacacttcatggatgatccttgctagctctggagttggtgtgtgcattgaattttggaagattggaaaggcaatgcatattgaggttgatagaagtggaaaaattcccatgttgaggttccgagaccgtgaatcatatgcacagaataagactaaagagtacgatgccattgcaatgaagtaccttacctatgtacttttcctccttgtggtcggtttctctatctattcacttaagtatgaaaagcacaagagctggtactcatggatactttcttctatgacaagctgtgtgtacatgtttggtttcattatgatgtgcccccaattgtttatcaactacaagctgaagtctgttgctcatatgccatggagacaaatgacctacaagttcctcaacactataatcgatgacctttttgcatttgtcatcaaaatgccaatgcttcaccgtctctcagttttcagagatgatgttatcttcttgatatacctctatcagaggtggaagtatcccgtcgacaagaagcgtgtcaacgagtttggcttcgggggcgaggacgaaccggcagcccaggaggctgtggaaggaagtgattcagctgcagcaccccagctaacggaggccgggtccgagacgagtacggaggacaagaaaaccaagtgatctccagtcttcggatcatccaaatacaagcatacatctctgcaacacctgccttcccagccggcgtgaaatttcttttgctgaaactggatgctggactcttgcggtcttgtcttaccgagacgtgctgaccataagataaggcgtgtaacaagggacacgatagtcttttgtctagagcagcgggcgaacaggcacacactttcacaattacgtttccagttcgtcttttagcagcc

SEQ ID NO: 26370 - DNA, 1898 bp, Zea mays
  Clone ID: LIB4171-022-C12_FLI
gttcttttccgacgaagcagcagctgcaacgactccttaccaatcaaaccaatcccccgtcatcttcaagctccggggatctcagccgccaaatccgggccgtgctcgcgcttgggcatctgcggcctacgatggggagcgagtcggagcccgccaagggcctgttgccctacctgcagcgcgccgatgagctgcagaagcacgaacccctcgtggcgtactactgccggctctacgcgatggagaaggggctgaggataccccagaaggagcgcaccaagaccacgagctccatcctcatctccctcatgaaccagctcgagaaggacaagaaatcgttgactttggggcccgacgacaatcttcatttggagggatttgcattaaacgtctttgttaaagcagataaacaggaccgtgctggacgagctgacataaacactgctaaaactttctatgctgcaagtatattcttcgagattcttaaccagtttggcgagcttcaacctgatattgagcaaaaacagaaatatgccatctggaaagctgctgaaataagaaaagctctcaaagaaggccggaagcctgaagctggaccgcctggtggggataaagatgaagcacctgtcagtaccaccaccatttctcaagatatggggcaaagtccttccttcagcagtgtacaccagggcagtgaagcatcacctcgacctgtcaacatggttatttcccagcttctctttagtgtttgcgatttgcaatattttgacatggttacatagtttcgtcgaacaaaacagctttacttcttttttttttgaaatataattttgtgcacaggattttagtaggcgggatagcttttctgctgtgcagccaggaaataacgtccctcaccaaagtacagagttcaatgatcatccctctacccagttaccctattcaccgccaccaccctcacagtcccagcatccttctccatcacaatcttattcctctccctcgtatcaggcaacaacagattacccttcttctgattttcacaaaccatcccccaattattcaactcccggctacacaagcacagatttccctaccaatgaggtccacaaaccaccttccaattattccccacctccttacacaaggacagatcgcccttccaatgacggctacaatcctcacagcaatggtaaaccagatgtttcggcttaccctcaggcatatcaaccctcaccctacacatttgaccctcagcacaactctcaaaactactactccacggaagccccagctgttccatacaactaccctaatttccagtcatatcctagtttccaggacaacacgtcagcttctgttctgacgcatcagtcttcattctatcctgaaagtgatgatcccgcagctacatcacacactcctgcctcaaattcttctgtcccaacgcactaccacccaaccgctgactgttcacctcaagtcactcctccagctgcgccaccagctagccagtatagatatgatagcagttaccagcctgaagttgagaagattgctgaggcccacaaggcagccagatttgcggttggtgctcttgcgttcgatgacgtatctgttgctgtggatcacctgaaacgtgcactggatcttctgacgaacccatctgctgaaccccattagctctttgcaccaccgagctcttgtcagaagcatcatctgtacaaatacaagattggtataccaccatggatatattgccaggtcgcgtacatatgagaggggttaccacacaaatctaggagataataagcgagccgtgtgggcttttgaagtcacacttaaggaaaccttattgtgcaaaattcaattatcttattcagagttctgttctacgt

SEQ ID NO: 26371 - DNA, 1611 bp, Zea mays
  Clone ID: LIB4171-025-A1_FLI
gcacgaggcacacgtccacacaccacagaccacacgcacggtacagcctctccgcagctgcaggtgcctgctgttctccgacgagaccccaagaactcgccaacctatcccaattcccagccacccttccctctttcacaatgctggcctccgccgccaccgtcaagccctccaccgccgcggccgcggccacctgcaaggcggccttcaagccgctccacctccctcccctccccgccgccgccggcctcaggccgctctccctctccgtctccgcgcgcccgctgtaccgtcaggagcatgtcctggcatccgtggcggtggcggcggctgggcgcaacgaacgcgccacgtcccccgcgccgccgtccgccaccgctgacggcgcccggccgctggaggtcgccgcgccggcggagacgggtcggcgcgccaagatcggggtctacttcgccacgtggtgggcgctgaacgttatcttcaacatctacaacaagaaggtcctcaacgcgttcccgtacccgtggctcacgtcgacgctctccctcgccgccggctccgccatcatgctcgcgtcctgggccaccaggatcgccgaggcgccccagacggacctcgatttctggaaggcgctgactcccgttgcgatcgcgcacacgatcgggcacgtggcggcgacggtgagcatggccaaggtggccgtgtcgttcacgcacatcatcaagagcggggagccggcattcagcgtgctcgtctccaggttcttcctcggcgagcacttcccggcgccggtctacttctccctcctccccatcatcggcggatgcgcgctcgccgccgtcaccgagctcaacttcaacatggttggattcatgggggcaatgatctccaacctggcattcgtcgtccggaccatcttctccaagaaggggatgaagggcaagtccgtgagcgggatgaactactacgcctgcctctccatcatgtcgctggtgatcctcctgcccttcgccgtcgccatggaggggcccaaggtgtgggcagcgggctggcagacagcagtcgccgagatcggtcccaacttcgtctggtgggtggcggcgcagagcgtgttctaccacctgtacaaccaggtgtcctacatgtccctggacgagatctcgcccctcaccttctccatcggcaacaccatgaagcgcatctccgtcatcgtcgcgtccatcatcatcttccagacgcccgtccagcccatcaacgcgctcggggccgccatcgccatcctcggaaccttcatctactcccaggccaagcagtagccgcccttggcgcgcgcgtctggctctcaggcctcagttcagttcaccgccgaatcagctcggcgctcgaagatataacagattatataacttttgaggatatctacctagcttgtataatagtattattactagatcctctcttctttttttcgtattttcttttttcctaggactagcttattactagatcatttcgtcgtcgtgttttcactatgactatgatggcgtagagagagagagagagatggatccatctaaataaaaaaaaaggtaccggatcttgttttgtctc

SEQ ID NO: 26372 - DNA, 2206 bp, Zea mays
  Clone ID: LIB4171-025-A9_FLI
gggcgtcccaaaacaaatgccacctgctagagcgtcgtctcctttcctcccccaatccgccctttggcttcgctggcggcggcggcggctggggaaggcaggaatcccggcctttgcttgcgcgccactccgggcaccggctgcagctcgcagaaatggttagccagtagtatgtatgtgcattctgtatatatacaagagagcaatcatttctttggaaaatggcacttccactctgattgttaaatagggtgccttaccctgtggaaaggggttgaactgtatctgtaatctgacactccacatctccagctgaacaaaatggcctccaatggtaatggaaatctcaaatctgatattcaacaagtagagtcaacagcttcggacaatgttcaaggcgcaacaggcgtcaacactcttgctactcagggtgtttcacgacatgaaaagccgtggagcgggtttagggatttctggaatcgccttggtactggccccaagttaaagaagcttggtccctccacttcgttcaagtttcaacagatcgcacttcaacgtgatgagttctcacgttcgatccattcggacaaccatgttagccacgagcatttccagtttatccggaagatcaattgggaacaactgtgggtgatggctaggaactggataaaagagcctatgaatatggccctttttgtttggattgcttgtgttgctgtatccggtgcaattctcttccttgttatgactggaatgctgaatcgtgttttgcctagcaaatcaaaaagagacacctggtttgaagtgaacaaccagatcctgaacgcattattcacgctcatgtgcctctatcaacatcctcaacggatctacaactttgtgcttctttgtcgatgggagcagcaggacatcttaaggcttaggaagatatattgcaaaaatggaacatataaacctaacgagtggatgcacatgatggtggttgtgatcctccttaatctgaactgctttgctcagtatgccctgtgtggtctaaatgtagggtaccgcagatctgaacgccccgctatcggtgttggtctcactatttctgttgcaattggggctgcagcatttgctggtctgtacaatataatcagccctcttgggaaggattacgacacagagcatgcagataccgatcaagaagcacaaatccatgccacctcaaccgagagtggcagaccaacttcacggcttcagtcattcgagaggagatactctttcatccagagcgatgaacgccgtttcgtggagagaaggcctcagtgggttggcgggctaatggatttctgggaccagatatccattgcgtacttgtcacttttctgcagctgctgtgtctttggctggaacatgcagaggcttgggttcggtaacatgtacgtccacatcgcaacgtttctgctcttctgcctggcgccattcttcatcttcgtcctcgcagccggcaacgttgacaacggatccgttcaggtggcgttggtgctcaccggacttttcctgtgctttttcggtctactgtatggcggcttctggaggatccagatgaggaagagattcaacctccccgaaaacagcttctgctgccacaacccggacgcgtcggactgtttccactggttattctgctgctcgtgctcgcttgcccaggaagtcagaactgcggattactacgatatcacagaggacaggtcgcacacagggcaggtagttggtgaaagccaccgcataatgtccccgttgcagcgcgaagacggtctgcctcttttcaagtcgagcccaagctcgccgtacaggagcggcaacgctagtccgtcgatcttcatcctggagagcccgtcaccgtcggccccacgtaggtcgtctggttcgtcgcctcagggtggtggttcaccgacgatgggccatagggcgatgaaggcgccagttccatctgttcttcaaagagagagtggaccagatcatgcacaggggtgatccaatgaagcagctaccgcttgccagtccaatgagatatgtatatttttgtaaaggagatacatcgtcggcagatattttttttcctgtgctgtctttcttgttcgtaagaaatgtatagaccttcgagttctgttgtgcatttgagctccgtcatgcatggttgcttctgatgtgaggcacgatt

SEQ ID NO: 26373 - DNA, 2016 bp, Zea mays
  Clone ID: LIB4171-027-C11_FLI
aaaatcacctcccgcgcctccgcgatccttctcgaagactcgaaccgcctggaatcagaatcgccgttgtcgggaatcgctccgatgcccgcggcgatcgggaggcggccgcccgaacgccgggtctagacctcgcgtgcgatggcgaggtcgaggcctagggtttggctcgtggcgggctgcgccgccgtcctcctgtgggcctccgtcgcgcagctcgtcgccgtcggccgctttctcctccttttcggcctcgcgggcgacgccgatccctcgccgccaccttccgcgcttccgcccccgagaatatacacgagcaatggttatctgaagatatcttgtaatgggggtctgaatcagatgcgctcagagatttgtgacatggtggcagttgctcgtcttctaaatctcactatggttgtccccgaacttgacaagagatcattctgggctgatcaaagtaattttggagatatatttgacgtgaggcatttcatcaactctttgagagatgaggtgcacatcattgaacagtttccagagaagcttggtccaagagattcaaacattattgtacttgaaatgccacctgtgagctggtcagatgaaaaatattacttgcatcagatcctaccgctgttcaacaaatacagcatcatccattttaacaaaacagatgctcgcatagccaataatggtatcagtacagagcttcaattgcttagatgccgtgttaattttcatgcactgaaattcacacctcaaattgagggattagggaataaactggtacataaactgcgagccaagggatcatttgtagccttgcatttacgctatgagatggatatgctggcgttttctggttgcaaccatggcctttcacctgaagaagcccaggagctcaaaaaaatgaggtctggcagcgtctgcttcaagcatcttatctggtccaggtcgttcagaattgatcacagaccccataatcctctctaaaagatatgcttatccatggtggagagataaagaaattgattctcaagccaagaggtcgcaaggactatgcccacttactcctgaggaggcatcacttgttttgaaagctctaggatttcaaaaggatgctcttatgtacatcgcagctggtgaaacttatgggggagataggagactagaaccactacggtctgcttttccaaaccttgtacgaaaggagatgctgctagactctgaagttctgcatcaattccaaaatcactcttcccagatggctgcacttgacttcattgtatccacagctagcgatgttttcattcccactttcgatggtaacatggcaaagcttgttgaaggtcaccgaaggttcctgggttttcggagaagtgtggtgctagaccgccggaaattagttgaacttctagatctgtacaccaacaagacaatctcttgggacaattttgcatcttctgttcgggaagctcataaggaccgtgtagctcaaccatcctgcaggcgaaaacttgaaaacagaccaaaagaagaggattacttctatgctaaccccccatgaatgcctagccaattcaaccttgtgcagctaaactgagtttctggtttctgtaaggtgcccagatgtgagcgtgaaatcattaccaggcaggaattggcacccggttgttttgatgtcgtgttgtcgagggaccgaagccagatttacacagcccatcacgatcttttgacttcgcattccttattatcctgttgtataggtcagtttttagcttctgtattgattcgttcgctttccaacatgccaaaaggggcctgtttggagcatgtaaattttggtttgttgtctaccatttttcttcatcggtgtctaactcgtgctgctaggccgaagggttagctgtttcatcttttggttttgtttctctaattttacaaattcttagtggaattatcccctttttaaaactgtgctgtttcaatacaggagtgctgaacctgtctctc

SEQ ID NO: 26374 - DNA, 2292 bp, Zea mays
  Clone ID: LIB4171-027-G9_FLI
gtcatttgcttgctacactgacaggttctcagagcagaggcatccggcacccctgctcctgaacttgttgccgaggaggccacactcttgcgctgccttggcaatgggggaggttgttgctgcttcctccctggccctggtgctgctcttcttctgctcttgcgggcctgcaagcggccttctctcccccaagggtgtaaactatgaagttcaagctctcatgatgatcaagaactacctcaaggatcctcatggtgtactgaagaactgggaccaagactctgtggatccttgcagctggacaatggtcacttgctctccagagaaccttgtcaccggcttagaagcaccaagccagaacctttctggaattctctccccaagtatagggaatctgaccaaccttgagacagttcttctgcagaacaacaacataaacgggttaatcccagcagagattggaaagctaagaaagctcaaaacgcttgatctgtccagcaaccacttctctggagaaatcccaagctctgtgggccaccttgaaagccttcagtatttgaggcttaacaacaacacattgtctggtgccttcccttcatcatcaactaatttgtcacaccttattttcctggatctgtcatacaataatttgagtggtccaatcccagggtccctgacaaggactttcaacattgtagggaatccactgatctgtgcagcaaccatggaacaagattgttatgggtctttacctatgccaatgtcttacggactgaataacacacagggaactgtgattcctgcaaaagctaagagccataaagttgcaattgcatttggtgctacaactgcctgcatcagccttctgttccttgccgttggttcactattctggtggaggtgtaggcgaaaccggaagactcttttcaacgttgatgatcatcagcacatagagaacggcaacctcggaaatatgaagcggtttcaattcagagagctccaggctgcaacagaaaacttcagcagcaagaacatattaggaaaaggcgggtttggtattgtttaccgggggcagcttccagatggaagtcttgtagccgtcaagaggctcaaagatggtaatgctgcaggcggggaagcacagtttcagactgaagtcgagatgatcagcttagcagtgcacaggaacctcctcagactctatgggttctgcatgactgccagtgagaggctactggtctatccgtacatgtcgaatgggagtgtcgcgttgcgcctgaaagggaagccaccactggactggatcaccagaaagaggatagcacttggggcagcacgaggtctactttatctgcacgagcagtgtgatcccaagatcatccacagagacgttaaggcagcaaacatactgctagatgactgttgtgaagcaattgtcggggactttgggcttgcaaagctcctagaccaccgtgaatcgcatgtcaccacagctgtgcgcggaactgttggccacatcgctcccgagtacctctcgactggccagtcatctgagaaaacagatgtctttggttttggaattctgctgctggagctgatcactggtcagactgcactggagtttgggaagtcatcaaatcagaagggagccatgttagactgggtgaagaagatgcaccaagagaagcagctggacatacttgtcgacaagggcctggggagcaaatatgaccgcattgagctggaggagatggtgcaagtagcactgctatgtactcagttcctccctggtcacaggcccaagatgtcagaggtggtccggatgctggaaggcgatggacttgcagagcggtgggaggcgttacaacacactgagtcacacaaattcaaggtgcctgagttctccttcagccgctgccactctgacctgacggacgactcgtcactgttggtgcaagcagtggagctttctgggccaagatgacaccaacggagacggtctgtggcaagaagtatccagcagttgtttcccagtagaaaatgtaaataatacaaagtgaagcaactggtgctgcatcctgtcagaagtcgaagcaaatctcaatcagctgaactgtacaaagattaaaaaaagagcacaacctagtctaagcatggtacattactacatctacagattatgtaactgttggtagaataaggatagagcaatgtttccattttgtttgttattttcccctttgtattctattactgtagttatagtttgtaaaatgcaaaaacggtggcaat

SEQ ID NO: 26375 - DNA, 2376 bp, Zea mays
  Clone ID: LIB4171-027-H10_FLI
ctcttctaacaagtcgtcgcctcggcccggcttcgcccccctcggcgcgacgacctctcccccaggagagcctaccccctccctcattccccgcgcgacgaggccgcttaatggcgggtcgcggccggcctcggccgggctcgcaccaggctctcgtcgtcgccgccgtcatcctactcctggccgccgcgtccggggccggcgctggatcccccgatcggcccgcgccggggccgccgctgttcctcccgctcacgcgctcgtaccccaacgccagccggctcgccgcctcgctgcggcgcggcctcggcgacggggtccaccccaacgcgcgcatgcgcctccacgacgatctcctcaccaacgggtactacacgacgaggctgtacatcgggacgcccccgcaggagttcgcgctgatcgttgactccgggagcaccgtcacctacgtgccctgctcctcctgcgagcagtgtggcaaccaccaggatccacgatttcaacctgacctctccagttcatattcaccagtaaaatgcaacgttgattgtacttgtgacagtgacaaaaaacagtgcacttatgaaaggcagtatgctgaaatgagctccagcagtggggtgcttggtgaggacatagtgtcttttggcagagagagtgaacttaagccacagcatgctatttttggctgtgaaaattctgaaactggagatttgttcagtcagcatgctgatggtataatggggctgggtcgtggtcaacttagcataatggatcagcttgttgaaaagggtgtcataagtgattcgttctcattgtgctatggtggcatggatattggtggcggtgctatggtactcggtggaatgcttgctcctccagacatgattttttcaaactcggaccctctccgcagcccatattacaacattgagttaaaagaaatacatgttgctggaaaggcactgcgggtggaatcaaggatcttcaacagcaaacatgggactgttttggatagtgggaccacatatgcttatttgccagagcaagcttttgtggcttttaaagaagctgtgacaagcaaagtacattctcttaagaaaattcgtggccctgatccaagttataaggatatctgctttgcaggtgctggaaggaacgtctcaaagctgcatgaggtatttccagatgttgacatggtatttggaaatggacagaagctctcactcacacctgaaaattatttattccggcactccaaagttgacggggcttattgcttgggtgtattccaaaatggtaaagatccaacaacactattaggaggtatcattgttcgtaatacacttgtgacctatgaccgtcacaatgaaaagattgggttctggaaaactaactgttcagagttgtgggagaggttacatatcggtgacactccttcaccagccccttcaagtgatacaagttcagaacatgatatgtcgcctgctcctgcccctagtaatttgccagagtttgatgttggtctcatcaccgttgatatgtctataaatgttacttacccaaatttgaaacctcatctccatgagctggccgagctgatagctaaagagctggagattgactcacgtcaggttagagttatgaatattacgagccaaggaaattctactctgattagatggggtattttcccagcagaatccgataatgctatgtccaacgcaacagcaatgggtatcatatatcggttaactcagcatcatgttcagttgcctgaaaatcttggcagttatcagttgcttgagtggaatgtgcagcctttgccgagaaggtcatggtttcaagaacatgtagtctctatgctgcttgggattttactagtaattttggtcactttgtcagcctttttagtagtacttgtttggagaaagaaatttagtggtcaagcagcctacagacctgttgattcagtggtccccgagcaagaactccagccactataatccaaattaaagctgtttgacggaacaacatatagatgattctttggtagagatacccttgtgcgggggggttacgcatcacagcggcacgcatctgctgctggagtaagcccttctttgtatgtaacacaagctacaagtttacagaagaagcactgtatgattacatgacttctccattcaaaacttagaggtgttcataaactgtctagtgattcagatcaagagctcctctcttgtgcttacagtagaagaaggttttgttcatgtaatgtagattaagtagggggtagagaagaaactaggcacagccgcggaacgaaatggtgtaatatttattttagtgccgagggtatttgtcttcaaagct

SEQ ID NO: 26376 - DNA, 2539 bp, Zea mays
  Clone ID: LIB4171-029-B6_FLI
ccactcctctccggctcctcttcttctccaccacaccacaggcaccggcaccggcaccgcctcctccctccctcctgccaccgcgcggcaccccagccacagcacagcaatggcgggcaacggcgccatcgttgagagcgacccgctgaactggggcgcggcggcggcggagctggcggggagccacctggacgaggtgaagcgcatggtggcgcaggcccggcagccggtggtgaagatcgagggctccacgctccgcgtcggccaggtggccgccgtcgcgtccgccagggacgcgtccggcgtcgccgtcgagctcgacgaggaggcccgcccccgcgtcaaggccagcagcgagtggatcctcgactgcatcgcccacggcggcgacatctacggcgtcaccaccggcttcggcggcacctcccaccgccgcaccaaggacgggcccgcgctgcaggtcgagctgctcaggcatctcaacgccggaatcttcggcaccggcagcgatggccacacgctgccgtcggaggtcacccgggcggcgatgctggtgcgcatcaacacgctcctgcagggctactccggcatccgcttcgagatcctcgaggccatcaccaagctgctcaacaccggggtcagcccgtgcctgccgctccggggcaccatcaccgcgtcgggcgacctggtcccgctctcctacatcgccggcctcatcacgggccgccccaacgcgcaggccgtcaccgtcgacggcaggaaggtggacgccgccgaggcgttcaagatcgccggcatcgagggcggcttcttcaagctcaaccccaaggagggcctcgccatcgtcaacggcacctccgtgggctccgcgctcgcggccaccgtcatgtacgacgccaacgtcctggccgtcctctccgaggtcctgtccgccgtcttctgtgaggtcatgaacggcaagcccgagtacaccgaccacctcacccacaagctcaagcaccacccggggtccatcgaggccgcggccatcatggagcacatccttgagggcagctccttcatgaagcacgccaagaaggtgaacgagctggacccgctgctcaagcccaagcaggacaggtacgcgctccgcacgtcgccgcagtggctcggcccccagatcgaggtcatccgcgccgccaccaagtccatcgagcgcgaggtcaactccgtcaacgacaacccggtcattgacgtccaccgcggcaaggcgctgcacggcggcaacttccagggcacccccatcggcgtgtccatggacaacgcccgcctcgccatcgccaacatcggcaagctcatgttcgcgcagttctccgagctcgtcaacgagttctacaacaacggcctcacctccaacctggccggcagccgcaaccccagcctggactacggattcaagggcaccgagatcgccatggcctcctactgctccgagctccagtacctgggcaaccccatcaccaaccacgtgcagagcgcggagcagcacaaccaggacgtcaactccctgggcctcgtctcggccaggaagaccgccgaggccgtcgacatcctcaagctcatgtcgtccacctacatcgtcgcgctgtgccaggccgtcgacctgcgccacctggaggagaacatcaagacctccgtcaagaacacggtgacccaggtggccaagaaggtgctgaccatgaacccctcgggggacctctccagcgcgcgcttcagcgagaaggagctcatcaccgccatcgaccgcgaggccgtgttcacgtacgcggaggacgcggccagcgccagcctgccgctgatgcagaagctgcgcgccgtgctggtggaccacgccctcagcagcggcgacgcggagcgcgagccctccgtcttctccaggatcaccaagttcgaggaggagctccgcgcggtgctgccccacgaggtggaggccgcccgcgtcgccgtcgccgagggcaccgcccccgtggccaaccggatcgcggacagccgctcgttcccgctgtaccgcttcgtgcgccaggagctcggctgcgtgttcctcaccggcgagaagctcaagtcccccggcgaggagtgcaacaaggtgttcctcggcatcagccagggcaagctcgtcgaccccatgctcgagtgcctcaaggagtgggacggcaagccgctgcccatcaacatcaactaaaagacgccaggcgccgccatccatgctgccgtccgcgcatggccggaggaggaggagaggaggaggaggaaaatacatgaaaaataaaacttgtacacgtgtatgtctccagattgtgccgccgtcgttctcgtcgttgacttttcgttgtattggtcgatccatatgtgtgtgcgtgtgtggcgatgttctttcttctttgtgtagctgccctgccaccgcctgcaatgcgcatgccatggcaggtagcgttgtctaagatcctatactgttgtattttggggtgaactacatcttacgtgctcaatttcttcttct

SEQ ID NO: 26377 - DNA, 2202 bp, Zea mays
  Clone ID: LIB4171-029-F12_FLI
gtcttgttgctggcgatgccttcatctttctaagaggtgatagtggggagcttcgtgtaggagtcaggcgtgccatgaggcagcaagcaaatgttccgtcttcagtaatatcaagccacagcatgcatcttggtgttcttgctacagcatggcatgctgttaacactgggaccatgtttactgtctactacaagcctaggacaagtccagctgagtttgttgttccctgtgatcgctatatggaatcactgaaacgaaattaccctatagggatgagatttaaaatgaggtttgaaggtgaagaggctccagaacaaaggttcactgggaccattgttggaaatgtggatcctgatcaagctggatgggctgaatctaaatggcgttacctcaaggtgaggtgggatgaagcttcctccattccacgtcctgaaagggtttctccctggcaaatagaacctgcagtcagccctccccctatcaacccacttccagtcacagacccaagagacctcgctctaatgctgtagcttctctgcccgagtcttcagctccaacaaaagaagctgctccaaaggtcacattagagactcaacaacatgccctgcaaaggcccttgcagacccaggataatgtggccccgaaaagtgtttttggtgataacagtgaattggactctgctcataagtcctccctgcgaccgtcaggttttgatctggacaagagcaccattggcatgcagaggaagctgggttcagatatttggatgcgaatgaacagacctgatggttacagtgaaatgttatcgggatatcaaccacctaatgaaggtgcacggaattcgcagggtttctgttctttacctgatcagattgccgctggacgtcctaatttctggcacactgtaaacgctcattaccaagaccagcaaggcaatcacaatctgttccctggttcatggtccatgatgccttcaagtactggctttgggatgaacagacagagctatccaatgatccaggaagtcggtgggatgtctcagagttgtacaaacaccaagtttgggaatggagtttatgctgcactacctggccgaggcattgatcgatacccatctggatggtttgggcacacgacacccggtggtcgcgtggacgatgcccagccacgcgtgattaagcctcaacctttggtccttgctcacggcgaagctctgaaaatgaagggcaactcgtgcaagctttttggaatccatctcgacagcccagccaaatctgaacctttgaagtctccgccaagcgttgccacaccggcagctgagaagtggatggcagacggaatcgacacagacaaaagctccgagccgcacaagacgccaaagcaactcggtgctacacagacacaggtggatcctgtcccagagagatgcccacaagcttcaagaggcacacagtgcaaatcacaaggcgggtcgactaggagctgcaagaaggtccacaagcaaggaatggcgctgggcaggtccgtggaccttaccaagttcaacggctacacggagctggtggcggagctggacgagatgttcgacttcaacggcgagctgaaaggctgtagcaaggagtggatggtcgtgtacaccgactacgaaggcgacatgatgctggtcggggacgacccctggaatgagttctgcagcatggtgcacaagatcttcgtgtacacgagggaggaggtccagcgcatgaacccgggcgccctgaactcgaggccggaggacagcggcctcgccaattcgacggagaggggctccgcatctactgctgctgctagagaggcacccggctaccagtccgcctcgtcgcttaactccgacaactgctgatgccttggcagctagctggtcgtcccaagtagtagagaacaaggcaaatgtatccatagatctccttgtagcggagcttaatgcctttttttcccctttctaatatgcattggatgagcccgtagcgcaccgtagtagtatctaaagctggtgttctgagttggttggaccttcctgcagttttggtttctccttctgatgtggcaagttttagctggtcgcacctacctaatgtatgcttagcaaacgaagtcccactaagcgctgtacataactgcccctccctgcatcaactctaatatatcatctgcttaatcgtc

SEQ ID NO: 26378 - DNA, 1371 bp, Zea mays
  Clone ID: LIB4171-029-H6_FLI
ctcgctaccccgaccgatgaaggcgtcgatcaagttccgcgacgacgagcggccgctggtgcgcgccaaggtgccgatcgtcgtgctggggctgccgttccagtcggggctcgcggcgggaagggacctgcgggagctccgcttcgacgtgtccacggcgttcgcatcgggcccggcgctccggctctcgtaccgccccaacgacccggcgctccccttcgcgctcgccgtgcgcgcggggctcggcccgctggggtccccggcacgcgcgcccttcgcgctcgccgccgagttcaacctcgtcgcccacgacccctcctcgtcgcccgccttcttcctccgcctcaagccgcggctcggcgacttctcgctctcccacacgctgcgctcccctgcggcggcgccagcgccacggaaggccggggagccgagctccgacggccggcgggaggtgaagcctctggactacatgccgccgttcacgttcaccgggagcgggctcgcggccgacgtggcggcggcggggaccggcagcggggtcggcacgctgctgtccggcatgcggctcacgaccaggagcgtgctcccgctgtggggccgggcgagcctgcggttcaactggggcctgcgcgtgccgccggagctgctcgccgccgacggcaagggcgcttgcgcgcccgtcagcaagatgccgctgctggtcatgagcaaggtctgcatcgagcagtccccgcgctccgtcacgggcaccaaggccggcggccgagcacctgcacccgccctggcctccacggacgcggcgtcggacggcgacgcggcgttctcgctggtgaggcggcagctggagtcgctgagcgtggacaacatgctgctccggcgcgccgtggaggacctccgcgcggaggtccgcagcagcaacagcagggccgcgccgcccgctgcttctgctgcggggcgtggcttgggcagggtggcggcgaccgcgccacaaatgcagacgcagacgcagccttaccacgtgacgaagccggaccaccgaccccggggcgccgcgagggaggctgcggccgcgccggacgacgtcggcgaggagctgaagaaggcgttggaggcccgcctgcgctgagcagccagccttggctgccaggccgcgtcgcgtgcgagcccggcagctcaccggcaccgctcgagtgaaggtgaagtgctagtgtcgctgttaggcgttgtaatctgttggtgtcagcagcaatttggagctgctgatttgatcgctgagaagaaggggatcggatttgtcttgccattccattctgtgctggatcaaggacttgatcaactaagaagcgcaaaagaaccaactttattacagct

SEQ ID NO: 26379 - DNA, 1932 bp, Zea mays
  Clone ID: LIB4171-031-B11_FLI
ctagttctagctagctagcaaagggggggaaaatggctccgcttctcgctgctgccatgaaccacgctgcagcccatcctggccttaggagccacctagtaggacccaacaatgagagtttctcacggcaccacctgccgtcttcttctccacagagcagcaagcgaaggtgtaaccttagctttactacacgatctgcaagagtaggcagccaaaatggagtccaaatgttgagcccctcggaaatcccacaaagggactggttcccctctgacttcaccttcggtgccgccacttcagcgtaccaaattgaaggtgcttggaatgaagatggaaagggggaaagcaactgggatcacttctgccacaatcatccggaaaggatactggacgggagcaattcagacattggagcgaattcgtaccatatgtacaaaacggacgtcagattgctcaaggaaatgggcatggacgcatataggttctctatctcttggcccagaatactgccgaagggaaccaaagaaggaggtattaacccggatggcatcaagtactacagaaacctcatcaacttgttgctagaaaacggcatagagccatatgtaacaattttccactgggatgtacctcaagcactagaagagaagtacggcggcttcctagataagagtcataagagcattgtagaagattacacatactttgctaaggtgtgctttgataacttcggcgacaaggtgaagaattggttgacctttaatgagccccagacatttacttccttttcctacggaactggggtctttgccccaggtcggtgctcacctggactagactgtgcctacccaactgggaattcactcgtcgagccttacactgctggccataacattctcctagcccacgctgaggctgttgatctttacaacaagcattacaagcgcgacgacacccgcatagggcttgcgtttgacgtaatgggtcgtgtgccatacggaacatcgtttctggataaacaggccgaagaaaggtcctgggacatcaacctaggatggttcttagagccagtggttcgtggtgactaccccttctccatgagatcattggctagggaacgactacccttcttcaaggacgagcagaaggagaagctcgccggttcctataacatgttggggttaaactactacacctcacggttctccaaaaacatcgatatctcaccaaactactcacctgtgctcaacactgacgacgcctacgccagtcaagaagttaacgggcctgacgggaagcccattggtcctcctatgggaaatccatggatctacatgtaccctgagggcttgaaggatctccttatgatcatgaagaacaaatacggaaacccacctatctacatcacggagaacggaatcggggatgttgataccaaggagacacctctacccatggaggatgccttaaatgactacaaaaggctagattacatccagcgccacatcgctactcttaaggaatcaatagacttgggatcaaatgtgcaaggctacttcgcttggtctctgctggacaactttgaatggttcgccggcttcaccgaacgttatggcattgtctacgtcgaccgcaacaataactgcacgcgctacatgaaggagtctgccaagtggttgaaacagttcaacgccgcgaagaagcccagcaagaagattcttacgccagcttagaaatcgggggcctcatgatgtgggtgcagcccataaaaaactggtgtgtggtttcgaaccgaaaattttctgtttttttccgccacgagaggttctggaggcatactctccagcaccgtggctaataacgcattgttccaattcagtctggccttgtcatgcatgcaataaataaagtgatgggtttccctgtttcaat

SEQ ID NO: 26380 - DNA, 1947 bp, Zea mays
  Clone ID: LIB4171-033-B9_FLI
ctggagttgagttgagctcacgctctcgcacactcgcactcccattcccaccggccagattgatcttgcttcgctaatcatcctagatctccattcccgcccatgggatgcttccagtcgaaggtggcggggcccctgccgccaaacgacgccgccgcgctccccgccgacaagcctgcagatcctgaggcggcgaatggcggcgccgacggggaaggcgacggtgacgacaaggaggctgtgaagcgcgcggtgccggtgttcagggagtttgcgctggccgagctgcgcgccgccaccaagggattcagcgccgacctcatcgtctccgagagcggcgagaaggcgcccaacgccgtctaccgcggccgcctcgacggcgggcggctcatcgccgtcaagcgcttctcgcgcctctcctggcctgacccgcagcagttcctcgcggaggcggcgggcgtcgggaaggtgcggcacaggcgcctcgtcaacctcattggctgctgcgcagagggtgacgagaggctgcttgtcgccgagtacatgcccaacgacaccctgtccaagcatctcttccactgggataagcagccgttaccatgggaaatgaggctgagggttgcatatttcattgcgcaagctctcgaccattgcaatgctgagaacaggaaaatctatcatgatttgaatgcttatagggtactttttgatgaggaaggtgatccccgcttgtcaagttttggattaatgaagaacagccgtgatgggaaaagttatagcactaacctggcttacactccaccagagtttctacgaactggcagagtaattccggagagtgtgatctatagctatggaactgtcctgttggatcttttgagcggaaaacacattcctcctagtcatgccctagatttaataaggggaaagaatatactgttgctgatggattcctccttagaagggcagtatgctaatgaagatgcttcgaaattggttgatcttgcatcaaagtgtctgcaatttgaatctagggatagaccgaacataaagtatcttctgtcttctgttggtcctcttcagaatcaaaaggaggttgcatcacatgtgttcatgggtattacaaaagccacatccgtactgccaaccatttgttctccactcagaaaggcctgcgctggtatggatctttcagcggtgcatgatattttgctcaaaacaggttataaagatgatgagggtgcagaaaacgagctatcctttcaagaatggacccagcaagtgcaagagatgctgaacacaaagaagtttggtgacattgcatttagagacaaggattttaagactgcaattgactactactccaagctagttgcgatgatgtcgacgccttcagctacagtttttgtcaggcgcagtttttcctacttgatgaatgggcaagcagagctcgctctacgggacgccatgcaagcccaggtctgcatgccagaatggcctacggccttctacctccaggccctggctctttcaaagctcggcatggaaaccgatgcccaggacatgctcaacgatggcgccacgtttgaggccaagaagcagaacggctggcgcagttaggagccgacgacgaacaaagtctctcttccaacgactccgtgccgttgccctttgagagaaaaaggtacaatggcgagtctcctccaaatcagttcactgggacacgcctgttgcactactagtagtgggattgaaacgcactgttttatcgtgcaatctcctctcgaatgtcggtaacgagtgatgatcatgatcaggggtggaaaaataggtcagggcctttgaacgcatactcttccgtgggttgcgctttgtgttgctggcgatggtggcaggatctgcctgattgttgcaactgcagttgtaattaaagggatgctttctaac

SEQ ID NO: 26381 - DNA, 1712 bp, Zea mays
  Clone ID: LIB4171-034-A3_FLI
ctcccccacttacgcttgcgctgccaagctctccgaggtccaacaatggctgcgctgctctatctccatccctatctcgcggttcttccgcttctgatctccccgatctgctctggcgcttcgccatggcgaaccatgaccaccggctcgcacatgagaggagaggaccacgacaaggtcaccctcctctcgcccgactctaccttctcctgcggcttccacgaggtgggcacgaacgccctcaccttctccatctggtacacccccagcgccagcgccagcgccaccgagaggaccgtcgtctggacggcgaacccctactccgcagagcgaggccagcactctccggtgaacaagtacggctccagactgtcgctgaaccgcgacggcaacctggtcctcacggacaccaacggatccacggtgtgggagaccaagacgtcgtcgggcaggcacacgacggccgccctcctcgacagcggcaacctcgtgatccgcgactccagcagcggcaacaacaaggtcgtgtggcagagcttccgctcgccgaccgacaccctgctccccgggcaggagctgaccaaggacacgaggttagtctccggctaccaccacctctacttcgacaacgacaacgtcctgaggatgctgtacgacggcccggagatcaccagcatctactggccgagccccgactacaacgccctcaagaacggccgcaacaggttcaacagcaccagggtagcggtcctggacgacctgggtactttcgtatccagcgacgggttcaggatagaggcttcggattcgggtccaggggtcaagaggaggatcacgattggctacgacggcaacttcaggatgtacagcttgaacgcgtcgacgggggcgtggcgcgtcacggggcaggctgtcatacagatgtgctatgtgcatggactgtgtgggaggaacgggctctgcgactacctgggtggcctcagatgcagatgccccccggactacgagatggtcgatccgacgaactggaacagaggatgcaagccgatgttcttgacgactgacgacggaaaccaatcacacgaggaggagttcacgttcgttgagcagcctcacgctgactactacggcttcgacctgtcctccaacgagtccgtcccgttcgaagcctgccgggacatgtgcttgaacagcagcgcctgcttgtcgttcacgtacaagggcggggatggctggtgctacactaaaggcctactctacaacggccaggtgttcccgtacttccctggagacagctacatgaaggtaccaaagagtttcaacagctcggcggcctactcatcgatctccaaccagaaagaagccctcacctgtgggccggcgggttctgctgagctgatgctgggaccggcgagcatgtacggaacaaagaaggacaacatcaactggacatacctgtacgtcttcgctgcagtgctgggagctctggagatgcttgtcatcgcgacaggctggtacctgttcttcaacaagcacagcatacccaaatcgatggaggacgggtacaagctggtcacaaacccttggatgaatacattctaggatgcctaaggaacatctctgccaactagttttggcagattccttgcaagcatgaagtttgggaattttgcctcttcttgagaaaaccccaaacaatgagatggtttttt

SEQ ID NO: 26382 - DNA, 1588 bp, Zea mays
  Clone ID: LIB4171-034-B7_FLI
tggcgtaggcccagggagatctagctagagtttcccgcatcggcctccgccacccaccgccgccgccccgccccgccccgccaaaggaacggaggatggaagccccgggctcgccctacgcctcctcgccggaatccgcccccaagcgtgcccctcgctccccaccgcagcagcagcctccctccgaggaaggagatgacaaggagaaaccaatacatttgaggtttctggtgtctaatgcgtcagcaggatgtatcattggcaagggtggatcaactattaatgactttcagtcccaatctggggctcgtattcagttatcacgtagccatgagtttttccctggtactaatgacagaatcatcatggtttctggactgtttggtgaagtaatgaaggccatggagttgattcttgagaaacttttggctgagggtgaagaattcaatgaagctgaagctagacctaaagttagacttgtagttcctaacagctcttgtggcgggataattggtaaaggtggagcaacaataaagtcatttattgaagaatcacatgctggaatcaaaatttcgccacaggataacaattatgttggtttgcatgataggcttgttacagtcacaggaacctttgataatcagatgaatgcgatagatttgatactgaaaaagttatctgaggatgttcactacccagctaatttgagctccccatttccatatgcaggtcttactttcccaagctaccctggtgttcctgttggttatatgattccgcaggtgccatataataatgctgtgaactatggacctaataacgggtatggaggaaggtaccaaaacaacaagcccagtacacctatgagatctcctgctagtaatgaagcccaagaatctctgaccattggtattgccgatgaacacattggtgctgttgtaggacgtgctggaaggaacataacagagattattcaggctagtggtgctcggatcaagatatcggataggggtgacttcatatctgggacatctgacaggaaggtgacgattactggaacatcagaagctatccggaccgcggagtccatgatcatgcagagggtgtcagccagttcggagaggctatgataccagatatgtttgacggactgtgggggccgttgttgagtccgagcagcatgtttgatgcaagttattattgtttgttgcgttgcgccaatggtttagtcgaagatatatatgtgcagcgtttgaatggatttgggaatagggctgagttatatcccgtggatgccacaacaaggcaggcaggcgccgctctgtgctagtggctgagtaggttgacaattcgaaagggcatggttggaagctttcagcgtttcccattcattcttgtgtgcctctccggatggagatcctctgcagtgccatgtcggccagactgcgagcaaaagctgacttttctggcggacgaagataggagtagcatgcatctagctgtcttgtgaaagtactattatttatcaaaatacagaatcggtcctcaaactttggtacgttgttggctccctgaattcaagaaatcg

SEQ ID NO: 26383 - DNA, 1431 bp, Zea mays
  Clone ID: LIB4171-034-C11_FLI
cagacgcacgcaaagtcgcaaacacaccacacgccctcacaactcccatccatccgcttcttcgactccacatcgggagccgcaagcagaaccaatgacgacgacgacgaagcagctccggcgcgtgcgcacgctcggccgcggcgcgtcgggcgccgtggtgtggctgggctccgacgaggcctcgggcgagctggtggcggtcaagtcggcgcgcgccgccggggccgcggcgcagctgcagcgcgagggccgcgtcctccggggcctctcgtcgccgcacatcgtgccctgcctcggctcccgcgccgcggcgggcggcgagtaccagctcctgctggagttcgcgccgggcgggtcgctcgccgacgaggccgccaggagcggcgggggccgcctcgcggagcgcgccatcggcgcctacgccggggacgtggcgcgcgggctggcgtacctccacggccggtcgctcgtgcacggggacgtcaaggcccggaacgtggtcatcggcggcgacgggcgcgccaggctgaccgacttcgggtgcgcgaggccggccggcgggtcgacgcgccccgtcgggggcaccccggcgttcatggcgcccgaggtggcgcgcggccaggagcagggccccgccgccgacgtctgggcgctcgggtgcatggtcgtcgagctggccacgggccgcgcgccatggagcgacgtggacgaggacgacctcctcgccgcgctccaccggatcgggtacacggacgacgtgccggaggtgcccgcgtggctgtcggccgaggccaaggacttcctggccggctgcttcgagcgccgcgccgccgcccggcccacggccgcgcagctcgcggcgcacccgttcgtcgtcgcctccgccgccgcctgcgccgccatccgcggcccggcgaagcaggaggtggtcccgtcacccaagagcacgctgcacgacgcgttctgggactcggacgccgaggacgaagcggacgagatgtcgacgggcgcggcggccgagaggatcggggcattggcgtgcgccgcctccgcgctgcctgactgggacaccgaggaaggctggatcgacctccaggacgaccactcggccggaactgccgacgcaccgccggcgcccgtcgcggacgacttcatcagctgggcggagccgtcagacgcagagctggaaccattcgtcgccgtcgccgccgccgcaggtctcccgcacgttgcaggagtggcattagctggcgccaccgccgttaacctgcagggcagttattacccgcctatgcatctaggcgtccgcggaaacgagattccacgcccgttgttggatcatcatggcgacgcgttagaaaaggggcagggatcccaccgcacttgtaacagagaaacagaaaaagtaacaatgaaacgaatttcgtt

SEQ ID NO: 26384 - DNA, 1459 bp, Zea mays
  Clone ID: LIB4171-034-E6_FLI
cttccttgttcgaatccaagtaacctacccaaaccgccaaccccccaccccaaggaaggaaccctagtaccctacccgtgagaaccgccgccgcacaaccccggacgtggtggcaggcgaccgatccggatccatcatcccaagcttcctttctgtctcctcttcatccatctccacaaggataatcaaggaaggaaggccatggttttgttcgaacttgacccggacatcatccgatggggtcttcaccatctcctccccgctccggctggatactctcctcattgtcgcacccaaaccacccctaccacaccttgtacagcttttgctcgccctcctcatcagcccatcggagacatgggtacctcaagctccgttgagatcaaggtcgagcatgtcgatggggttgacaacgacgcgatcatcgcacaagccctccaggaggaattgtccaatgtcgccttcgccgaagcgtccgggccaacctctgccgctgacaatcaacaacattctgctgttctcacgcagcaatggcttcgcccacgcgccgtccatgtagaaccagcttctcaagaggcagggaccagggaggaacctttcagcacctgctcaagccctggagatgacaataacgtccaggacagccagcaatgcttgatagagctcatggataacttctctgtcattgacggtgaagtgggcaaaagattgaacaacatggttcctgttcctcatgttcctaaaactaatggagagattccttctgttgacgaagccatttcagatcatcaaagacttcttgacaggttggtggtgtacggtttggttgatctcaaggttaaaggagatggcaactgccagtttcgagcgctgtcagatcaattttaccgaactcctgaacatcacagatttgtccggcagcaagtggtgaagcagcttgaatcgcatcctgagatttatgcaggatatgtccctatggactacagggaatatctcaaaaagatgtcaaagagtggagaatggggtgaccacgttacattgcaggctgctgcagactcgtacggtgtaaagatcttcatcctgacatcattcagagatacatgttatattgagattcttcctgttgttgagaaatccagaagagttatatgcttgagtttttgggctgaggtgcactacaactccatatatcctgaaggagagttgccggttttggagtttgacaacaaaaggaaaaggtggtggcccttctagctaggattcccaggacagactagatagagcagctttaacagactgaggcctttctgttgggctatgtgacactgactgatgacgaaaacgagcccatgggtggtggacggaactgcattggccttgcgctccttgcccacgcgatagacatgtacagtgcgtagtagatggtactatttgcctacttggtaacccattctcagat

SEQ ID NO: 26385 - DNA, 1464 bp, Zea mays
  Clone ID: LIB4171-035-A6_FLI
caagagacgagcgtagtaactgtgagcagctagcacatgcatggcgtcgtcgcagctggtcgtcgtgtgcctgtttgtagcgtcggcggtgactgtgacgatgaacggtggcgcgcaggcgcagccgattgtgccggcgatcatctcattcggcgactccaccgtcgacgtcggcaacaataactacctgccgggcgcggtgttcaaggccgactacgcgccgtacgggcagggcttcgcgcggcacaaggccaccggccgattctccgacggcaagatcgtcaccgacatcaccgccgaaacgctcggcttcgagagctacgcgccgccgtacctcagcccgcaggcgtcggggaagaacctgctcaccggcgccaacttcgcctccgcggcgtccagctactacgacgacacggcggccatgtatgacgcgatcacgctgacccagcagctcaagtactacaaggagtaccagtcgaagctggcggcggtggccgggcgcgctagggctcgcgccatccttggcgacgcgctctacgttgtcagcacgggcaccggcgacttcctccagaactactaccacaacgcctccctgtcccgccgctacgacgtcgaccagtacaccgacctcctcgtcggcatcttctccggcttcgccaacgagctgtacaggttgggggcgcggcggatcggcgtcacgtccatgccgccgctgggctgcctgccggcgtccatcaggctgtacggcgacggcaagggagcgtgcgtgccgaggctcaaccgcgacgccgagaccttcaacgccaagctgaacgccaccgtcagggcgctcaagcggcggcacgccgacctcaagctcgccatcctcgacatctacacgcccctccgcaaactcgcacaagaccccgcggcttacggcttcgccgacgctagagggacgtgctgccggacggggacggccaagacgagggtgtacctctgcaacccgacgacggccgggacgtgccggaacgccagcagctacgtgttcttcgacgccgtccacccgtctgaggctgccaacgtcttcatcgcggagtccacggtcgacgcgggcatcgagctggtcacctagctagtaggaataaaggagacgacacacatctgcagatctgctcacatgtttccggctccatcgaaacagaactacgtacagtgtctggaatattaatatatagccagtgaaattaaaaattgcaccgtcggccctgcccttttcgtaatgttgtggagcagtttcctgttccatctgtagccgctcaccagtttcctgttccatccaagaaaacaacagtacaccttgaattgcctgtgaaattgcaccatctatctccctaccattattgtaatatcgttgatcatatactatgcgtacgtacgttttcctatatatgcataatataaggtgttcggtttccagggact

SEQ ID NO: 26386 - DNA, 1426 bp, Zea mays
  Clone ID: LIB4171-036-B4_FLI
ttccccttccccttcccttttcctctctcggactcggaccccaatggcgtcgtcgtcgaaggcgccgtcatcgcgccgttccgtcttcgacgccgtccacatccgctcggagttttccgcggccggcatctccgcccacttcatccctctcatctggaagtacgtacttcaaaaccctaggtgcagcgacctggatggcgttccgtcgctgccggcggccgcgtacgcgctcctccggcagaagttccggccgaccacttcgacgctaaccgctgccgcggactccaaggaccgcaccacgaccaagcttctcatctgcctgcagaatggggagtctgtagaagcagtggtcatgcgatatgacacacggctggggaagtatgatggaaagcctcggcctggtggagtgcggtcaaccctctgtgtgtcatcacaggttgggtgcaagatgggctgcagattctgtgctactggaacaatgggcttcaaaagcaatctgtcttctggagaaattgtagagcagctggtccatgcatctcgctattctcagatccgaaatgttgttttcatgggaatgggggagccgatgaacaactataatgctttggttgaagcaatcggagtgtttactggatctccttttcagctttcacctaagagaattactgtatctactgtcggaatcattcatggaatcaacaaattcaatggtgaccttccaaaggtgaatttagcagtgtcattgcatgctcctgaccaagacattcgctgtcagataatgcctgctgcacgtgcctttcctttaggaaagctaatgaatgccctgcagtcctatcaaaatgagagtaagcagaccatcttcattgagtatattatgcttgatggagttaacgatcaggaggagcatgcacatcagcttggtaaactgcttgaaacgtttaaagcggttgtaaatctaataccattcaatccaattgggtcatcaagcaatttcaagacaagcagtgaccaaaatgtgaagaacttccaaaaggttttaaaaggcatctaccgcatcagaactactattcgccagcagatgggtcaggacatagctggcgcttgtggccagttggtggttagcctcccagatgaaagatcagctggtggagcaactcttttgtcagacatcgaagaccttcggatctgacctctcccccaattgttaattctaccattttctcaagatcagatcctcttactaattagcctcacatgatatggtaactggtgctatagtttcaagtcaagctttaaaacatgagatgtttagtttgaccattgttgtgttccccttttgttctgggatacacaattttgctgtacacaatggtgaagacccctgcagttctgctcttgtggataggtggccactgaaacggttggt

SEQ ID NO: 26387 - DNA, 1475 bp, Zea mays
  Clone ID: LIB4171-036-F4_FLI
cgaggtggaagcctacgaaaatggtggagctcacctccttatccccagggccaccacgtccttctcggctgactcctcgccgccggccgccgccgccgacacctcatgttcatacctcctcgcgtcgtcgcgggaggatcctcggcgccgcgaccgccacgcctggcgccgacgactaccactccaccatccgctccctcaactcccgcggccgccacgtcccccgaaaatccctcgggcagaactacacgctcaactccaaggtgaacgaggagctggtggcggcggcgggggtggaggagggtgacgtcgtgctcgagatcggcccaggcaccggctcgctcacttccgcgctgctccaggccggcgctaccgtctttgccgtcgagaaggacaagcatatggctactctcgttaaagataggtttggatctacagaacagttgaaggtcattgaagaagacatcacaaaatttcacatccgttcccattttcttcctttcatgaaggagaaatacggtgccaccaaaaaacttgcaaaggttgcatcaaacttaccattcaatgtcagcaccgaagttgtcaaactactactcccaatgggggatgttttctctgtcgtggtgcttatgcttcaggatgaaacagcagtacgccttgcagatgcttcaatacaaagtccagagtaccgatctatcaatgtgtttgtggatttttactcggaacctgaatacaagttcagagtagacagagagaattttttccctcggcctaaggttgatggtgctgttatcagcttcaaactaaagaatgcggaggagtatccgccagttagttccccaaaaagcttcttttcaatggtgaattccgctttcatggggaagcgcaagatgcttaggaaatctcttcagcacatatgctcttcttctgagattgaggctgctcttgacaacattggccttccagttacagctagaccttctgatttgattttggatgatttcgtgagattgcacaatcatttagcgaaagtatgactaagaagtgcctttcaaaatgcctaaggaattgcttgttggcatggtgttcaacagttggagtaacttacgcctgaccgctgagagttgctatgcagctacaggtgcattcagctcagctccggggcgaagccaggaattacatgtagggaggccggccgaaagagccatcttgtaaaaaaatgatcgcggttcaactggtttggttactcgcacttagcgtctgtctgagttaatacttgacaaaaaaaaaaaacaagcacagctcaactggttaggtttctcgtagtggtggtggtcgtttgggttaattcatcgacttgacacggttgctcctatttttttttctatatgtattctagatagtgagggtttattgtattttgatcgtagacgctaatcagaaactctactgaatggatgccttcgttctctctg

SEQ ID NO: 26388 - DNA, 1737 bp, Zea mays
  Clone ID: LIB4171-037-H4_FLI
ttcaaaacgaaaccaagcaagctttcggtcatggccccgccggcaacgaatagcccgggagaggtcgacagcggcggccgcccgcatgtcatgttcatcccaagcgctggcatgggccacctcatcccattcttccgcttcatcgcggctctcgctgggcagagcgtcgacatctctgtggtgactgtccttcctaccgtttctgccgccgaggaggactacttcaccagcctcttcgctgccctcccccgtgtccgccgcgtcgacctccacctcctgccgttcgacgcgtccaagctcccaagcaacgaccgcgacccgttcgttctccggtgggaggccctgcgccgctcagcgcacctcctgggcccgcttattgccggcgccgccccacgcgtctcggccgtcattacagacgtgaccctgacctcccacgtcatccccatcgccaaggagctcggcgtccagtgccacgtcctcttcccctccagcgccaccatgctctcgctccttgcttacacccctgtacacatcgacaagaaggccgagcaggggagtgacatcggcgacgtcgacatccccggtgtgtgtcgcataccgcagtcttgtctcccgcaggtgctgcttcacctcgacaaactcttcaccaagcagttcatcgccaacggccgcgagatcatcaacgctgacggctttctggtgaacacgttcgacgccttggagccggtggcgctcgctgccctgagagatggcaaggtcgtcccggggttcccaccggtgtacgccattggcccactcatgtcgcagcaacactcagttgacgaaggtgggaaggaagaaggatcgggctcccccgttgcctggcttgacgagcagccagcgcggtctgtggtgtacgtcgcgttcggcaaccgctgcgccgtgagccatgaccagatcagggagatcgccgccgggctggaggcgagcaactgtcggttcctttgggtgctcaagaccacaacggtggatagggacgacagcgccgtgctgacggaattgctcggcgaggggttcctggagcgagtgcagggtcgcggcctcgtgaccaaggcgtgggtggaccaggaggccctgctgaagcacccggccatggggctgtttctaagccacagcgggtggaactcggtgaccgaggcggctgccgccagcgtgccgctgctggcgtggccccgcggcggcgaccaccgcgtgaacgccaaggtagcggtgagcggtggggttggggtgtggatggagcactggagctgggacggggaggactggttggtgaccggggaggagatcgcgaagaaagtaaaagaggtcatgtccgacgaagcggtcagggcaaggacgacgaggaccgccgaggaagcggccaaggcagttgcagagggtggcaccagctaccggagcatggaggagtttatttccagcgtcaaagcaaccgtggcgtcttgattgcgtcgtggggctcctgatttccacaagtttgtgtcccctactcccctaccctaccttccactgatggggagtccggagttgtgacgtcgttgtcgtgtggctggttgcagtgtcaaccaaaacagttctcacacacgtgagttgttgggaggtaggtagcatgtactatcacgtacctaccccatcaagaatagtgcgtcatctgtcatcttgtgatgtcatcttgtaatgaaataaaaacagttgcatttt

SEQ ID NO: 26389 - DNA, 1385 bp, Zea mays
  Clone ID: LIB4171-038-B4_FLI
agccaggagaaggcgggcgcgcacacctgctgcttggtgaccacgttcgatggagctgcacaagtactggggcgtggggggccggcggtgcggcagctgcgagggggccccggcggcggtgcactgccgcacgtgcgttggtggatccttcctctgcacgacgtgcgacgcccggcccgcgcacgcgcgcctgggccacgagcgcgtgtggatgtgcgaggtctgcgagctggcccccgccgccgtcacgtgcaaggccgacgccgccgtgctctgcgccgcctgcgactccgacatccacgacgccaacccgctggcccggcgccacgcgcgggtccccgtcgcccccatcggctccgaggccgccgccgcggccgtggaggccatgctgttcgggaccggcgaggcggccgcttccgaggccgacgagcagcacgcggcggccgagcacgcgcacgcgcacgcgcacgcgctgaacctcaacgtggaggccaaggacatgaagctggactacctcttctctgaactggatccctacctcagcgtcgagatcccgcgcttccagcacgctgacagcgtcgtccccaacggcgccggcgctgccgtcgagctggacttcacgtgcggcatcggcgttaagcactcctcctacagctcctacacggccacctccctcgctcatagcggctcctcgtcggaggttggcgtggtgccagaggccttcggcggcagcggcagcggcggcgggagctttgagctcgacttcacaaggcccaagcctcaggcctacatgccatacaccgggactccccagagccacagcgtgccatccgcggacgtggaggtggtgccggagcggggagacttggctgcggtgaggccggtgccgctgatgggggagagcagggaggcgcgcctgatgcggtaccgtgagaaaaggaagaacaggcgcttcgagaagaccatccggtacgcgtcccggaaggcctacgccgagacgcggccgcgaatcaagggccggtttgccaagcgtgctgaccacgacggggacgccgacgccgacgacgctgaggccgaggccgaggccgccgtgccgatgtcatatgtgctcgacttcggctacggcgtcgtaccgagcttttgatgtgcccgggcccaacacgcgcgcacatggccggccgcgcgcttgaaccggcatggcacgccgctgcgcgcgcgccttgtacttgtatcgatcgatgtatagggaggagtagtaatcccatgtactctctttttgagcaagctcttgcgtaaactagtgatgtataatttgtactactagtaagaaactgcagtagccgctgctaatggatcaccaatctataccgcgcacaagttgtctt

SEQ ID NO: 26390 - DNA, 2319 bp, Zea mays
  Clone ID: LIB4171-038-C7_FLI
gatgatggtcggactctgagctcctctccgtgccaagtttctctgcacccatcgcttcagctcaccggttctcccccctgcactgcgctggctgtatggctcctcccttcgcgtgcgccatgcacggccgcgccctgctagcagcagcagcagcagcgctgctcgcgtcggccgtcacgctcacgcttctcccctccgccgccgcgcagccgtgggtgggcccgtggccgacgtgcgacgacaccaccggcaactactcggccggcagcgcctacgccaaaaacatcaagcagctcatcctcagcctccaggcaaacgcgtccaacacgcccgccctcttcgcgacgggctccgccggcgcgggcgccgacgccgtgtacgggctcatactctgccgcggcgacctcagccccaccgactgcttcgactgcggcaccaacgccggccaggacgtgtaccgggtctgcaacggcacccgggacgccgcgctcgtctacaaccagtgctacgtccgcctcgcccccacggacttcctcgccaccaccaacaacaccggcatgagagacctcatcaacggcaacagcgtccccgcgggagtcaacgtgacggcctacgacggcgccatcaccaggctgctcaacgccaccgcgcgctatgcggtggacagctccgccccgtccttgtctcccaggaagtacttcgccacgggccagatggcgggggtcgacccgcggttcccgaccggcatctggtccatggcgcagtgcgcgggggacatatcgccggtgcagtgccggagctgcctggacgacttgctggcgcagtggtggcagaagttcgacagcaaggagatcggcgcgaggctcgacggttcgcgatgcaacctcaggttcgaaacggggaacttctacaccggcagcccgatggtgaagctgcagatgaacggcgaggaggccgctccagctccggtgccttccacggatgttctacctggcaccacaggaggtaagaaaaattcagttggcaaacttctcggaattatattgccgatagtatttgttgctgcaatagctgccatagccctctgcatttggattgttcgtaagaagagaacataccaaggaacaaatcttccccaaacagacacaacttatatggccgaggacatcgaaagcatcaagtcgatattgttatcgttgccatcactacaagcagcaacaaataattttgatgaaagcaataaactaggcgaagggggatttggaacagtttacaagggcaatctttctggacaagaagtggctgtgaagaggctaccaaagggtttagatcaggggctagaggaactaaaaaatgagctaggtttgatggcaaaacttcatcacagaaatcttgttcgactggagggtttctgcttagaagagggagagaggttgctcgtctatgagtacatgcccaacaaaagccttgacaatattctttttgatcatgagaagaaaagacaactagattggaggaaacgattcaacataattgaaggagttgcacgtggattgcaatatcttcatgaagactctcaaaataagatagttcaccgtgacctaaaagcaagcaatattctgttggattcaaatatgaaccctaagattggtgactttggcctagccaggctctttttgcaagatcagactcgaggcatcacaaaccacatcgttgggacattcggctacatgtctcccgagtatgtgatgcgtggacaatactccataaaatcagatgtatttagtttcggcatccttgttatagagattgtaacaggacaaaagaacaatgggcattacttcgacgagcaaaacgaggatgttgtgagcattgtatggaagcactggagcgagggaacacttgcagagattatagatgattctttagggagaaactactcagagactgaggtgctaaaatgtgttaacattggcttgtggtgccttcaacagaatccaatggaccgacctacaatgtcagatgtcatggtgatgctcaatgatgatgatactagttctctacctgctgctgcaaaaccaacttttttcttggatgcaagctcaggctactcttacacctcgggcaccatttcacatccttctgcaaggtagtgtaggctaaggcctaatgcacacctttatatgaatatcgacatattgttgcttgtttgtttcttattgtgtattggttgaaataaacatggaattcatcctgaattgtaatagcttgtgctcattattagtttcttaccaaatcctcaaatataaattttctctt

SEQ ID NO: 26391 - DNA, 2427 bp, Zea mays
  Clone ID: LIB4171-038-E1_FLI
gagcaaaggacaaatatcctcctcgctcgcagtcgcagctagtacgccgccgcacctccgcccgccaccttcttcccggctccagcgatgtcgggggcgatcgggggcgccgaggtccacggcttccggggcgcagcggcgcagctcccgcggtcgcgggtgctcgggaggccgatccgggtggcgccacccgccgcggcccggccgggcggcgcgtccgcgggtagcatacgcgccgtctccgcgcctgcgaagaaggatgcttctgaagttaagcgaagcaaggttgagataatcaaggaaaagagcaacttcctccggtaccctttgaacgaggagttggtctcagaggccccaaatatcaacgagagtgctgttcagctgatcaagtttcatggaagctaccagcaaactgaccgagatgtccgtgggcagaagaattactcgtttatgctccggacaaagaacccttgtgggaaagttccaaaccaactttatttagctatggatacactagccgatgagtttggcatcggaacactccgcctgacgaccaggcagacattccagttgcacggtgttcttaagaagaacttgaagactgttctaagcactgtcataaagaatatgggctcaacattgggtgcttgtggcgatctcaacaggaatgtacttgctcctgcagcgccttatgtcaaaaaagatatcctttttgctcaacaaacagcagagaacattgcagcacttcttacaccacagtccggggcttattatgacctgtgggtggatggcgagaagataatgtcagctgaagagcctcctgaggtgacaaaagcccgcaatgacaactcgcatggaacgaacttccctgactctccggaaccaatctatggcacccagtatctaccaaggaagttcaaggttgcggttaccgcggctggtgataactctgttgatattctgaccaatgacatcggtgttgttgttgtttcagatgatgcaggagaacctattggctttaacatctatgttggtggtggcatgggaaggacacaccgagtggaaactacattccctcggctggctgatccattgggttatgttccaaaagaagatatattatatgctataaaggccattgtcgtcacacagagggaaaatggaagaagggatgaccgcaagtatagtaggatgaagtatatgattgaccgttggggaatagataggtttcgggctgaagttgaaaaatattacgggaagaagtttgaaagtttccgaccattgccagagtggcagtttaacagctaccttggctggcaagaacagggtgatgggaaattattctatggagtgcatgttgataatggtcgtgttggtgggcaagcaaagaaaactctacgagagataattgagaagtataatttggatgttagtattaccccaaaccaaaatcttattttatgtgggattgatcaagcatggagagaacccataactacagctcttgcacaagctggcctgctggaaccgaaggatgtcgaccccttgaatttaactgccatggcatgccctgccttgccactgtgccctttggcacaaacagaagctgaacgggggatcttacccattcttaaacgaattagagcagtcttcaataaggttggtatcaaggattcggagtctgtggttgtgaggataactggatgccctaatggatgcgctagaccatatatggcagagcttggtttcgttggtgatggcccaaaaagttaccagatctggctgggtggaacaccaaaccagagtacgctagcagaatcatttatggacaaggtgaagcttgatgacatcgagaaggttttggagcctctttacctattggaatggcacacgccaggaaggcgaatcttttggaagcttcacaaaccgaacaggattcgacaaattgaaagaggtagtgaataagtgggcagagtcaccgtcagccgcatgaagatttcgctttcgttggataaaatcccaggctcgcagcacaattttggccacgggattaattatatgacgaaggaaatccagataagccgagaaatggaaaaaggaagactcgggttgtgagttgctatgtttgttgggttgagtgatcgatttttttttgtgtgtgctctcaaggagacctctgtgaacttgaataaactccacacggagttgtgccaaattagaccgaggcgtccgtgaacttgaatcagttcctcgggatgttgtgcctgagaataaatccgaccgaggcgtctgtgaacttaattcaattcgtcaggaagctgtgccttagaataaattcgacgggtgtccaattttcttgtcattctagcgagatgcctcatgccctcatgattggaacgaagtgaggcccttgtgtggtcggttgag

SEQ ID NO: 26392 - DNA, 1761 bp, Zea mays
  Clone ID: LIB4171-038-F6_FLI
cacaaacgtccccacacatttcccctaccatctccctcttcttccacgagctaattctagacagaacacaagcgcccgccatcgccatggaagcaacagcagactcgttgccgtgggcggcgcagtgcgcgggcgcggcactgttcgccgccgccctctgcgtgacggctctgggcgtcgtgctggtgttcctccggcggtggccctggtgcagctgccacgtgtgccgggcgtacctgacggggtcgtgggcgcgggacttcaccaacctcggcgactggtacgcgcacctgctccgggagtcgcccacgggcaccatccacgtgcacgtgctcggctgcaccgtcaccgccaacccggccaacgtcgagtacatgctgaggaccaacttcgacaacttccccaaggggaaggccttcgcggcgctgctcggggacctcctcggcggcggcatcttcaacgtggacggccacgcctggcgccaccagcgcaagatggccagcctcgagctcggcagcgtcgccgtccggtcctacgcgttcgggatcgtggcgcaggaggtggagtcccgcctcgtgccggtgctcgccgccgccgccgacgctggcgcggtcgtggacctgcaggacgtgttccggcgcttcgcgttcgacaccatctgcaagatctccttcggcctggaccccggatgcctggagcgggagatgcccgtgtcgaggctcgccgacgcgttcgacgtcgccacgcggctgtgcgccatgcgcggcgccgcggcgtcgccgctagtgtggagggccaagcgcctgctgaacgtcgggtccgagagggagctccgggaggccatcgcgctcgtcgacgagctcgcggccgccgtgatccgggagcgccggaagctgggagtcgtcggcagccacgacctcctgtcccgcttcatggcctcggccggcgccggcgacggcgacgacaagtacctccgcgacatcgtcgtgagcttcctgctggccgggcgcgacaccgtgtcctccgcgctgaccacgctgttcatgctcctgtccaagaacccgggcgtggcggccgccatgcgcgcggaggccggcgacggcgagtccgccgcgccgctcacctacgagcacctcaagggcctgcactacacccacgcggtgctgtacgagaacatgcggctgttcccgccggtgcagttcgactccaagttctgcgcggggcccgacgtgctccccgacggcacctacgtggccggcggcacgcgcgtgacgtaccacccctacgcaatgggccggatgccgcgcatctggggcgccgaccacggcgccttccgccccgaccggtggctcaccggagccggcgcctcgttcgtcccagagagcctgtataggtacccggtgttccaggcgggcctccgcgtctgcctcggcaaggagctcgccgtcaccgagatgaaggtggtcgctgtggccgtggtgagggcgttcgacgtcgaggtggtcggggacagtggcgccaccgcctgcgcgcccaagttcgtgtcggggctcaccgcgtccatcagcggcgggcttccggtgagggtcaggaggagagttgttcgatagagattcttgggctggcggtggcgggtggtgtgtgtgtgtttttccagaaaaaaaaagatagaaagagactagagatagatggtattagaaagctccatgactgtgcataaactgattgaaagaagagggaatggaatagcaaagttgaatc

SEQ ID NO: 26393 - DNA, 2593 bp, Zea mays
  Clone ID: LIB4171-039-A6_FLI
gttgcagttcccctctctctcctctgccgtagcgaggcaggcaagccaccaagtccgagcctcggaggcatcgaccaacgccggcggcagcggcgccatgaggctgctcgtccccgacggcgcgcgccgccagcggttgctccagtgcgaggcgcccccgtcgccctcgccgccttccccgtccccgtacccgtcgtcgtccccgtccaggacggtcgtggtggggatcaggcgcgacgccgccagccgcgagctgctcacctgggcgctcgtcaaggtcgccaatgctggggaccgcgtcgtcgcactccacgtcgccaccgcggccgccgccgacggtttgctcgtgagactggatgagcgcagcagggccgcggactcgctcgcctccgtgctcgccgtctacgacggtttctgcaacctcaagcagattaatttggagctcaaggtctgtggagggtcatctatccggaaaactctggttaaagaagcagctgcttgtggcgcagcacatctcatccttggtgtcacgaacaattcccggtccttcggatcctccttgacatcagttgccaagtactgctcaaagagagttccagccagctgctcggttcttgcagtgaacaatggcaaagtcgtttatcataaagatgctggtcacgggttgcaacatgaactgtaccaaagcaataccacgatacctgagacaccaaggaggagctaccggaagctcttgtcgaccatgataggggataaactctgggatgagaatggaaaagacagaaggtgtgtgtctcgtgccgtcaccatgccaatgaggtctcccgcacggccaaaagaattttcactggcattagtcccggtgaagggttgccaacacgaatcgccagcggtagcaactggctggcccctacttaggaagaagttcttgccagaccggaaagcttctgcgcctgacaagtccaagatgtctgtggtgcagtgggcaatgcggctcccaagcaggtattcagcagtatcgccagtccattcagaatacagaaccacaaaaccggactccacgagcgccagccatatcctccgtgaccgtgtgattgttccctcaaggagcaattctggaaagtcttgtgtagtgattgaagaattggagaaggaaactccagaggaactgacgttgctcaaagagaaattctcatccatttattcttcattcagttacagtgaacttgcaaagatcacctctgacttctcaccagagtgtgtagttggacaaggaggcactagtcaagtttacagaggctgtttggcaaatggcaaggagctagcagtgaagatcctgaagtattctgatgaggtactgaaggagtttgtatcagagattgagattgtcagttctctcagccacaagaatgtgatatccctcgttggtttctgcttcaagaatgatgaccttctgttagtgtatgagtatttgcaacgaggcagcctggaagagatactgcatggtaaaaaagaatgcaagagcatatttggttggactgagaggttcagcgtggctatgggagttgctcgtgctctggattatctccatagtgataacaacagtcgtccagtgatccatagggatgtcaagtcatcaaatatcctcatttcaaaatgctttgaaccaaagttatcggactttggtctcgcagtctgggctgctgatgtgacatctcagatgacatgcaatgatgttgcaggaactttcggatacttggctcctgaatacttcatgcatggcaaggtgggcaacaaaatcgatgtgtatgctttcggtgttgtacttctggagctcatctctggcaggaaaccactttgcactggttgtccaaaagggcaggagagcctagtgatgtgggcaaattccatcatacagggaggaaagctcagacaacttgtagatccaaacttgcccactgaaggccatgtcgatgaagttgagaggatgacccttgctgcgtccctctgcatcagacaaacacctcagaaccgtcctgaaattgatgctgttctgaagcttctccacggtgacaatgataccctcaagtgggcaagatcacaagtcgggttgtcattcgagagcagcgatatcgatgaatttgtgatgacaccgccagcgccgaggagtaacaccaacatccagtcctacatcaacctcgcctttgatgtcgatgacgactcagcctctgtcagcagcaacgacttcattgcagccaacacctccttggaagagtatctgaagggaagatggagccggtcgtcgagctttgactgacggacccatggtcagagttaaccctttattagtgtatagatcgttcttgttcttcttctaatttaagtttcaattttgcgccttggatgagagttggcacctgcaatgccctccaccaggaaatcctttgattatgtcttagttatttttttccttttcttttgggggtccctcttactctctgaagaggcaccctgttgttttactgtctgaagagacttatcatactcaggtagtctcatccaaagaggtgacaaataaagtcgggatcatacg

SEQ ID NO: 26394 - DNA, 1887 bp, Zea mays
  Clone ID: LIB4171-040-A3_FLI
ggaaaaaagggggttcaatcctgttgggcatcgactcaccgggttttgaggtttttcgtgggcggctttgatcctcggtcgatccgatctttgtcaggctttcaccagacgttgcaaaatccgctcgcaaccagcgttattatcagccggaaacagtccttttcttgatcagcgaacatgggaacccgcggcgtcgccctgctgctcctcgcggcggtgctgctcctccaggcgctcctccccgcgtcgtcggagggcctggtgcgggtcgcgctgaagaagctgcccgtcgaccagaacggccgcgtcgccgcgcgcctctccgccgaggagaggcagcgcctcctcctccgcggctccaacgctctgggctcaggcggcgacgacgactccgacgtcatcgcgctcaagaactacatgaacgcgcagtactttggggagatcggcgtcggctcgccgcagcagaagttcaccgtcatcttcgacaccggcagttccaacctctgggtgccgtcctccaagtgctacttctcgatcgcttgctacttccactcgcgctacaagtcagggcagtcaagcacttacaagaagaacggaaaacctgctgccattcgctatggaactggttccattgctggttttttcagtgaggatagcgttacattaggtgatctggttgtgaaggatcaggaatttattgaagctacaaaggagccagggcttaccttcatggttgcaaaatttgatggcattcttgggctaggctttcaagaaatctctgttgggaatgcaacaccagtgtggtataacatggtgaaacaaggtctcatcagcgaccctgttttctctttctggtttaaccgacatgctgatgaaggagaaggtggtgaaattgtgtttggtggaatggattctagccactacaagggcgatcacacgtttgtcccagtcactcggaagggatactggcagttcaacatgggtgatgtcctggttgatggaaagtccactgggttttgtgccggtggctgtgcagccatcgcagattctggaacttccttgcttgctggccccacagccataattactgaaatcaatgaaaagattggtgctgctggtgtagtcagccaggagtgcaagactgttgtttctcaatatggacagcagatcctagatcttttgctagctgagacacaaccaacgaagatctgttcccaggttggtctgtgcacttttgatggcactcatggtgtcagcgctggaattcggagcgtagtggatgatgaagctgggaaatcaaatggtggtctcaagagtgatccaatgtgcaatgcctgtgagatggctgtggtatggatgcagaaccaacttgcccagaacaagacacaggagctcatcctgaactacattaatcagctttgcgagcgtcttccgagtccgatgggagaatcagctgtggactgtggcagtcttgcgtccatgcctgacattgcgttcaccattggaggcaagaagttcaagctgaaaccagagcagtacattctgaaggttggtgaaggacaggctgcccagtgcatcagcggattcacagctatggatatcccaccaccccgtggccctctctggatcttgggtgatgttttcatgggagtctaccacaccgtcttcgactatggcaagctgagggttggcttcgcagagtcgacctagggatatggtttggcagcaacccgtccagaggcaaacgcgtaatttgtgtgtttatgcgaccggcgatgtgtgtatatatgctactacatgtttagtcatgctttccgagacctgagacaacgcccgtctgttttaacgtggcgcaagaataattatggttctcgatgtattctccgt

SEQ ID NO: 26395 - DNA, 1602 bp, Zea mays
  Clone ID: LIB4171-040-D4_FLI
cagaccctcgccatgggactgagatccccgctcgtgctcctgctgctcctcctcttcctcgccgctactttccgtcccagcgcggccgctttggcccctccaacaggcagcatcgtgaagcagctgtcgtcggtcgtcaggtggccgcgggccgccccctcgacgcacgggcccaaacagcccggccacccccagtacgccgatggccacgtgggggtagccctgcaatttgagagcggctactttgtagagacacttgttgagggtgacaagcttggtgtcacgccgcacaccattagagtatctcctgttgagggtggggagctccttgcggtcgactcggcacatagcaacattgtgcggataaccccgccactttctgagtatagcaggggaagacttgttgctggttctttccagggccattctggtcatatagatggtaaaccaagtgatgcccgattcaagcgccccacaggcgttgccgtggatgatatgggcaatgtttatgttgctgatacagcaaacttggcgattcgaaagattggagaatcaggagtgaccaccatagcgggtggtaaatcgaatatcccaggatacagggatggccccagtgaagatgcaaagttctctacagattttgatgtggtgtatgtgaagaaaatgtgttctcttctggttattgaccgtggaaatgcagcccttaggaagatttctcttccacaagaagactgtacttaccaggattctgcactcctatcttcagatctcatattggtcattggtgctgttgtggctggatatatcttctctggtttccaacacgggtttggattctcaggctccgagaaggtagaggcacctgaaaacgagcagcacgagagcagcacaatcgggaagccacctctggtggtggagagcctgaaagaggaaccaggagctgggtggccatccctcgggacgctaattgccgatctcttgaaacttgccatcgagggagtggggaaactgctactgagcgtcgtccctcaacgcatgcaacacgggaagaggaagacagatctcaccccgctcagggacaggttggtgatgcccgaggacagagaggagacgccagcagcggcgcagaagctcagcagcacgccaatgcggcccgagacagcccacgcccctaaccccgtaaccgagacggcagcacccaaggccccgaagagcacgaagccatccaagctcagggattcttcgaccctgtcaagcaagcacaggtcctccaagcggcaggaatacgcggacttctacggcacctccgagcccgctcccgtaggtgccgccgccaaggttcccaaggacaggctccgccaccgccaccaccaccgcgagaagagcggggaggtcgcctacggcgccgcccatcacgacctgaagcccgcggaagcgaagcctgccgattacagcgatccgagctacgatccgtacttgaggagcaagtatgccgccgagagtgggtacaggtattgacgtgtcgctagctgtcctgtcctctcctgccgggggaaacagcggaatgaaaacctttcgccggcgtctgcctggcaatgttgt

SEQ ID NO: 26396 - DNA, 1896 bp, Zea mays
  Clone ID: LIB4171-040-E7_FLI
aggcctccctccctccctcatcctcccactgaatcattcatcttttgaaaatagttttgtgctctcaaggcaaaagagcacacttgactcttgctcgcctctctcactcactctctcactcaagctccagtcacacactctctctagctctctgccactccgtccattgggctggactggactggaggcatggccattccattgctagctccagcgcgctccaacggcagcaggccgctggcgctggcgctggtgctcgtcgccgcggccgcgctgtgccgtccgggtgcttgcgacgacggagccgccgccgccgcggacaggatcaggcggctcccgggggagccggaggtgagcttcgcccagtactcgggctacgtcgccgtggacagcggcggcggcggcggcaagcgcgccctgttctactacttcgtggaggccgacgtcgtggaccccgcctccaagcctctcgtcctctggctcaacggcgggcctgggtgctcgtccctgggcgtaggcgccttctcagagaacgggccgttcaggcctagtggccaggtgctggtcaagaacgaatacagctggaacaaagaggccaatgtgatatacctggagacgccggctggtgttggctactcctactctgctgatgctgcttactaccagggcgtggatgacaagatgacagccatggacaacatggtgttcctgcaaaggtggctccaaaagttcccacagtacaagggcagagacctctacatcgctggagagagctacgcagggcactacatcccgcagctcgcggaggccatggtggagttcaacaagaaggacaggatcttcaacctcagaggcgtcgccctgggcaacccggtgctggagttcgcgacggacttcaacgcccgcgccgagtacttctggtcgcacggcctcatctccgacgccacctaccgcgtgttcacctccgcctgcaactactcccgctacgtcaccgagtactacggcggctcgctgtcgccgctgtgcgcccgggtgatgaaccaggtgacgcgcgagaccagccgcttcgtcgacaagtacgacgtcacgctcgacgtctgcctctcgtcggtgctctcccagtccaagatcctctcgccgcacgagcaggtcgggcagcggatcgacgtgtgcgtggaggacgagacggtgaggtacctcaaccgccgggacgtgcaggcggcgctgcacgcgaggctcgtcggcgtcgacaagtgggcggtctgcagcagcgttctcgagtacgagctgctcaacctgcagatcccgaccatcagcgtcgtcggatcgctcgtgaaatccggcatccgagtgctagtttacagcggcgaccaggactcggtgatccctctgacgggcagccggacgctggtgcagaacctggcgcgcgacatgggcctcaagaccaccaccccgtaccgggtgtggttcgaagggcagcaggtcggaggatggacgcaggtgtacggaggcggcgcgctgtccttcgccaccatcaggggcgcctcccacgaggcgcccttctcgcagcccggacgctcgctcgttctcttcagggcgttcctgcagggccagcctctgcctgaaaccttctcgtgatcagggtgcccgatgcagcttcttctgcaggtggggttgggccggggttttgcactgtagtaatatgtaagaaggtgtttggtgtgtctgcctcctgctagctgatgatactagtggtttggtttggcgccgcggtaggaccgtaggagcgagcgagcggccggcgctgttcgaggtctgtgctccgtgtttctacagcgtccgtccatggctcggcaattgcctaaagaagcggaaaggatttgtctctggtttcgt

SEQ ID NO: 26397 - DNA, 1170 bp, Zea mays
  Clone ID: LIB4171-042-A8_FLI
cgaccgcgatcccccacatcgttggcgatgagctcctcctccaacagcgggaagaagccggcgcccgccggcggccgcggggggcccaccatccgcacgctcgccgacataaaccgtggccccgccggtttcccaggtgccggaggcggcagcagcgacgacgacgagccccaggagtactacaccggcggcgagaagagtggaatgcttgttcaagatccaacaagaagaaatgacgtggatgcaatatttgaacaagcaagacaggcgggcgctatccatgggatgcccccttttcttggtggcgagtcttccagctctaggagctttactgggactggccgacttcttacaggggagacagtaccatctgctgcacctcaggaaccagtaccagttcgaatacgccacaatatacatttgtggaacaatggctttactgtggatgatggtccactgagatactacgatgatcctgaaaatgaagagttccttgagagccttaagatgtcaaagtgccccaaggagctggtgcctactgatggagaacatgttgatgtgtctgttattaaaaggatggaagattaccgggaacctgtaaggcctcaatcagctttccagggtgttggaagaacccttggtggtggaccttccccagatgagagtgcaacacctgctcctgcaccaacggcccctgctgcttcgaggtccgctggcatagtcgtggatgactcccagccatttacatccatacagctgaggctggctgatggcactcgcatggtcgcccggttcaacatgcaccacaccgtgggagacatcaggtccttcatcgacgcatctcggcctggaaccgcaaggccgtatcagctgcagacaggtttcccacccaagcagctggctgacccaacgcagaccgtggtgcaagctgggctggcaaactcggttatcatgcagaagatgtaatgtttcgacaacatgggtaactaggatgcatcgtactgcatcttttgagaactgtcgtattgtggttgactggtgcgtcattcatggtcttaagagtttatagttcatctatgaactgaattatgctttctgatttacagcagatactgaagtgtcgatttaacgtttatgcatgtctggatataatcaaccgttgttgcttgc

SEQ ID NO: 26398 - DNA, 2529 bp, Zea mays
  Clone ID: LIB4171-042-E4_FLI
cgaggctcctccgccactaaccaaggaggcgaagacgataaccaccgacgtgccttcctccccacatgccctagcgatccgttctcatttgcagacccaatccaagcccagagcaatcaccaagcctggcagattagatttccaccctcacatggaggaaaaatccaaccttcgcatgtgacctctatttaaatccccgcaagaatcgatcaatcaatccaaaagggtgcaggaaaacagagcaatcccgttgcttagcgtgttcgccttgccgttggcgtctcttctccgttcctcggcacgcgtaggcccataaacctccgctaaagctcctttgtcgcgcccatttcgtcagccatttcccagattccccataggcgagggttcccgggctgagatccaatcttttcagttgttcggtttcaatcggtgtaaattcctccagaaagaaacctagaatcgcccccccatagttggaaaaggtttccatttctgaccggttgtcgagcctggctacgttttgccgagcaaaggcagggcgtccgttcggttacggttcttgatccggcgagggaccgccgctgccgaaggcaatgcagccggacccgcaaggcccgggcagggggaaggcgggcggcgccaatgcgcacccgcggctgccgccgccggtgacggcggggtcggctgggcggccggcgtcggtgctgccgcacaagacggacaacgtgcgcgaccactaccgcatcgggaagaagctggggcaggggcagttcggcaccacgtaccagtgcgtgggcaaggcggacggcggcgagtacgcgtgcaagtccatccccaagcgcaagctgctgtgccgcgaggactacgaggacgtgtggcgcgagatccagatcatgcaccacctctccgagcaccccaacgtcgtccgcatccgcggcgcgtacgaggacgcgctcttcgtccacctcgtcatggagctctgcgccggcggcgagctcttcgaccgcatcgtcgccaagggccactacaccgagcgcgccgccgcgcagctcatcaagacgattgtcggggtggtgcaggggtgccactcgcttggcgtcatgcaccgggacctgaaaccggagaacttcctcttcgcgagcacccctgaggatgccccgctcaaggccactgattttgggctttccgtgttctacaagcccggtgataaattttctgacgttgttgggagcccctattatgttgcccctgaggtgcttcaaaaatgttatggcccagaatctgatgtatggagtgctggagtgattttgtacattttgctatgtggtgtacccccattttgggcagagagtgaagcagggatcttcaggcagattttgcgaggcaaacttgatttggaatctgaaccatggccaagtatctctgatagtgctaaggatttagtccgtaagatgcttatccgcgatcctacaaagaggttcactgctcatgaggttttatgtcatccatggattgttgatgatgctgtcgcacctgataagcctattgattctgctgttttgtcaaggctgaaaaacttttctgcaatgaacaagctcaagaagatggcattgagggtgattgctgaaagtctatctgaggaggagattgggggtttgaaggagttgttcaaaatgatcgatactgacaacagcgggacgataacttatgatgaactgaaggatggtctgaaaagggttggctcggacctgatggaacctgaaatccaggctttaatggatgcagctgatatcgacaacagcggaaccattgactatggagagttcttggcggctacgttgcacatgaataaactggagagggaggaaagcttggtgtcggcgtttgcgttcttcgataaggacgggagtggcttcataacgatcgacgagctctcacaagcatgcgaacagttcggtctttctgatgtccatctcgaggatatgatcaaagatgtggaccaaaacaatgacggtcagattgattatagtgagtttgccgcgatgatgagaaagggcaatgctggcggagcaggacggcggaccatgaggaacagcttgcatgtgaatcttggcgagctcctgaagcccaccgagacctagttttttttaaccagaggatcctgcttcccagatgcgccccatctgaaacttaccgtgtgcctcatccgctttcacagatcgattagttgatctctagtagcagcgccaaaagcagtttaagattttctcagtggtactagtagtgaggggaaaatagcatcctgtggtgccagtgagagattttaggcgctgaagacgacgtgctatgctactccggagtcctgttgtcttcttcttcttcttgttgttgttgatttcaggtttgtactattactgatctttgttgtaaaatgcgctgttgtcccatgaggtaggcacctaggtctcctccatttgaattatatcaaacggatttgtaaacacgttctcatgcatgaaaccatttctt

SEQ ID NO: 26399 - DNA, 1649 bp, Zea mays
  Clone ID: LIB4171-046-B3_FLI
ctttcttctccgttccatcgcctcctcccacttctctctgccgccccccacacggccacaccccagccgcgccattgcccactgcattgcagactgtaagccgggaatccacttggattggatcgatccatccgaaggcgccagatgaacgcccggctgtcggcagagtaccagggcctggaggtgaaggtgcccagcctcttccggtgccccatctcgctggacgtgatgcgctcgcccgtgagcctctgcaccggcgtcacctacgagcgcgcctccatccagcgctggctcgactccggcaacaccacgtgcccggccaccatgctctcgctcccctccaccgacctcgtccccaacctcaccctgcgccgcctcatcgcgctctgggcgtccacggccgctccctcctcctcctcctcctcctcatcgcccgcggcggcgtccgccgtcggccccacgccggctgccgcggcggccgagctcctccgccgggtcgctgaccccgccgcggacccctgccccccgctccggaagctcgcggctttcctctccgacgacgacgtggacgagttcgataagaacgcgctggctcgggccggcggggccgcggagaccgtggcgtccgtgctgcggcgagcgggcagggaggccgcggaggccgccgtgcgggtgctcgcggccatcgcggcgtccgactgcatcgaggaggagagcaagaggcgagtggccgcggcgctggtcgccgacgcgccgtccacggccgcggccctggcgcgcgtgctgcggagcgccacctcgctcgaggcgcgggtggacgcggcgaggctggtggagtcgctgctccgcaatgcggcgccgggcgcgcgggcgacggtggcggactccgaggagctgctcggcgagctcatccgcctcgtgggccccgcggacgacaagggcggcctcgacaggcaggccgtggcggcgggcctgtcgtgcctggcggccatcgcggcgacgcggcgggcccgcgccgagatggtccgcctgggcgccgtgcccgccgcggtgcgcatcctggaggccgacgccggttccccgagccaggcgctccgcgtgctggaggcggcggtcgggtgcgccgagggccgcgccgcggtgtgcgagtccgcggggtcggcggtgcccgcggtggtgtccaagatgatgaagggcgggatggccggcgcggaggcggcggtgtcggtgctgtgggcggtgtgccaccggtaccgtgaccggcgcgcggtggcggcggcggcggcgtgcgagagtgggctcaccaagctgctgctgctcatgcagagcggctgctcgccggcggtgcggcagatgacgtcggagctgctaaagatcttcagggtgaacggcaagagctgcgttgcagggtacgactccaagaccagccacatcatgcccttctgatcctcactgctatcggtgatacaacagtggaaccagcatttgtctgttacccttttccagtttcgattttttttgattcgttggaagtgcatacagtagggaaaaaaaaggaaagaatgagttctcttgtagcaacacaaaacttgtatatgaatagaggattttggtagaaagaaatcaatggatgaaacaaattcagcttc

SEQ ID NO: 26400 - DNA, 1339 bp, Zea mays
  Clone ID: LIB4171-046-F9_FLI
gacagctccatcgattcatccaccgctatctctctctctttcaactgcaagggaaaccgagctcaaagtggcaaccatcaatggatattatggcgcttaatgcgagagacgaggagcagtacgggaacaaccatctcgggctcgggctgagcctcagcctcggcctcggcgtcgccaccgcggctccggtcgaggtcgagcccccgccaccgcccgcggcggcggcagcagcagcagcagcgagctatcagcgtcgcgcccatcacctccctccccgcgccgagtggtggaagtggaacggccccggtctcttcttcgggacgacgatggatccatctctggagaggaaccagcagcagcagcagccggcggccgcgcgccacggccacgagatgccgttcctgcggggggtggacgtgaaccgggcccctgccggagagaccaggaggggtagctgcagcgaggacgacgaggagcctggcggcgcgtcgtcgtcgccaaacagcacgctctccagcagcctcagcgggaagcgcgcagcgccggcgaggagcggcggagaggtggccgaccacaccccgagagccggaggcggcagcgacgacgaggactccggcggtgggtcgcgcaagaagctccgcctgtccaaggaccaggccgccgtcctcgaggagagcttcaaggagcataacacactcaaccccaagcagaaggcggcgctggcgaagcagctgaacctgaagccgcgtcaggtggaggtgtggttccagaaccgcagagccaggacgaagctgaagcagacggaggtggactgcgagttcctgaagcgctgctgcgagacgctgacggaggagaaccggcggctgcagcgggaggtggcggagctgcgcgtgctcaagctcgtggcgccgcaccactacgcgcgcatgccgccgcccaccacgctcaccatgtgcccctcctgcgagcgcctcgcctccgcgtccgcgtccgccgaccaggcgggccgtgcagggccctgctggggccctctccccgtgttcgtcgacggcccagcccggaggccgtgatccacgaccacgatatggcatgagatggatgcgcttgctaatcgctaccgctagctaagtagctagtgctaattagggctggatcttctttttttctttgtttggttcttattatactcgcaggctattacagcttagtagtgtttattagtccgatatgataaaaatcttcgttgtttggcagtgttttatttgctgaaaaatagataacgatgtcttatgtctttgtactcataagtgatgaaaattgtcttactactactttgcat

SEQ ID NO: 26401 - DNA, 2026 bp, Zea mays
  Clone ID: LIB4171-047-F1_FLI
catccgcacgctgccgctacggagtacggacagccagagccgaaaaaccgcagcagcgcttacagtcacgggcgcccacctgggcaggacaggagtacaggacactgccattgcccttccccgccgcgcccccccccccaagaccccagtactccactaacactcatcagcgcgccgcggggcgcgggcggacgtgcggcgctcctcggacggccgcgatggcggaagtggcggcgcggcgcgccgtcggcgtcccagcagggggcggcggcgaccaggcgaaccttgcggcggtggcggcggctatgcgggggcgcggcgaggtggacacgtcgtcgccgttccagtcagtgcgccaggccgtcgacctgttcggcggcggggctgccgccgtctcccagtggcgccacccgcaggctccgccgcgcgtccacctccgcccagaggaagaagaacttatgaaagttgaggaacaaacagtgaagctggagatggaactgttcgttaaggaaaaggaaacatttaaggtcttgaaggaactacaggaaacaaagcaggttatagatggcttgaaaatacaaatagagaaggtaacatgggaggacacaaatgctgcaaaaggccatgctgatacagggatggtacatccacttcctgctgtcgaacaaaataccgagccaccagtccagagcgcaaaaggtacacagtccccactaaccacgttgatcaagctcaatcaggcaaaagcattccttaacacggataccgtcaacatgctaaagagccagatacagaaggagaaaggctcgcttgagaaaacccgcgaaaggttacaattcaacctggggaaggcttcatcgttagaagcagatttgacgaaaactgtcgcacggctgcaagcagcaaaagctccacagcctgtccttgagccttctgaaatctggttgcagatgaagcacctgaatgctgacaaggcgaggcacaagaaggcgtcagaggatttgaggaacgagatctgtgagctgacagctgcaatcgagcacacgaggtctaagacgaagactctgcagttcagaatcctcatggctgagaaactgaaggaagcttcccaacgtggagaatctgttgctcttgcagagatggaaaaactgagcaacgggcgggacccgaacggcagtacttctgatgctgtcacactctccgttgaggagcactccacgctcgtgctcaaagcgcaagaagcggatggtgccgccaggaagaaagtggacgcggcaatgcaagggctcgatcaagcaaaccggtgtaagctcgaactcttggaaagagtagaggaagcaatggcggctgtcgagacgagcaggaaggctctggaggaggcccagaggagggaggagtcagagaccaaggcaaagctagtagccgaagagacgctccgaaagctgcggtcggaccaaataatccagaactggcgcccgaccaacagcagctccgtaaaattcaagaacacggcgctgctggcgccccggagagcagcagcgggcgctgggatatacgacgtgaacggcctgagcctggtggccgccgggccgaacagcgtgaagacggtgtccatcgggcagatcctgagcatgaagctggaccgcgagctcgagatgacgaggacgaccacgacgagcgcgaggaagaagaaggtctctctcgggcagatcctgagccagaagtacgagatgttctccccgctgcggatcgaccacgactgtgcctcgcacaggcagttccagcagccgaggaggaagaggatgggcttcgtcgtgtacgcgctgctgctcgcgcggcagaggcataggaggcggaaggctgcctcctgcactcgtggtggcttgagctagctagctagtttggatggtcggtgggtgctcagccgcgtcgtagtcgtttatatgcttttattaagagataagcgatcggaataatcgttatatttgtaatatagctagttctatgaacaaaaagtggtattttt

SEQ ID NO: 26402 - DNA, 1626 bp, Zea mays
  Clone ID: LIB4171-049-C2_FLI
gcggagtccgctgaaattttggtcgccccatgcccgttctagacgccatggacgatgcggcggcggcggcggtagataggcacggcggcttctagaccgtctccgttttctgcgcgttggccgtcgggggaagtacacaataaacaaagcaagagcagaggtccaactgggctgctgcgtcctctgcctcttctccttcctgtcgttctgcgctgccccgacccccgagtgcccctggtcttgtcctcctctccctgctgacctcggagcggagcaagcagccgccaggagggaaggatccatggccgggagatcgcggtacgacaaccccttcgaggagggcggcgccgacgaggtcaaccctttcgcggaccaagctaagagaggaggatcgactgctcagtccggctactctggtggcgcgttctacacgacgcaatcgcaacgccctgctcctcctagcacacgcctttcgcctcttcctcctgaacctgccgacttctacaacgacttcgctaccccagtggatatccccatggacacaaacaaggacatgaagacaagggagaaggagcttctggccaaggaggccgagctgaacaggcgtgagaaggaaataaaaaggcgagaagatgctgcggcacgagctggtatcgtgttggaagagaagaactggcccccgtttttccccatcattcataacgatatcggcaacgagatacctgtccatctgcaaagaacgctgtacgtcgcgttcgcgtcgctcttagggttggtcttgtgcctgttttggaacataatctgcgttaccgctgcctgggcaaaagggtcagaaagaacgtgtgctgttttgttccttggtgcaggtccaaagatatggttcctcgcaatcatatacttcatcctcggatgccccggtgcatactacctttggtaccggccactataccgcgcaatgaggaacgagagcgctctcaagttcggatggtttttcctcttctacttggttcatatcgccttctgcgcgtacgcagctgtttctccttcaattctcttcgtgggaaaatcgttaaccgggattttgccagcaatcagcttgataggcgacagcgtcattgttgggatcttctacttcattggctttgcattgttctgcctggaggctttgctaagcgtgtgggtcattcagcgcgtctacctgtacttccgagggagcgggaaagaagcggagatgaggcgtgaagcagcacgcggtgcagcgagggcagcgttttgatgaaaaccgtatatagatgatatatataggcacgacttacatactgttcataatagtttgaagtgctttaggtcaagaggcatgtgtgtacagtagggttggcgtcttgtacatctttaaggccggtttggtgaaacatggaaatggaatgaatccataaaggagagatccgttgttattcaaaattaaataacaaggatctcttctccatgggtcccatccatttccctctccaccaaaccagccctgagttcctatcgccacggtgttttgagccctccagattgatcaatcgtggtacatatgacagtgttagtatatggagtaaatacacatggacgggtaaacct

SEQ ID NO: 26403 - DNA, 1831 bp, Zea mays
  Clone ID: LIB4171-050-A8_FLI
aggagacagcgtccgcctacggcctatccgcgtcagcccgccggcgagtcgcgcacgagacctgcgaggcgcgatggcaggccgcggcggcgccggccggcggcctcgcgccgtcttcatggccttcggcactcagggcgacgtcttccccatagcagcgcttgctgcagcttttgcgtgtgaccaacaggagtatgctgtggtgttcatcactcattcagcgcaccggagtttgtcagcacatctagcagccagcagtgttagatacatgcctgtgtcaagcccgcctgtcctcgctgccgaacagttagagaatatctcaagtgattctattcaatcaaaccatgagcgtgagtccttttcaatgcggaaaaaagccattcaagcggagcacaggaaagaatgcttgtcttttgtggaagaagtttttggaaacgacccaagcatcagtggggattttattgtgatcaatttcttcgctttggaaggttggcaccttgcagaactattccaagtaaagtgcgtcattgctgctccctattttgttccatatagtgctcctacatcattcaaacgccaatttaaacaaacttttcctctactttacaagtactttcaagaagctcctgcaaatacggtctgctggactgacattatccattggatgtgggcactcttcatggaaagttggggatcatggagaaatgattgtctgaatcttagccccattcctttcacagatccagtaaccaatcttcctttgtggcatgtgcgagaggagtcacctttattactgtatggtttcagcaaagaaattgtggagtgcccaggatattggccgttcaatgctcatgcttgtggcttttggtttctacctatggattggcaattttcttgtgacaaatgcatggagttgtctggaaatatcaattcttcatttggtggtatgttgtgtgcaaaccattcttccctggaacacttcctcacaaggaatgcttattcatcaagacctatatttgtaggattaagttccattggtagaatgggctttcttagaaatcctaaagcatttttaatggtgcttaaggctgccatagagtcaacggattatatgttcatccttttctcatctggatacaagccattggattctgcaattcaatctattgcttcatcagtaaatgaatcaagaggggtggattcaccttctcttggtggtgacagcgctctcctttttaatggccgccttttctgctttttaggatcaataccgtacagttggctttttcctaggtgtgcagccgctattcaccatgctggcagtggatcaacagctgcagcactacttgctggtatccctcaggtaacatgccctttcatgatggaccaattttactggtcagagaggctacagtggttgggagtggcgcctgaacccctacaaagacaaaatctagtcccagataatgatgacgccttgagcatccacaatgctgcagatgtgctagttggagctatcaggtcagctttatcgccggaaaccaaagctcaggcggccagaattgctgataggctttcttctgaggatggaattggagaagccctcaggatattgaaggcgagagtgttgactcagaacaaaatcatcagctcattcatcgcaagtaaataattagtactgatatgatatgaggcattgatttaaaccactaaatttaagaaatggacttctaatgcaccgccccatgtaagatagagtaatttctcaaaccaatcaactttacggggcgtttggatccctttattttagaggaattagaattcactcaat

SEQ ID NO: 26404 - DNA, 1705 bp, Zea mays
  Clone ID: LIB4171-050-H10_FLI
cgctgggccaccagctttgaccgccgcctcccttcccctccgctactgctcctccccaccccactcccccgcaggagcggcggcggcggcggcgaggtcgtaccccacatcggcgagcggcggcggcaccgccggaggcaaaggcaagatgttcgggcgcgcgccgaagaagagcgacaacaccaagtactacgagatcctcggggtgcccaagtcggcgtcccaggacgatctcaagaaggcctaccgcaaggctgctatcaagaaccaccccgacaagggcggtgaccccgagaagttcaaggagctcgcacaagcctatgaggttttgagtgatccagagaaacgtgagatttatgatcagtatggtgaagatgcccttaaggaaggaatgggcggtggaggatcccatgttgatccatttgacatcttctcatcattttttggaccctcttttggaggaggtggtggaagcagcaggggaagaaggcaaaggaggggagaagatgtagttcacccacttaaagtttctctggaagatctttacaatggcacctcaaagaagctctctctttcgcgcaatgtcatctgctccaagtgcaagggcaagggctcgaagtctggtgcctcaatgaggtgccctggttgccagggctcaggcatgaaagtcactattcgtcagctgggcccttccatgatacagcagatgcagcagccttgcaatgagtgcaaggggactggagagagcatcaatgagaaggaccgctgtccagggtgcaagggtgagaaggtcattcaagagaagaaggttcttgaggttcatgttgagaaggggatgcaacacaaccagaagatcaccttccctggtgaagctgatgaagcgcctgatactgtcactggagacattgtattcgtcctccagcagaaggatcactccaaattcaaaagaaagggtgaagatctcttctatgagcacaccttgtctctgaccgaagcactatgtgggttccaatttgttcttacacatctggacaacaggcagcttctcatcaaatcagaccctggtgaagttgttaaacctgaccaattcaaggcgattaatgatgaggggatgccaatttaccagaggcctttcatgaaggggaagctgtacatccatttcacggtggagttccctgactcgttggcaccagagcagtgcaaggctctcgagacagtacttccaccaaggccttcatccaagctgacagacatggagatagatgaatgcgaggagacgactatgcatgatgtgaacaacatcgaggaagagatgcgcaggaagcaagctcacgctgcccaggaggcgtacgaggaggacgacgagatgccgggcggagcccagagagtgcagtgcgcgcaacagtaagcagactatcatcaaggcaattgggaggggtggtgcccttaaagcatgggagtgatctctggttttgctgtcgccgagctgggaaataggaagctgaatcgacctcgcaagcggggaatgtatccttttttgctgcaacataaaaaatgctacccaggcatagctgggtaccttttaacttctgtttgtgggatttgctagagtgatggtttcgatatatagggggacttgaatgtctggaatgctacggtataacgcacatttgggtgcaatgtctgttgcattgctgtctgaatg

SEQ ID NO: 26405 - DNA, 1822 bp, Zea mays
  Clone ID: LIB4171-052-B9_FLI
tcggtacggcactgagcatcggtgaggcaggcgacgcgcgccgcgcgagagaggcgcctcgcctggggagacagggagggtggccgagcccgagatggccgccgcgagggaggaggacgaggcggcacggccgctgcttctgctgccgcggacggcgcaggaggaccagaagtggtggaggcggtgggcgcgcgaggccgggtgggtggggtacctggccctgcccatggtggtggtgaacctgtcgcagtacgccgtccaggtgtcgtccaacatgatggtggggcacctccccggcgtgctcccgctctcctccgccgccatcgccacctccctcgccaacgtctccgggttcagcctcctgatcggaatggcaagtgcactggagacgctatgcggccaggcctacggtgcgaagcagtaccataagctaggcctagacacctacagagcggtcgtcaccctcctggtggtctgcgtccccctctcgctcctctgggtgttcatggacaagatcctggtcctcataggccaggaccctctcatctcgcaaggcgccgggaggtacatggtctggctgatcccggggctcttcgccaacgcggtgatccagccgctcaccaagttcctgcagacgcagagcctcatctacccgctgctgctgtcgtccgcggcgacggcggcggtccacgtccccctgtgctacgtgatggtgttcaagaccgggctcgggtacacgggcgccgccctgaccataagcatatcgtactggctgaacgtggccatgctcgtcggatacatcgccttctccagctcttgcaaggagacgcgcgcgcgcccgacggtcgaggtcttcaggggagtcgacgcgttcctgcgtctcgccctgccttctgcgctcatgatgtgtcttgaatggtggtcgtttgagctccttactctcatgtcagggcttctacccaacccagagctgcagacctcagtgctttcgatctgtctcacgagtgtaacattactcttcactataccttttggccttggagctgctggaagcacgcgagtggcaaatgagctgggcgctgggaaccctgacggagctcgatcagcagtccgcgtggtgctgtccatggcggggatcgacgcggtcgtcgtgagcggaagccttctggcggcccggcgcctcgtgggcatcgcgtacagcagcgaggaggaggtcatatctgcggtcgccgccatggttcctctggtctgcatcaccgccataactgactgcctacaaggaatcctctcaggcgtcgcccgcgggtgcgggtggcagcacctgggcgcgtacgtgaacctcggctcgttctacctgctggggatcccgatggcgatcctcctcggctttgtgctgcgcatggggtcgagggggctctggatgggcatcgtctgcggctccctgtcgcagaccacgctcatgtccgccatcacgttcttcaccgactggaacaagatggctgagaaggctagagagagggtgttcagcgacaagcagccacaagagccggggccatgatttgtacgccgactagcggcagctgcacatttttccagaccggttttgcaggggatcggaaggcgtttgcttgtcattccgtcgcattcacgaggagggagggggtcatgcctccctcctgcaaagtttctcacaaggcaaatgggttcttgctttgaacttcgccttcctacgtttgatttttgtatcatgtaaagtggagaggaacatggaacgaacaaattggacctcatatatgactaacaaggcgaaaatcatctcact

SEQ ID NO: 26406 - DNA, 2648 bp, Zea mays
  Clone ID: LIB4172-002-A12_FLI
ctgctcccatccccgcctcgtccgttaccataaatctagcttgggctctaatctaaccgagggaacaggtgggatatgaggaactcggtgtcggagcggagcttcctcatcgagagcgacgatgacgacgatgccgccgtggaggacgggaagcggcgcggccttggcggcggcggcggcggcgacgacgacgacgacgggtccgactcctcgtcgccgtgcgacagcccgcgggtggtggcggcgcggtgcagccagccgagttcgtacacgcagcaatggccgcagagctacaggcaatccattgacatgtacagcagtgtgcactctcccaacctgagcttcttgggcacgccatcactgagccggttgtccaactcgttcctcacaaactcattccgggggaagccacctgagatcatctccagcttaatcaagccattactgccgacaagcattgcttccgccagcgatgaccagcagcagcagcagcatgaggacgtccggaagagctcccattacctgccaccatcacgcaaggcgtcgtcgctgcagaggatccccgaggaccagagacctatggttgggggccatgaggtgggtccctaccggcagtgctcctatacccaaggggtcatgaacggagtgaatgtcttatgtggtgtggggatcctgtcaacaccttatgctgtcaagcagggtggctggcttggactggtgatactagcggtattgggtgcactggcttggtacactggcatacttctgcgccgttgcctggacagcaaggatgggctcgagacttaccctgacatcggacatgctgcctttggtactgctggccgtatcatcatctcggcaagtattttctgcactagcaacgctcaccagttgtcagttttgtattattcatatcatgcagtgtaatggagtgtggttttttttttttgctaactcttctgcttttgtatgcctttgcaacctgcagataatactgtatatggaactatatgcatgttgcattgagtatttgatcttagagagcgataacttatcaaagttgttcccaaatgcacacctaaccatgggtaacttgactctggattcacatatgctatttgccatcttgactgctcttgtcgtcatgcctaccacttggcttcgtgatctcagctgcctcagcttcatttcagctggtggagtcattgcatctatcgtcattgtctcctgcttgttctgggtgggacttgttgatcacgttggcacagtcgagagtgaagggacggcactgaaccttcctggaatccccattgccatcgggttgtatgggtattgctactcaggccatggagtgttcccaaacatctactcttctctgaagaaaagcaaccagttccctgctgttcttttcacctgtatcgctctgtctactgttctgttcgctgctgctgcaatcatgggatacattatgttcggtgaatctacagagtcccaattcacactgaacttacccccaaatcttgtggcttccaagattgcggtctggactacggtgacgaatccaataaccaaatatccttggacttctacttcagctttctgtgtgcatttgttcccatacttaacaagtaacattacatgatatcttactttctctaatcacatgtaactccatgtagccatctaggtttgtgctaatcaaacatattttaaattttgactagaaatatctataaaaagtattatcttaaataagcagagttatttggttttaataaagaatttagcaatgtcaatgttatttttctcgttctatataaattttggatattcatggtcaaagttaaaaaatatttgacttaggacaaatatagatatacctgcattgttattttagtgagtcctatagttctcctccccaaactttgctatcaacatctaacagttaatccagttttcatgaataaatgtagtttcaatcgttctgtgttgtttaataatgttttatggatcgcatgctatgtccttaactaatacctacatatgcgctgaccatgactcctctagccctgagtttggaggaactgctacctccaaataagcagacatacccgaacataatgatgcttagatccgctctggtggtatcttcccttattattgctctgtccgttccattttttggacttgtcatgtcactggtcgggtcttttctcaccatgtttgtggcctatattctaccatgtgcctgctttttgtctatcctcaggagtaaagtgacctggtatcaggtagtactgtgtgtgttcatcattgtcgttggactttgctgtgttggtgttggcacgtactcttctctttctaagataatacaaaagtaccaatgaattgtgccctagaattatgtatgatgtgtccatgtgttttcgaatagccagttttcttttctgggatggtggcgctggtctggaagggggagggggatgtcattctttgtaaattttttgttggcatgagaggaagtggaggaatttgataaaatagggcaggttgtgttatcgaaggagtattttgtctgaaattgttctcgtgacggtaggtgctgctgggaacgaccttctgttgacgctgccattttcgtttgaccc

SEQ ID NO: 26407 - DNA, 3546 bp, Zea mays
  Clone ID: LIB4172-003-B4_FLI
gcacgaggcgcaaaaaggcagcaaggtttaggagatctcacccagctactaacaaaggaacaagctgacctgggggtaatctcagtgtggggaacaggcagtgaactcggtacaacatccatcatcagaaaggcctaccaggacccagaactctgtcaaaaatttgaatgtcgtggctgggtgaagcttacacaacctttcaatcctcatgagtttctccgcagtatggtcgcccagttctacgcaaacagttgcctgcaaaatggaatggttataaatgtcgatgaactgaagaggattgaggaaatggcgacaacgggaggcggactcattggggcatttatggataaagtaaatgagaacagatacctaatcgtcctggaaaatctgtccacaattggagattgggacaccatcggaacttacctgccagacaggaagaatggcagtcgggtcattgtatccacacagcagtgtgaaattgcaagcttgtgcattgggcattcataccaagtagcagaggtgaagcagtactcagcagagcactctgtatgtgtcttcttcgaggagggattgcaaggtaatggtgataaaagcatggaatctgatagagtagtagacaacaacaatgaaatgtcaatgcaggatgaaataacccacggtactggctttctgtccgacagaattccaacatctaaacggaaggatgcctctgattgggtgaagaattttcaacttgttgaacgcaagtcagaaatgaaccaactcggtaactatattgctaaggcacgtgtctatggtttgcaaatactgtctgtgtgggggatagctggtgttgggaaatcagccctcgttaggaacatgtactttgacagaattcatcgaaatgaccaattatttgagaagtacggttgggttgatgtaacccacccattcaatttaagggacttctcccggagtttgcttttggatttccattcagaacctgttcaagccatgggaatcaaagaccctactcaagagtgtcataagattctagaagataaccggtgccttgttgttattgatgatttgcagtccattgaagaatgggacttaatacaagctgccttggtgtctagaccttctagaagtattatcattgtcattacaactgaagcaagtatcgccacatattgtgcagataatgaaggggtcgtatttaatgtcaaaggtctagaagacaaagcagccctcaagcttttcaaaaagcaggtacataggcaaaaaccatcatctcctataaaggactccatagatgaagagctacaagaacttattttgaagtgtggtggtcttccaaaagttatagttgccgtagctaactttttggcacctaaaacagtctcatggatggacagtgcaagttctatgaatctcaaatttatgcaagagctggagagcagcccagagtttgcttgcctgcagccactctttggttggctgcactcctactttcgaacatgcccggattttctcaagccatgtatcttctatctgtcaatttttcctcgagatcacagtatccggagaaggcgattggtgagacggtggattgcagagggctatgccagggacacggacaaaatttctgcagaggaaagaggggagcagttcttctgcaggctcctcgatctgagcataataatgcagaaaccatattcagtcaccaccggattcagagacagcagaatgactttgtgtcaagtcaacagttttgtccgagagtatatcatctctcgtcaaatggaagagaaccttgtatttgaactgggaggcagttgcaccctaacctctcagcgcatggggcgtcacctcatcatactgaaaagctgggacagagacagaattgtgtttgagagcattgacttctcaaggctacgatctttgacagtgtttggagaatggaagccattcttcatatctgataggatgaggttgcttcgggttctggatcttgaggatgcatctgatttaaaagatgaagacctcaaacaaatgatgaagctgctttgtcgcctcaagtatctttccctacgaggatgcactgggatctatagcctgccgaattcattaggttgcttgaggcagcttgagactctggatgtcagacatacagccatagcaaccatgccaaggactatcaccaagctaaagaagttgcagtacctccgcgctagtaccaccaaaccaactaaggaacaaccaacacccgatactgctgttacacccaaaccaacaaagaaacaaccaaatccacacacctcggtatcatggacgtcatccttgttccacagacatcgacaactagagggtgttgtggttcctactgggctagagaaattgactgcattgctcaccatcggtgttgttaatgtcaattctgctcgggggaggtccatcttgaaagaggtcaggaagctcacccaattgcgcaagcttggagtgtctggaataagtaggaacaacagcaaagatttctgtttggccatctcaagtcgtgcgcatttagactccttatcagttaagctcaagaaggacaatcaggactgcttgtgtgtcaccccagatggctaccttccccccaagaacctacagagctttaaattgtatggccttgcagacagttttccaaaatggatcaatcaacttgaaaatctcaggaagttagttttggagatgactatattaacgcaagatactatcaagggactcaaggatcttaaagtatgtattctgcgtctaattaccaagcagcttcctgatggtaagctcaatttttgtgtcatgttgcatgggcagcaattacgttgctatgaaacagtgaagatactcgagatctcttgcagctccagcttagatgtggcttttggatcacaatcactgcaaaatcttgagctgctgaaagtttcctgctgtagtggttcagggtcggtaatgaagctctctgggctagaaaaactgtctgaatctgaactcaaggaagtccagattaagggttccgatgatttcatagtaaaaacagatgtggaggaacaacttgccaggcacccaaagaaacctgttttgaagcttgaaaaggtactgtcgtccactggggattttgagctctagagtgtcagtttcctatcgttacgatatcaaggattagtgactggtgctgtttgcttcctcttatttcttcagtgctattcgatccaatctaaccgattagaaagatcagttatgcagccatcgtgccaataataaactgtgaaacctgaaagcttccttcttggccacatattgatcagtctatttttcttgtgcctgtggtttatttattcctactgcatagtcccagtctggatttgttctaaaagatatggatggtgtgcaaatgtgtttatgtatatagagaatgttggaccagtgaattgctattgtacttttctgttgctctcatgtattgtagtttcgtggtgtatcttgctacatccatgttctcttgtggttgtttgtgtgtac

SEQ ID NO: 26408 - DNA, 1268 bp, Zea mays
  Clone ID: LIB4172-007-A12_FLI
ggcatcagttacactagtagtgctcatctcgctggtactgctgagctgaccaccgccgatccttccaagatggcgaggcagggtgtcgtcgcttccatgcatgcgctggcattgcttctcggagcattcgcagccattcctacaggagtccaatccatcggcgtgtgctacggcgtgaacggcgacaacctgcccccggcgagcgacgtggtgcagctgtaccagtccaacggcatcaacctgatgcgcatctacttcccggacgccaacgcgctgaacgcgctgagcggcaccagcatcgggctcatcatggacgtgcccaacacggacctcgcctcgctggcctccgacccgagcgcggcggccgcctgggtgcagagcaacgtgcaggcgttcccgtcggtcagcttccgctacatcgccgtgggcaacgaggcctccggcggggacaccggcagcatccttcccgccatgaagaacctcaacgcggcgctggccaacgccggcctgggcggcagcatcaaggtgtccacggcggtgcagagcgacgtcacccagggcttcccgccgtcgcagggcaccttctcgcagggctacatggcgcccatcgcgcagtacctgcagagcaccggcgccccgctgctgtgcaacgtctacccctacttctcctacatcggcaacccggcccagatcgacctcagctacgcgctcttcacctcgccgggcaccgtcgtgcaggacggcagcaacgcgtaccagaacctcttcgacgcgctcgtcgacaccttcgtctccgcgctccagaacgccggcgccggcaacgtcccagtcgtcgtgtccgagagcggctggccgtccgccgggggcgacgccgccaccgcggccaacgcgcagacctacaaccagaacctcatcaaccacgtcggccagggcacgcccaagcgccctggccccatcgagacctacatcttcgccatgttcaacgaggaccagaagacgggagccgagtcggagaggcacttcggcctcttcaacccggacaaatcgccggcgtaccccatcaatttctcctaattcctaaacaagacgccgaggtccattccaagacatttataaggcaatacacacacatagatatatacatacacatacatacgggagaaagtagaataaataaactgcctgcagtagaatgcaaagtgtattcatgtaaggcaactgcttcgattatttcctaaagatcaataacaagaagtacaattatttct

SEQ ID NO: 26409 - DNA, 3125 bp, Zea mays
  Clone ID: LIB4172-009-B1_FLI
cccaggccccccaactctcttcctcctctccctccccacaccaattcccattcccaattcgccctcctcaaatccggcgcccgcattcccgaccaccccgcagatctgggatccgccaccgccggatccctcgctgcccgcggcgccccgggacgcgcgtgatcctacccacaaccgtcaagttggcgccccagcgaaggtcgcagcgcctctccggcggcggcgcgggctccgccgccgcgcagccgcccggagcctccggcgcacaggcagcgatgggtgactcaggcgacgccgtcatggcgcgctggctgcagtccgcggggctgcagcacctcgcgacctcctccgccgctggtgctggcggtgccgactaccgcggtgggatgcctgggcttgggggcgctggcgcggggagcatgctgtcgagcctgctcatgcagggctatgggccagaatcggttgaagaaaagcatagactttatactcttctaagaggtttaaattttaacggagagtctgcacccacatcaatgtctgagccttacacaccaacggctcagagctttggtggtgggaaccctgtggaggggttttattcacctgaacttagaggggaacttggtgctggacttctagaccttcacgctattgatgatactgagcttctgtctgaggatgtagcatcggaaccatttgagccatcaccttttatgccaaaggatattgatgatgatgatgaggacgtgatatcagggagtcaacaagcaccattagataattatggtttagtgaccagtgaaaaagagagcactactagagaaaataatgttgcaaagattaaagtagtggtaaggaaaagacctttgaacagaaaggagctatctcgaaaggaagaagacatcataaccgtgcatgattcatcatgtttgacagtatacgagcctaagctgaaggtggatttgacagcttatgtggagaagcatgaattttgtttcgatgctgtcctggacgaacatgtttccaatgatgaggtttaccgtgaaacagttgagcccataattccaattatatttcagagaacaaaagcaacatgttttgcttatggtcaaacaggcagtggcaagacatacacaatgcaacctttgcctctgagagctgcacaagacatggttcgtctattgcaccaacctgtctatcggaatcagaattttaagttgtggcttagctatttcgaaatatatggtgggaaactctttgatcttctatctgacagaaggcaactattgatgagggaagatggcaagaaacaagtttgcattgttggtctacaggaatttgaggtttctgatgttcagattgtcaaggaatatattgaaagagggaatgcagccaggagcacagggtcaacaggggccaatgaggaatcatcaaggtcacacgctattctgcaactggctgtgaagaagcatatcatagtaaaagataccaggagacagagagatcgtgatgctaatgaagctaaaaatacaaaggctgtggggaaaatatcatttattgatcttgctggaagtgagcgtggtgctgatactactgataatgatagacagacaaggattgagggagcagagataaataaaagtctgttagctcttaaggaatgcattcgagctcttgataatgatcagatacacattcctttcagaggaagcaaacttacagaggttcttcgtgattcatttgttggtaactctaggacggtgatgatttcttgcatttctccaaacgcaggctcatgtgaacacacactaaataccttgagatacgctgatagggtcaaaagtctttccaagggtggaaacacaagaaaagagcagcccacaggaccaactaccacttctagccgggagtcttcgtcagctccatcatattcattgcctgctgaagctgaagaaattcctaaccagattcaagagaagagaccagttgatacttatcggaaaggcactgaaaattttacctccaacccttccgcggagcctgatagaaattccttcagtatggttccaaattattctaataaagggagagaagacaatggtgcagcatctggtaatgatagggagaggtatgatttgaagtccacccaaactgcttacactagtaaggcacagttggttcagaattcaacaaacacacaggaggagaaagtcacaaaagtctcacctcctcggagaaaggcttataaagaagacaaatctgatcggcagggcaactacgtgaaaaaggataatggtcctgagacaggtcggactgggtataagatacaacaggcaaagcagctgcaacagcagcaaaggccaacatctgcttcagcttcgtcaaggcaatctgaaaaggaaagttcttgtgatgatgtagaaattgatgcaattcttgaggaagaggaggccctcattgcagctcacaggaaggagatcgagaatactatggagatcgtacgggaagaaatgaaccttttggcagaagttgatcaaccaggtagcctgattgacaactacgtgacccaactgagctttctgctgtcacgcaaggctgcaggcttggtcagcctccaagcacgcttggcacggttccagcaccggctcaaagagcaagagatccttagccgcaagaaacctcccagatagtatgatgatcagcaatgactctgtccttgtgccttgtaatctgattgcttggagctcagttgtggtccatcagctgttttttacgtgtgcgctccagtaaattctatagccccaagcaggccaagacatgtgggagtggcttagggcggtcttgatgtcgagggcgtggtcctggttgatatcacctgacactttttgtcagggccgataaccagtttggtaatagtcctttttctatacagtggggctgcttgggtgtggttgtttttggcttgcccacttttacctttgttttctttttcacatattgtacgagggaaagctggaactgggattttgcagatatcagtgggtcgattttcgctggaggggtctgcggaaacagatacattgttgtcgtatattcattactgatattatttgcattgcggaagg

SEQ ID NO: 26410 - DNA, 643 bp, Zea mays
  Clone ID: LIB4172-017-E12_FLI
ctcattcatctccattcgaaacaccctcgcacccacactctcccttcgtccccagcctaaatccccgcaaagatggctcgcacgaagcagacggcgcgcaagtccacgggcggcaaggccccgaggaagcagctggcgaccaaggcggcgcgcaagtcggcccctgcgaccggcggcgtgaagaagccgcaccgcttccgcccgggcaccgtggcgctgcgcgagatccgcaagtaccagaagagcacggagctgctcatccgcaagctgcccttccagcgcctggtccgcgagatcgcgcaggacttcaagaccgacctccgcttccagtcctccgccgtcgccgcgctgcaggaggctgccgaggcctacctcgtcggcctgtttgaggacaccaacctctgcgccatccacgccaagcgcgtcaccatcatgcccaaggacatccagctcgcccgccgcatccgcggggagcgcgcataggcggcccgccggataggccggtggcccgttgcgcagtctcttctcggaagtttgtactagtggtcgggtcgtgtggaaggagtggtgtactgatctgcaatgtctcaaaccatgtcaacctctttgttgtcatcaatggaaatcgctacttatgtgtgct

SEQ ID NO: 26411 - DNA, 1342 bp, Zea mays
  Clone ID: LIB4172-018-F1_FLI
cccacgcccccttgctacccgtggccgcgcccaccgggccacaccatcgagaagattcttcccctgccgcgcgtcgctcagccccgatggatcgctggccatgctcggggctcccagtcccaggacggccccaccgatgaggaagccgtacatgcgggagcactcttgcctcatcttcccgcccccgcgcggtcgacgcccgctggcggtcatcaagttcctcggcggcgccttcatcggcgccgtccccgaggtcacctacggctacctgctggagctcctggcgctggagggctttgtggtcgtgtgcgtaccatacaacgtcaccttcgaccacgaggccgccgcgcgggaggtattccagaggttccatgcctgctacgacgcgctgctcgcgtcggggctcccggaggccggcctcagcgccctggacatcgcggagctcccgctctactctgttggccacagcaatggggcactgcttcagctgctagtgggaagctacttctcagaaaggataccagaggctaatgccattgtctcattcaacaataggccggcatcggaggctgtgccttactttgaacagatagggcccctttttaggcaattgatgcctatgatggaggcctcgcctgtttactcggtggccagaaatgcatcaggagatgcatggaaagctctatttgatttagctggaggtcttttacgtgagtatgatcaagaagctacggtatctctgagcaaatttattgatcagttaccatcagtaatgaaccaggttacagaaggtgtgtctgaatttaaaccaacaccacctgaaaaccgtgaattctgcaagaattcctacagtgtacccaatacattattggtcaaattcactgtagatgctattgatgatacagacatagttgaagatgtcctgagaccccgcgttgattcaatcggtggacaaataaagaaggtcatactgtcaggaacacatctaactccatgtatacaggatgtcaaatgacaagttggttcagaatacactccagcagatgccattgcacaaggattgaaatcattggctcttagtgaaacaagagtcctctcaagaactattgctgattggtttacatccctttaaattttgagttattcaatacatccgttgaagtttggagttcttcttacaaaggaatgccttcatcaggtctcaacttcccattttgttgacgcagtccactactgtaatgagatgtaaggatacaatgtattatgtatggcacataagagcagtgcatttttgggctgtgctgagctggtcatgctcacccgcaggccctagccgtactac

SEQ ID NO: 26412 - DNA, 3085 bp, Zea mays
  Clone ID: LIB4172-018-F12_FLI
ctctctctctctgctcaacgcctcaacccaacccaccgaccagcccgaccggggggcggggggcgatggaagcggcgggcaacgaccggagggaggcggcgctaggcgccctctccgtgctccctgacgaggtgctctgcgccgtcgtcgacatcctctcgcccgctgacatcggacgcctcgcgtgcgtcagcagtgtcatgtacatactttgtaatgaagaacctctctggatgagcaaatgtctttcaatcgggggtcctcttgaatacaaagtttcctggaagaagacggcactatgtaggcttggtctatgttcagaaaataaggagatttggcagaagcctcgtcagttcgatggctttaattctttgtatctataccggagatggtatagatgttttactactttgaatagtttttcgtttgacgatggacatgtggaaaggaaagatgactttttattggatcagtttcgttctcagtatgatggaaaatgcccagttttggttacgaagttggccgaaacctggcctgcgaggacaaaatggacactgcagcaactgacaaaggattttggggaagttccattcaggatatcacaaagaagccctcagaagataacaatgaaactaaaggattatgtttcttacatggaactccagcatgatgaagatcctctatacatatttgatgataagtttggagaatcagcaccaacattacttgaagattatagtgtccctcatttattccaagaagacttttttgatatcttggattatgaccaacgaccagcattcagatggcttattattggaccagagagatcaggtgcttcttggcatgttgatcctggactgacaagtgcatggaatactcttctttgtggccgaaaaagatgggcattgtaccctccaggaagagtgcctggtggtgtcacagtacatgtaaatgatgaagacggtgatgttgacattgaaactccgacatcattgcaatggtggcttgatatatatccacaccttcctgaacatgagaagccattggaatgcacacaattgccaggagagaccatttttgttcctagtgggtggtggcattgcgttctgaatctcgagacaacaattgcagttacacagaactttgtaaaccagtctaattttcagcatgtatgtttggatatggcacctggtcacagacacaaaggagtttgccgtgctggcttacttgctgttccaggaaaattcgttaaagataataaaaaccatcaatctgtcacaatgagtggatggaaccaccctgatatgagtcgtaaggaaaaaaggcttaaaggttctgaagcactaagaatctcaaatagcataaatcattgttctgcatttgagttctcaggtgttcaagagagtttggagaatcaagatttctcatatgatattgattttttgtcacaattcattgagaaagaaagggaccattattcttctctctggagtccaactaattcaattgggcagagagaagcaagagaatggctgcgaaggctttgggttctgaaacctgatctgagagaactaatatggaagggtgcatgccttgcaataaatgttgacaaatggtattcatgcttagaggagatatgtgcatgccatagtttaccaccacctacagaggatgagaagcttcctgttggcactggtagcaacccagtcttcattgtctcgggcaatgtgattaaaatatatgctgaaggaggattggtttattctgtccatggtttgggcacagagcttgagttctatgatctcctgcaaaaaagtggttcacctttgatcaatcacattcctgagataattgctagtggcttccttgagtataaggatgatatctacagcacggttccgtggaatggaaaaggaataccagaaattttggttaagtactactcattggaggtttcttgtgcgaacagctgctttcctcttgggctttggagcaagcaacgatttgggatgtgtagttcggctgatgtttcagacagaccaatttggccttacatggtaacaagaaagtgcaaaggagatatttttgctcgcatccgcgatatgctgtcgaagactgatattcttcatcttgcatcatccttgggagttcaaatgcgaaacatacatttattacccctgccacccgtggagcatgtacctgaatctgggaacaatgatgtgaaagaagtggtaggaacatgtgatgataccacggttctacctgaatggcagcaacttgtctctactctaaataggaggaagcagaatgtaaaaaagcacctagctaactggggggactctgttccacaagttctagtagaaaaggctgaagaatatctccctccgaatatgggcttcctcatcaagtttgttaaggatgatggtgagttgctgtacccatgcccctcttggatacattcagatataatggacgataacattcttatcgaggggatcataaaactgagttcttctggtgagagggaaagagtttatgactcagatcgggacaaaataaatgcaattcacatcattgatttcagtgatctgtccattggggatcctatatgtgacataattccgctgcacttggatattttccggggtgatagtgaccttctcaaggaatttctacggagctatcaacttccccttctgaggggggaatcaaccaccgatgtctacagatcagtgcgaaactcgaagttcagcagggcatcatatcgcgcgatgtgctactgtatattacacgaggacaacgtcttgggagctatattcagcctgtggaaggagatgagggctgcaacgtcctgggaggacgttgagaacctggtctggggagagctgaaccggtaccaggactctgcagttcgctcagcataactaaacaccagcaaaaaaaaaaaaaactttctgaacatacgtgtatgttgttgttcctccgacgaatgtaacttccaaatataaaaaaaaagtgtagggaaaataacgaaggctcgacacggcatgcccgtattttcctatggctggtgataatattg

SEQ ID NO: 26413 - DNA, 1486 bp, Zea mays
  Clone ID: LIB4172-021-C8_FLI
caccaacacacccggccatcttctcccccttccctcccaattcaaggcggcccggaagctcctgcagccttccggaagggcttcgaggccgaggcgggcacgggatgtgggggcggcactactggggcggcggccggcgcccaagctgggcgcccggagggaacggagccggcaccggcggcgtggtggtgatgttcgcgtggctgtccagccaggagcggcacgtgcgggcgtacgtggagctgtacgcggcgcacgggtgggcgtgcctcgtctgccactccgacttcctcaccctgtttttccctgagaaggctgccatgctcgccgacagggtgattggggagcttgtcaaggtgctgaagattacacctgtacctgttgtgtttgcgtcgttttcgggagggccaaaagggtgcacatacaaggttcttcagctgatcgagagaagatgtgaagggcaactaagcatggatgagtaccagctcgtacgagattgtctatgcggacaaatgtatgattcaagccctgtggattttgtcagtgacttgggcactcgcttcctcctcgatccaagtgtcctgaagatgtctgaacctcctcgtgtcttgtcatggatgactaagggcattgcctcaggtcttgatgttcttttcataaacaaatttgaagaacaacgtaaagattattgggaaacactatactcatcggtgcattttggtccaatactaatactctgctcagaggatgatcaacttgctacatattcagttgttcaaaattttggccagcatctgctagagcttggtggtgatgtgagcctaattaaatggcatagttctccgcatgtcggccactacaagcaccatcctgaggaatacagagctgctgtgacggagctcctaaagaaagcctcgacgctctacgcgagcagacgacaactcaacggacacgccgtgggcacaagcgagcacaccgacgcgcctgcatccacctccaagtccaacccacacagagatgccgcgagttctgtcggtcgtagcaggctgattcaagcaccggccgatccagccggccagtttccttccataccgagctccatggagtaccacgagagcagcagccaaggtccgccgcagccggagctgttcagcatgcccggcgtggagagctcgggcctgcgttgtgcggtgctggggcaggcgctgtacggtgtctgtgttccgaaggacgtagaagacggctgggacctcgcgccgccttccgcgtcgtcggatgcgttgtggggtgctgctgctgctgccgcgccgcctcgccgtggtagcttccgtccgatgagatgtgtacggcgctcgagattgtgatattgtgcgtgcgttttagtttaaaaattaaggtgagcaacaaatattgagaacggagggagtagtacgtattctctatacaaatcaatataaatatggtgatcgtaatggtctattcctcc

SEQ ID NO: 26414 - DNA, 1557 bp, Zea mays
  Clone ID: LIB4172-023-G3_FLI
tcgaaaccccagccccaggccgccggttgctttcgcttcgccggagaagagctgagcgcgatggcagcggcgcaggaggaagcggcggcggcgccgccgagcacggagagcgatgctaccgagacggaggaggcaccaccaggcggcgcggagagcgatgctacggcgatggaagcggcggcggagtactcgtggctccagctccgcttcgaccgcccccctcgccggctctaccacttcgcccgccagttccgctccgccacttcctctggcagcaatagtagcggcgagaacttcctcaagggcgtaaagtggtcgcccgacgggtcctccttcctcaccagctccgacgataactccctccgcttgttttacttaccggaggaagcgtacattgcggcggagcccgttgccgaggccgctgtcgaaagtgaagattcttatggagctttcattcaggcgaacgagggtgagccagtgtacgatttctgctggtacccgtgtatgtccttgtctgacccagccacttgtgtatttgcaagcaccagtcgtgatcatccgatacacctttgggatgccaccagtggggaactccggtgcacataccgagcatatgatgccatggatgaaataactgctgcactttcgatttctttcaattcttcaggatctaagctatttgctggatacaacaaagctataagagtgtttgatgttcatcggcctggcagagactttgatcagtattctttactcaaggggggtgaaggaccaactggtataatatcttcaatttccttctctccacaaaatgggatgcttgctgttggttcatacagccagacaactgctgtgtatgcagagaataatatggagcctttgtatgtcttacatggccagcttggtggtgttacacaggtgcttttttcgaaagatgggaactatctgtatactggagggcgcaaggatccgtacatattatgttgggatattcgcaatactgtggacattgtttacaagttgtacagatcagctgatactactaatcaaagaatacattttgatattgagccctgcggtagacatctagccactggtgggcaggatggcatggtccatgtatatgaccttcaaggtggtcaatgggtaaccggctaccaagcagcagctgatactgtaaacgggttctcgttccatccataccttccatttgctgtaacatcatccgggcacagaagatttggcatgcaagatgagtttgaagacgagttaaacttggcaggtgatgagaacagctgctctgtctggatgttttcttcctcacaagaagcttgaagcatttagtgaaaatattggatcaggctgaagctaagcgaagcattggatgcacattcaaatctattgtcactttgatgttcgtgtgcagagagcatcgcggcattgaccacttcctgttgtgttggctgtaattggtgtctgcaaaatgcaaatgtattcactgagatctatagaattaatgacttatttttttgacgaaggagcagagccccctatttc

SEQ ID NO: 26415 - DNA, 1002 bp, Zea mays
  Clone ID: LIB4172-024-D2_FLI
cgaggggagagaaagttctcgagctagacgagcgccgtgcgaggagagaagcgagatgagcggtgaggcggcggccgtgggcggaggcgaaggagaggcgaatggcatcccgccgaacgtcaccatctatatcaacaacctcaacgagaagatcaagctagaagaacttaagaagtccctaacagccgttttttcccagtttgggaaaattcttgatgtgcttgctttcaagactttgaagcataaaggtcaagcttgggttgtcttcgaagatgtcgcatcagctactgaggctctgaagaggatgcagggctttcccttctatgacaaaactatgagaattcaatatgccaagaccaaatcagatattatagcaaaggctgatggcacctttgtacctcgagaaagaagaaagaggactgatgaaaaatctgaaaagaagcagaagcgcgagcatcaccatgatgctggtgctagtcaaattggcatgggtgtaactgcttaccctggtgtttatggggctccacagctcacccagatacctatagcaggaggacaaagggtcatgatgccagagattattgtaccaaacaacatcttgtttgtccaaaacttgccacacgagacgacgcccatgatgctccagatgctcttctgccagtaccctggcttcaaggaggttcggatgatcgaggcgaagcctgggattgctttcgtggagtatggagacgagacccaggccactgctgccatgaacaaccttcaaagcttcaaaattacaaaagaaaaccagatggtcatcacatatgcgaagaagtaatgagctcccgagcaatgtttacctgatgtgagatgttgtattccgagttttacacaactggtaaatttccttcatgtgttaggtagacagcatcctgaacaacctgttaattgtacccactgggctgcagctatgtgcacttcaggaacggagatgaaatgcaaactgttattatttggtct

SEQ ID NO: 26416 - DNA, 1892 bp, Zea mays
  Clone ID: LIB4172-025-A8_FLI
tcgccgggcgccaccatgacgagcgcccagaagctcgtcgtcgcgcgccagctggcccgcctcggcgtcgacatcatcgaggccgggttcccggcctcctcccccgacgacctcgacgccgtgcgctccatcgccatcgaggtcggcaacccggcgccaggacccgccggggaggaggacgccgtccacgtgccggtcatctgcggcctctcgcggtgcaaccggaaggacatcgacgccgcgtgggaggccgtgcgccacgcgcgccgcccccggatccacaccttcatcgccaccagcgacattcacatgcagcataagctcaggaagacgcccgaccaggtggtcgccattgccagggagatggtggcctacgcccgcagcctcggatgcactgacgtcgagttcagccccgaggacgccggcaggtcaaatagagagttcttgtatcatattctaggggaagtcataaaagctggagctacgactctcaatatcccggacactgtcggatacaatcttccttatgaatttggaaagttgattgctgatataaaggcaaacactcctggaattgaaaaggctatcatttccactcattgtcagaatgaccttggtcttgcgactgccaacacactagcgggcgctcgtgcaggagcacggcagttagaggttactattaatggtattggtgaaagggctggaaatgcttctttggaggaggttgtcatggcaattaaatgccgcagagaactgttagatggtctctatactggaatcgattcccgacatatcactttgacgagcaaaatggtgcaagagcatagtggacttcacgtgcagccacataaagctattgttggtgccaatgcgttcgctcatgaaagtggaattcatcaggatgggatgcttaaatataaaggaacatacgaaattatatcgcctgatgatattggtctaacacgtgcaaatgaatttggtattgttcttgggaaactcagcggaaggcatgctgtgagatctaagctagtagagcttggatatgaaatcggtgacaaggaatttgaggacttctttaaacgctacaaagaggttgcagagaagaaaaagcgcgtaactgatgaagacttagaagcgttattgtcagatgagatattccagcctaaggttatttggtcccttgctgatgtacaggcaacatgtggtacacttgctttatctacggcaacagtgaaattggtagcaccagatggagaggagaaaatagcatgttcagtcggaacaggtccagtcgatgcagcttacaaggctgttgacaaaataatccagattccaacggttctccgagaatacagtatgacatcagtcacagaaggcattgacgcaatcgcgacaactcgggttgttgtcactggagatgtgagcaacaacgccaaacatgccctgactggccagtccttcaaccgctccttcagcgggagcggggcatccatggacattgtggtgtccagtgtcagagcttacctgagcgccctgaacaagatctgcagtttcgctggcgccgtgaaagccagcagcgatgtagctgagaccgcaagcgtcccgagcacagaatgagcttccgtttagttcacagtgacatgttcaaaatttctggaaggatcttccattgagcttaggacaggcaggaagtcttggggcctatgtagtgtacaatttatgtgtgtcatatcccgtgctcgttgccagtttgtattgtaccatatataaaccatagaatatgttgccatttagaagtctggccaaggtcagctgtaatgattcacatgcttatagcctggaaacattagacattgaaaacccgagcggtgaataaaggatgcccaaggtag

SEQ ID NO: 26417 - DNA, 1255 bp, Zea mays
  Clone ID: LIB4172-027-A9_FLI
ctcgagtctcgtccacccgtcatcctcctagctcctctactcgccagtcgccatgggcaagattaagatcggaatcaacggcttcggaaggatcggcaggctcgtggccagggtcgccctccagagcgaggatgtcgagctcgtcgccgtcaacgaccccttcatcaccacggactacatgacctacatgttcaagtacgacaccgtccacggccactggaagcacagcgacatcacactcaaggactccaagacccttctcttcggtgacaagccggtcaccgtctttggcatcaggaaccctgaggaaatcccgtggggtgaggctggcgctgagtatgtcgtggagtccaccggcgtcttcactgacaaggacaaggctgctgcacatctcaagggtggtgccaagaaggttgttatctctgccccaagcaaagacgcacccatgtttgttgttggtgtcaatgaggacaagtacacctcggatgttaacattgtttccaatgctagctgcaccacaaactgccttgctccccttgctaaggtcattcatgacaacttcggcattgttgagggtttgatgacaactgttcatgccatcactgccacccagaaaactgttgacggaccctcagccaaggactggagaggtggcagggctgccagctttaacatcattcctagcagcaccggtgctgccaaggctgttggtaaagttcttcctgatctgaatggcaagctcactggtatgtccttccgtgttcctactgtggatgtctcggttgttgacctcaccgtcagaatcgagaagggggcctcctatgaggatatcaagaaagctattaaggctgcttccgagggtccactcaagggtatcatgggttatgcggaggaggatctggtttctaccgacttccttggtgacagcaggtcgagcatcttcgacgccaaggccgggatcgctctgaacgaccacttcgtcaagctcgtctcgtggtacgacaacgagtggggctacagcaaccgcgtcgtcgacctgatccgccacatgttcaagacccagtagaggggttttttccccctgcttctcatggatggttgctgcttgtgtatgccgagaataaatgtggatggcgcgtgcctctgggtcgccaggttcatgctgagtctggacatgttttgcacttttgcttcccttcctgctaccatctgtgacagaaccgctcgctaatatgggacctgagattagcttttt

SEQ ID NO: 26418 - DNA, 1045 bp, Zea mays
  Clone ID: LIB4172-028-B4_FLI
cagctttgagttcgagctccccttcccccccttctctgctcccgcgactcgaccctctctctataaatacaaccgccggctcccaccgccaaaccatccatcacagaccaccacaccaacaacagactacggaggaccgccgccgcccacgcaaaaacccacccgatccccgcaaaaacccccgcacgcgatccacgccaattccagtcaccgcgatgcagggtctcgccccgcccacctctgtttccatacaccggcacctgccggcccggtccagggcccgggcctccaattccgtcaggttctcgccgcgcgccgtcagctccgtgccgcccgccgagtgcctccaagcgccgttccacaagcccgtcgccgacctgccggcgccgtccaggaagcccgccgccattgccgtcccagggcactccgcggcgccgaggaaagcggacggcggcaagaagcagctcaacttgttccagcgcgccgcggcggccgcgctcgacgcgttcgaggaagggttcgtggccaacgtcctggagcggccccacgggctgcccagcacggccgacccggccgtgcagatcgccggcaacttcgcgcccgtcggggagaggccgcccgtgcacgagctccccgtctccggccgcatcccgcccttcatcgacggggtctacgcgcgcaacggcgccaacccctgcttcgaccccgtcgccgggcaccacctcttcgacggcgacggcatggtgcacgcgctgcggatacgcaacggcgccgccgagtcctacgcctgccgcttcacggagaccgcgcgcctgcgccaggagcgcgcgatcggccgccccgtcttccccaaggccattggcgagctgcacgggcactccgggatcgcgcgcctcgccctgttctacgcgcgcgccgcgtgcggcctcgtggacccctcggccggcaccggcgtggccaacgccggcctcgtctacttcaacggccgcctgctcgccatgtccgaggacgacctcccctaccacgtccgcgtggcggacgacgg

SEQ ID NO: 26419 - DNA, 1031 bp, Zea mays
  Clone ID: LIB4172-028-H4_FLI
cgcacgcacccagcgatcagcgcagattccttccacgccccccctcctttccaggtcccctcgcccgcgctctcagatctcgcgcgcctcccacaagggaaaccttgagccatgggcacagttgtggatgccgctccagcagttgtggctgaggtcactgagaacatgttgggtggcaagaaagttacagttgtatttgtcctaggtggtcctggaagtggaaaaggcacacagtgtgccaacatcgtggagcactttggattcacccatcttagtgctggagatcttctgcgtgcagagattaaatctggctctgagaacggaaccatgattgagaacatgataaaggagggaaagattgttccatcggaggtgactataaagcttttgcaggaggcaatgataaaaagtgaaaatgacaaattcctgatcgatggatttccaaggaatgaggagaatcgtgcagcctttgagaatgttaccaaaatttctcctgcatttgtgctattctttgactgttctgaagaagatatggagaaacgactcctggggcgcaatcagggaagggttgatgataacattgaaactatcaaaaaaaggttcaaaacctttgttgactcaactctgcctgtcattgagcattacaactcaaaggacaaggttaaaaagattgatgctgcaaaaccaatccccgaggtgtttgaagacgtcaaagccatttttgccccatattctctaaaggctgaatagagcaatctaagggacatgataaaggtgatacatggtgtctaggcaccacataaacatatctgtgattatgatggaccctttaatatagaacaaaagttttggctcatttgagctaccagcgtaccagtaggcaattcgatttgttaccagcaacaagtgatctgattcccagtggtcctgctagagtaacattttttaccactgtctgttgtctatgtatcctttgatattgtgttgtaccaatgtgcaatttactctatggactgatggaacattgtgcc

SEQ ID NO: 26420 - DNA, 2963 bp, Zea mays
  Clone ID: LIB4172-029-A8_FLI
gcaatatacggtgcgtgtgggggcggcggcgacgagggttttgctgctccgtacaccgcgtgcagcggcgacgcgaccgcagctggtcgccgccccggatcgaggagggggaggagccggcggaggctcctgtggtggctgcgggggcgggagcgggagcgccatgaggggcggtggccgtggcggcggcgggagacagccttcctacgcggcgccggatggggcggatgcggcggcgatcccggtcgcctcaaggaagatggtgcagagcctcaaggggatcctggccgaccgctcggagggcgagatctacgccacgctctgcgactgcggaatggaccccgacatagccgtcgagaggctcatctcccaggatacttttcatgaagtcagaagaaagcgggataggaaaaaggagactaaagttaatcacgaaacaaggcctcgacctttccagaaatatacataccgaggatataaggctgtttcagatcgaagtgggcgagaccctacaggcggtttcaaaggccctgtaaagaaggaaccagagttgcaagctccactaaactcatcagccttggatgtcaagacaagtgacactacagaaatattttctgctactatcaatgttgcccagactgatgctaagaacaccacttctcagcctttatctaaagtgcagcatggttggggtggtattccaggtcgcccttccatggctgaaatagtgaagatgggcaggcctcaagctaaagttgggagcagatctgttgcaagtagcactgcgttgccaaccgttggtgattcagtcatttccaatacaccaaatcttgtgcccgaggaatataacagaactgtttttgcatcagaagcaggccatgtcgcagcagataaattgccaaacggtgctgttgaggtgcactctctacctaaagatgcttccgcatttgatatgttaccttcagctgagggaacagatgttgaagccccttccatgagtgctagtgcacaaggttcatcaatgccagatgccaatgaagatgacattgaaaaatatgcaaatttggaagagggcaatacagaaagcttgatatctcctggacaagtttctgcttctggtaaagatatacaatcagaatatactgaagttgtcagtcatgtggatgaaggctcgatagagaaaacagatgactttcagctcaatggccttccatttgagcacaaccaaaatctgaatggagatgtgtctacagcgacaacacaatttgatcatttgactctgcatgagggaccaaaattgtccgatgataatccggctgtaataattcctgatcatcttcaggtttcgaatgctgattgtgcacatttgacgtttggtagttttgtgtctggaacacttgattcatccttgacaacaaaacctcttgaaagtcatggggatgctgcgacagttcctgatgatgattcaattgaccaatcagatggcaggatccatgacgatgaaggcaaggtgacattagctactgatgttaatgaatatgttacttctgcggcaaacagcaacgaggagaatcttgatattacatcagtacagcaatctgaagtcactagagctgatttcttggatgtcacaagcaatactgaatacaacctaacatcaactccagattatgcaacttcaagtgcaccgttgcaggattctgcttcacagagtttacaggaaaaccgacaattccagaacatctctcctttctcaagcttcatgcaaatgcaaaatggtctcctgccaccagcaattccaccattgcgtgaatttgatccagcattttcactattgctcacccatcctcctatgatgcatggtacaatgtcatcatccatgagcaatacaactgtttctacacagccccaagagaatgccaatccagttggtttacccaaccctcaattgactcaatctcagcaaagcaccagcattgcttcagggcctccactccctcagcatcttcttcatccctatgctcaaccaacccttccacttggatacgcaagcatgattggctatccatctcttccaccaagctatgcatatctcccgcctgccgcttttcagcaaccatacatgaacagtggcttgttccaccaggcagcagccgcagttcccacctcaagtgtgaaataccctctaccgcagtacaaaagcaacattgcccttgctagcttaccacagccaggctctttgctctcaagctacgttgggggctttggaactgcaagcaacatgcctggaaatttccctctgaatcaaagcacaacagcagcaacaacaactcttgggtttgatgggacggtcccttcacatttcaaagatggaaatcaatttatttctcttcagcagaatgagaaccctgcaatgtggatgcatggagctagttcacgagggatgcccccacttgcagccagtaccatgtatggctatcaagggcagagtcatcaggccggccttcggcagggccaactaccttcacaatttggctctgcgcttgggcagtcacagccaggcctgggccctgaacaccgaaaccctagcgatagtaacctaagtggcgctgctcaggctaaccaaatgtggccaaatacctactgatccatcccccttgtcgacttctgtggaaggcggtcctgttgtgtgtgcaacgccggtgaggccatgcagtgcttgtgttctgatccaggcacgcggataccagctgtgcctgtgcgcatgagtcgctgtcgtgacattttgaggcacaagagacatatgttcgagcatgctctacctgtagggtttctaggatatggcaaaagaaaatgtagctcgatctatttattcaaattctgatagagaaaggacttcctcttttctattttattctcttttgtcattcacatatcatgtgacaaataaaaccgaaatatct

SEQ ID NO: 26421 - DNA, 1772 bp, Zea mays
  Clone ID: LIB4172-034-D4_FLI
gtttcatacagggcagggaagtcaggaggaagatgatgcagcaggagccctggaacgccgccgccgccatggggctcctccgcccgaccaagtcggctccctgctcgcccatcaagccgccgccggcgaccatgctgcggactcacttccacgtcgcgcacaaggtgccggtcggcgacacgccctacgtgcgagccaagcgcgtccagctggtggacaaggatccggagaaggcgatcgcgctgttctggagtgcgatcaacgccggagaccgcgttgacagcgcgctcaaggacatggccatcgtgatgaagcagcagaaccgcgccgaggaggccatcgaggccatcaagtcgctgcgcagccgatgctccgaccaggcgcaggagtccctcgacaacatcctcctcgatctctacaagagatgcgggcggctggacgaccaaatctcgctgctcaagcacaagctgcagctgatcaaccagggccacgccttcaacggcaagcggaccaaaacggctcgctctcagggccgcaagttccaggtcaccctggagcaagaagccaccaggctccttggtaacctggggtgggcgctgatgcagaaggagaactacacggaagcggagggagcgtaccgtcgggcgctgctcatcgggccggacaacaacaagatgtgcaatctgggcatctgccttatgaagcaggcccgcgtgctcgaggccaaggatgtgctcaagcaggtacgccccgcggcggttgatggtctgcgcggcgccgactctcacctcaaggcctacgagcgagcgcaggagatgctgcgggacctcgagaccaagctcatcggccgcccgcgcgctgaccagctcgacacgaactggctcttcgatgcgctgctgctgggatcgtcctcaagcatctggcagccgcagccgtgcaccgatcacttgctgccacctcctgttccggctccagccacggcgccgcgcggccacttcgccgatgaaaacgccggtgtgagcaagaagctggcggtgctccaggagaacatgcttaatgtggacgcgcagcccttctactctttgcgggtgtcgtcgctcgcagccaagtcacataacacgctgcctcagcggcaacagcagcagaagccagctcctgtccatgatcccctgggcaacctgaagagaacacggtccggcaattgcatggacaaggcaggagcagtggtgttcaaggagcagagcatcgacgagaacagcggcaggaggaagtcgctgtcagctgaggacaggtggccagagctacccgaccacagcgcgttcgatgaggccctcgtcgcggccgtcctggctccagtgctcgacgacgaaccaacagctactgaagtcaagctgccggcgagctgcggcacgagcccagcggtgaaggaaaagatcggcaagaggctgaggattttccaggacatcacacagacagtgaacagtttctgattcgttttggttttcttcaatttcctactcacaaattaatcagggaaggagaaagggcttgttctcctgggagctaaattaatcagggattcgattcgatttttaatttgatgctgattttaatttaatttattaacacacaaaaataacagctgattcgcttcttcagcttgacactttagaagcgcgcgcttcctttaccgcaagattctcctcgtaatagaagtggactgcatcttgttctaatttcatttcttttgaaataacaaagttcatttgtgt

SEQ ID NO: 26422 - DNA, 1178 bp, Zea mays
  Clone ID: LIB4172-034-H1_FLI
gcagtagcagtagtaggaggagctagcgtttctccatctgtacgtcctgcagtagcgattgggcaggctgggcatcgtcatcgatcgatcgccatgaggctccgcggcgtgctgctcgtcctcgtgctcctcctcgccgccaccgccgtcgtgccggtgctgctccttagcgagaacgacgacgacggcgtcgcacctgcgccgccgttcaactcctcgcgtgtcaaggccgtctcgtggcatccaaggatcttcgtgtacaaggggttcctctccgacgccgagtgcgaccacctcgtgactctggcgaagaagaagatccagcggtccatggtggcggacaacgagtccggcaagagcgtcatgagcgaggtgcgcaccagctccggcatgttcctcgacaagcgccaggacccggtggtgagtcggatcgaggagagggtcgcggcatggacgtttcttcctcaagagaacgccgagaacatgcaggtgctgcgctacgagccggggcagaagtacgagccgcacttcgactacttccacgacagggtcaaccaggcccggggcggccaccgctacgccaccgtgctcatgtacctgtccaccgtccgcgagggaggcgagaccgtgttccccaacgccaagggttgggagtcccagcccaaggacgccactttctccgagtgtgcacacaaaggattggcagtgaaaccggtgaaaggcgacgccgtgctcttcttcagcctgcacgccgacggcacgccggacccgctcagcctccacgggagctgcccggtgatccggggcgagaagtggtcggcgcccaagtggatccacgtcaggtcgtacgaggaggacgaacccccggcagtactcgtgctccccgaggaaaccgacggcgggtgcaccgacaggagcgagcgctgcgccgagtgggccgcggcgggggagtgcgccaggaacccggcgtacatgctcggcgccggcgatgagggggcgcctgggcagtgccgcaggagctgcggagtctgcgattcgtaggcgcgtccttgccttttctttctttctttcttttctttgtttgttttgggatgcagtattcagataactagtggctgttttctgtacttgatgatgatgtgtacatagctagtaaaagttttattcagatgatgatg

SEQ ID NO: 26423 - DNA, 3725 bp, Zea mays
  Clone ID: LIB4172-035-G7_FLI
tcgcaactcccctccaaagccagcacgagagcaaggtcccctgatcgccgccgcttccctcgccccaccgccccagcaccacctgctgacctgcacatctccaccacccgtcctcctctgcgggttctccgcaggacgcgacccttggccgcggcattcgcccgaggaatcgccgctcccgcgaggcctccgtctctcgccgtgcccggatcccccgagctgccttcagggtgcaagatctcttccgtgatccggagccttcaccgtttcctcctctctgatcttagctcgatatcggagcgactggcccgagcttctcttaccccatgggcggcggcggcgggttccggggcagctgcagggttggtgccgtgctgcttttctccgcctgggtcgctcttgcagctctcagccgcttgctgcgtccggtgcccaatggctgcgtcatgacctacatgtacccgacctacattcccatcgccgccacgccccggaacatctcctcagatagatatggcttgttcctgtaccatgagggctggaagcagatcgacttcgccaagcacattaggggactcaggggcgtgcccgtgctctttattcccggcaacggaggaagttacaagcaggttcggtcattggctgcagaatcttttcgagcttatcagaatggtccacttgagcccaccttttatcaggaagcatctagtagtttaccaggagatggactcaacaatttttctattccttcacggtatggccgcatgttggactggtttgctgttgaccttgaaggagagcactctgctatggatggtcagatacttgaggagcatactgaatatgttgtctacgcgattcataggatccttgaccaatacaaagaatcacatttggagagatcaaagggtggtgctcaatcctctcctgacctgccatccagtgttatacttgttggccattcgatgggtggttttgtggctcgagcagctgtagtccacccaaacctgaggaaatcagcggtggaaactatactgacactttccagcccacaccagtaccctcccatcgcacttcagccatccttgggtcattttttctcccatgtcaatgaagaatggagaaagggatacaagactggtgtatcacatgcaatcagttcaaaattatctaatgtagttgttgtctctgtatcaggtggcattcatgattatcagattaggtcaaggttggcatcattggatggaattgtgccttctactcacggctttatggtaggaagctccagtatgaagaatgtttggttatccatggaacatcaatctatcctatggtgtaatcaattagctgtacaggttgcacacactcttcttagcataatagatcctgttgacaggcagccattttcaagcacacaaaaaagagtttttgtgttcacaaaaatgctccaaagtgcagttcctcagtctctgagttcaatgactcatgttcctgcttctctgtcacgaaatttacctgccaatgagaatcaggatgctggcgaactacacaaaaaagattcactttcttgcccatcatccactgaatggactagtgatggccttgaaaaggacctgtatattcaatcaaattctgttactgttttagccatggatggcaggagaagatggttagatattaaaaagctgggatcaaatggcagaggacactttgtttttgtaacaaatcttgccccttgttctggagtaaggattcacttgtggccagaaaaacatcattcgcctgtgcaaaatgaattacctgccagtaaaaagatagtggaagttacatcaaagatggtccaaattcctgcaggacctgctccaaaacaggttgagcctggcagtcaaactgagcaaccacctccttctgcatttcttctactgagtccaggagaaatgagtggtttcagattcatgactatatcagtagcacctcgaccgacaatttcaggtaggcctcccccagcagcctctatggcagtggggcagttcttcagtcctgaggaaggggcaagttcattttctattggtacaataatccgctccagctttgctcccaaagaaatatttctgttggaggatcacccattggctctaaacttgtcattttctgcaagccttggccttctaccagtaactttatcactgaaaactgccggatgtggaataaaaaatcctggtgatcaaatggaagctgagagaaataacctttgtaaattgcggtgctttccgcctgttgccttggcatgggattctgtatctggcctgcacatcattccaaatatatactcagagactgtagtggttgattcatcacctgccttttgggattcacctgaggggactgacaaaactacagtactgattctggctgatccacactgctcatacgaagtcacttctcgtgcttcactaagtgatgcggcaagcagattctttttgttgtactcatcagagattcttggtttcatggtggccataatgttttttggaattatgcgacagacttcagcatgggaatgtgattcttctatgccatccattttgtcagccatagagtctaatcttggactcccaaaggcattcatgtttctttgcttcatgccaatacttgtattttgtgcctttttcattttcacggcggagcaaaaaccaccatttgggaccttcttattggttactctgatctgctacatagttgctaatggtttcacaattttgttgatactaagttcgaaattgcttctgtatgtggttgccattctacatgtctttactaaaagacgatggcaatcatgggggaatggtgttcaatcagcatttcttggtcaattcctcagtttctcctcgtttcagtcagtgaagattgtgcagatgcttaggaacaatccaaatataattgtagcagttgctacattaccactcgtctgtttggttcatccagccattggccttggtctgctacttctctctcatgctttccatgctcattcaaatctatgcagttttttagcagcttcttttcgtagcatcactcagaaaaaggacctgtacaagtccaagatgggcgatggttcagttctgctatccaaaagtaaatccgatgggctgcagcaacttctgccaatggatgatagcccaacagcttcaaaaagttttaccgacagccaactagaactgtttgattatcggcatggcgtcatgatcttgcatcttctaagcacactcatgtttgtgccttcacttgttgcctggctacagagaattggtatgggacaaaattttccctggttcattgattctgctatttgcgttggtgttatactgcatggactttttggatcccaaccaaatgtcagctgctgcatatttttcaagttacctggcaggagaggccgtgaaattggtctgagtttcctctacctcgtgggtggctattattcctttgtcagctccatggcgttggcaccttatagggccttgtatgccatggcgaccattggttatatatgtttcatttccagaattctcgagagaagaaatatggtaaggggtgacattaactctaggaggactcggaagcactcacacagacactgacaccccccagaaagtgtgatttctttaaaattatttgtaagagatagagaatagggttgaggaacctttccccccccctaagtt

SEQ ID NO: 26424 - DNA, 2457 bp, Zea mays
  Clone ID: LIB4172-044-D6_FLI
gctcccccattccgtccactcccctctctccccaccaagcaccagcccacggatgcggtcgcgaccaccgcggcaaggtcgaatccatggctagagctagcagaagcagaagccgcgggcttggcgcttgagccctcgatcctcggggggtcccggttccttctccctgcattgatcgcgtcactcgacgcgagaaggcgagcgaagaggggaaaaaaaggaggatcctttcccgtgtttcttctgtcgattctgcggttctttgcaagtggcaatgaggcggcatgggtggcagctcccgtaccaccctctccaggtggtggccgtgtccgtcttcctggcgctggcgttcgcgttctacgtcttcttcgcacccttcgtcgggaggaaagtgttccagtacgtggtcatggggctatacactccgctggtattatgtgtcttctttctatacatctggtgtgctgcagcaaacccagcagatccaggggtcttcaaatcaaagaagtatctgagcttgtacggaagcagcaaacacaagcatctgaaggaatccagaaagggttcttcagatgctcggttacaaatagagggaactagagaaaaacaagagcatgaggtcgcagcatctagcgagaggtcaattactcaatacaaggacaataatccatcttgcttgagtccaaccttctctgcttctctccttctattctaccctctctcttttgttttctcctgctgccaaccacatgaaagttcctctgagcagcaagccaccgaggaagggatgtttttctgcagcctatgtgaagttcaggtgttgaagtatagtaagcattgcagagtttgtgacaaatgtgttgatggttttgatcatcactgcaggtggctcaacaattgcattggaagaagaaactatagaaggttttttattctaatgtcaactgccgttatcttgcttatcctacaatcagcaattggagtattggtgctagtgctatgctttgttgagcgaaaggaattctctatgcaaattgtttcaaagcttggaagcagcttctctgtagtgccttttgttattgtggtggcatcatgtaccatcctagccatggtcgcttcactgcctgttgctcaacttctttttttccacattcttctgatcaagaagggaatcagtacctatgactacatcattgccctgcgagagcaagagcaagatgatctgagtgggcagcagagtccacagatgtctcgtgtaagctcctacaccggactcagcagtactagttcctttggtccacttcgtcgtggttcatggtgcactccgccaaggctgtttcttgaggatcagtttgatgttattccatcggaggctgcttcttcgcataattctgctacgaagaggaaagaagaccaggggaagaggaagaagggctcaggggccgtgaaaataagcccatgggcattagctcgtcttaacgctgaagaagtttcgagggttgctgcagaggcacggaagaagtccaaagttttagtgccaatcagaaaagatgactattcacgaggccacgaaacagatagtagctatggaggcacgagcagtggtaggatcgatctaggacccgatagcaagaggagaacaaacagaagaggaagacagcccagtgatctctttctcaaacctgttgcaaagatatctacagatgctattgattctgccagcagcgacatgtccaatttagcaccattgcaacttgaggcacggagcgccttccatcccagcagggctgcatcctctgtgaatgttggtgggtcatctccagatagcagcttggattcgcctgacctgcatctgtacagagtctcagctgtctcgtcgtctggagctgaagacttgcagctgacagctctcactgctccaggaagcacttcacagcaagggattcaactgtcgagatcgaccagcgatgggtatgaagcgtcagggggtgaagacagcgaccgcattccgtcacagatagtgcaccgctcgtcaaactgggcaagcatcatcctcaactctgaccagagtgcgtcctcgtctggcattcttgtgccgaagaacagattgtcctgaattcagataaatgaagattgtaaatgatcaaccaagaacgggaggttccagtatctgacctttgttttcaatgtcgaatcttgttgcagggatggcttgatactgcgcaaatcattaatttttttattagtttctgaatcgctaggtaggcaagtgtctgaatttcttccgtggggtgttcaggtgcttgtaattttgctgtcagacgacaatgaactgatttgtttagaggttggtaccttggatcaaatgcctgattagttggtgattgttcttgtggttgacttgtcggctctgaccatttgctgtgatgaaaacaatggcatgcacttatatgctgc

SEQ ID NO: 26425 - DNA, 2074 bp, Zea mays
  Clone ID: LIB4172-045-G8_FLI
gcacgagggctgtttcataggctcatagctatgcacctaatattgtaactttggtatataaccttctgatgtttcacacctacttacataagaacagaatgatagatttgaatattcatgtttcttagatgaccttaaaatcacatactggttttacttaattaagaaccaaattttttgttatttcacagtaaataatgatgaacactcctactcatacacttattttctgtgaacatgaaagcattgtctaaacagtccttttctgtatccactgaacttacaatattttgttatgctcaatattttttcaagatgatgccctttttcatagttatgtttaaattcagaaacacatgaattttacaagcattctgagttgcatgtggcccttttcctgagctatgtaaagaactacaacatcaacaagagctggcagaactaagatgactgttcccgtcgctccttcatttgtgtgtgctaaccgtgctgacaagaggaaggaggtgtatatagttttcttgcattatttctagatggttgcttaattcattctgattattcacaactagcaagcagccaagcacttttgttccaaaaaaggttaggtagtgacagtgttgttattacccagttctacacaaaattagaggagaaacataaagctttggaagcagagaaggacgaggctgaggccaggaaaaaggtaggaagaacttacttctgaattctgatatctctcttggaagcaaccaactgtaggtaaggtcacttgagttttctatattcttcttttgatcgattttgtaaattttgctttgaaaataatagcaataagggcagtattcaaattgagttgtttctgggaccactcaactactaagtgagctttatgccaccctttataaaatttatggaaaattcaaggttcttgctcaacacatgatacttcattctgttttacttacacaccagtcttatttcttccttttccttgttcttttccaatttccctttatatgtaactgttgaggtttcaaatgcttttcagtcaagcaattggaatacaggatctattaaatttcacatattttatcattatagtttcatcacatgtacacatgttttataatcttcctgtccgctgttgtaatcattttctgtctttcaatctgaaatatcgatgattttctaaaatgaaatccaagctgtacgcaagcaatgtcagcacatagacttggttgttgtgattatctaatcaatgatgtgttcatttaggtacggctgattgaatgacatctactatcatatgcatatttaatgtcgtgttaagttaaatattgttatttgatgccattggccatcatattctttttcatactaattctacaatagtctgattgactgtgtctacctgtgcttttcctttagtaagtgcttgtgattgtttctttttcttcgagtcctgtctatatggaaagcactattacttatctgtcattaactaatcttataatgttcattatttgggtaggatgagcaagacgttgctttaaaacaactaaggaagtcattggtgattagagcgaaacccatgccaagcttctatcaagaagggcccccaccaaaggctgaactgaagaaggtgcctcctacccgtgccaaatcgccaaagtttacaagttcaaggagaaggagctgcagtgatacaccattgacacctggcggggaaaataccaacgcaacatctacccggccacatcgtcacagcatcgggagtcctagagacgctaacagagtacaacaatgctcgccaaagagcggtgtggcaaccaaaacaagatctgtcaaggctgagctgaaggccctctgaagagcatggagcagccgagtgatgtgtttctctgtacaaaccgaattgtctaaccgtttccatttccatgcatttttgcttctattttatacccaacatctccagcaaaagaaggctgtagggccaatgacgttgttcagcgccgctggaccttatccattttcttacattcgccttgtactcgtaagaactcttggtggc

SEQ ID NO: 26426 - DNA, 1637 bp, Zea mays
  Clone ID: LIB4172-046-A3_FLI
gtcgacgcgccgtcactgaatcctcagatcacggctagccgtaatcacgccactctgctgactcccggcgagcagtgtaacattttccttcagccatgggcaaggagaagactcacatcaacattgtggtcattggacatgtcgactctggcaagtcgaccaccactggccacctgatctacaagctcggcggtattgacaagcgtgtgattgagaggttcgagaaagaggccgcggagatgaacaagcggtcattcaagtatgcctgggtgcttgacaagctcaaggccgagcgtgagagaggtatcacaattgatattgctttgtggaagttcgagaccaccaagtactactgcactgtcattgatgcccctggacaccgtgacttcatcaagaatatgattactggcacttcccaagctgactgcgctgttcttatcattgactccactactggtggttttgaggctggtatctccaaggatggacagacccgcgagcatgctctccttgctttcacgcttggagtgaagcagatgatttgctgttgcaacaagatggatgccaccacacccaagtactccaaggcccgttatgatgagattgtgaaggaagtctcttcctacctgaagaaggttggatacaaccctgacaagatccactttgttcccatctctggtttcgaaggtgacaacatgattgagaggtccaccaaccttgactggtacaagggcccaaccctacttgaggctttggacttgatcaatgagccgaagaggccttcagacaagcccctgcgtctccccctacaggatgtgtacaagattggtggtattggaactgttcctgttgggcgtgttgagactggtatcatcaagcctggtatggttgttacctttggtcctagtggccttactactgaggtgaagtctgttgaaatgcaccatgaggctctccaggaggcccttcctggtgacaatgttggcttcaatgttaagaatgttgctgtgaaggatctgaagcgtgggtatgtggcctccaactccaaggatgaccctgccaaggaggctgctagcttcacgtcccaggtcatcatcatgaaccaccctgggcagattggcaacggctatgccccagtgctggactgccacacctcgcacattgctgtcaagtttgcggagctcattaccaagattgataggcggtctggcaaagagcttgagaaggagcccaaattcctcaagaatggtgatgctggtatggtgaagatggttcccactaagcccatggtagtggagaccttttctgaatatcctcctcttggtcgctttgctgtccgtgacatgaggcaaacggtggctgtcggagtcatcaagagtgtggagaagaaggatccaactggagccaaggtgaccaaggctgccgcaaagaagaaatgatgtgtctggctggttctgtgtttgcttgagggatacctagtggaaacgtaaaatatctcgtcttgttcacgtcattgtctgaactatgctcgcaacgtttgcctggtcgatttagaactgttattttcgttaaaaccagagtgttatttaagacttatccgaacatctggtgagccatatatggttactagttttgtt

SEQ ID NO: 26427 - DNA, 3424 bp, Zea mays
  Clone ID: LIB4172-048-E2_FLI
ccagaagtttgcacacacgcgctccccaaggccccaaatactccctgacgcccttaccctcacaagtcgcagccaggtctctctgtccgccgaagtcctccctcgtcgcgagagacgagtcgcgttcctgttcgccgcccccgccgcccatctcccaatccggactcaggagatcgactcctcctctcggttgaggttgaaggggaaggaactagaaggctactcaagggatggctgaggatgcttctcacggggccagcagctcgactgtgatacctgctgatggtccagagtctaccatcgagatcaacatcaagaccctggattcacaagtccacaaacttcgcgtggataagaatgcgcctgtttccgttctaaaagagaaggttgttgaagcgactggagttccattggatcagcagcgcttgatttttcgaggaagagtcttgaaggatgaccacctcctatcagaataccatttggaggatgggtatacattgcatctggttgctcggcgtgcagcagagggccagacttcttctggggcttctgaaggaaacacaaatgctaatgtaaacgttactggaaatggaggattgttggatgatatttccaggagtgttcgggatcttctgggttccttaggtgttgcaatgtctggtggtgtcactaacacggcattttcggttcctttgactagcacaccagaagggcccaataatgtgcctggaagaactcagccaatgaacccagcacaacctggattctcagttctaaatcatcaaatacaagtaacacaacttcatccgccaggagctattcctcgcaatatgattattccagattctttgacaactctttcggagtacatggatcgcattgacagagtactacagaataatggtgttccaccatccagagattcagaaagccagcaacaaccaacagtggatgatgctaatgccaacccaagatatccaagtgctgatgttttggcttcagttattgagagagcccaacaacttcttggtggcagtgcagcttctgctctttcacgcattgcacaacgtattcggcaagatggtgggactgcagatgcatctcttcgtcgtgagatccaaactgaatcggttcagctaggaatttcgatgcaacatttgggtgctatgttctttgagcttggtcggacgatgatgatgcttcgcacagggcaatctccttctgaggcttttgtaaattctgggcctgctgtttatataaactccacaggaccaaacccaatcatggttcagccatcttttcaaaacacccctccttttggtgtatctaatataccagttctgggtggaatttctggtgcttttggtattgttgatccttctcgacatatgaatatcccaagtaacggtgcatctgcaacaagtggttcagctgctggtactaccaccggttctgaaggagctatccacgggaaccgccaagatgcggcaagaactcaaggaggtaacccaccaggtttcctggctgcaacacgtggattgccaaccagaacagttgttgctgctgttccagcacggtcctcaggcgaggctccaaaccatatctttagtgttatcctacctgttcaagtgaggggtcaagttgtagtgcctaatcagtcctctcaaggttctcaaacagcagtgggcaatggagctcaaggaaattcaacatctgctattccacaagcttctgttggtggtgtttctggtgttcctcttatagcggcacaggtagccaatgcattggcaaatgcaccaagccaggtttctttatctacacaaagtgcagcagatcagggatttcacctgactacagacaacagagctgatgttctgagttcatcaacaccagccactacaccacagaatggtccctcaggtacttccggttccagtttgccatctcaagacaggaatactttaaatgttcccagtcttgatagtatacaacagcatccacaattgggagatacttgtgcagatacagctgacttatcaggagacgccacagccatcagtactcatgatgctccttcgaacccatcagttgacagttctgtgctgaagaacaaatcctcggatgaagtaggttcacagaccactgagccttctgcaagtggcagtgctgaaccattaggtcttggtggaggtctgattccaattccaaagaggcggagcaaagcagtaaagccatctgggagcacaactgatcctagtagggatttgtcctcagtcagccaaaaccaagatcctatttcagtagcccagcagtttctggaaggttttgcttcccgaaatactaatggtagcagaagcaacaccctctcctctggtcctccatcttctgtgccacaggctactgaagttcctccgagaagacagggtggtggacaacctgatattggcagcatgatatctggtatgctcaacaacccagttttcagcaacatgttgtcgaatgtggcaacacaggcagggggctctagtgctgatttgaagagcgtgatggaaggattacaaagccctgctattgtagatacgataagcaatatcgtgcagaatgtggatgagcaagacctgggggccatgtttggttcaggcagaggacaaggtggcatggatttgtcaaggatgttgcagcaaatgatgcccgttgtatcccaggctcttggtggtgcaggggggcgttctgctggtgcaaatggtggacagcataggtcgcggcctcagcgcattgacggtgaaggaaatgcaccagccagcagttctcagattgatctccatgaagctcgtcaaagcattgaacagcatgaatccccagagaatatcttccgcgctgtccttgaaactgctgctcaggcccatggtgaagataacagcattcagggcatggtcgaagaacttgccactgatcaagagcttgccgatgactacatgaaacttttgatggaacaagttcggcagaggatacagtcagagtcgcagtcggggagccagccttgaaggattgggcggcagggtcgtgtagccagccattcgctctgcgatatttatctatgggaaagaacagaaccaaagctgttgtctgggcgttttcatgattaggtgcccggtgtacatgtggcgttgtaattttccgagataatgtatctgcagcagcatatctcgtactctggttagaactgtttttttttacgaattttgctagaggtacatacaacgagttttaaaggtggtgacgtctgaatttcgtggaattgacaatgacatgtctgtatgattggtgtcgcaactctccagttcggaaatttgttagcacaggttgtccttgttcctggcatgtgtttcaccttttagccattaaataccattttggttcatgt

SEQ ID NO: 26428 - DNA, 2654 bp, Zea mays
  Clone ID: LIB4172-048-H3_FLI
gtttgattggtccaagttacacattagtagaagtaaatgtcttttgtccatgaattagttacaaaatataactcatgtaaaagacttactacaacaatgaattagttgtaagacttcattatacaatattaaatagtgtagagctaaagagcataagcatagttgcagctcttggcgaggtcgggtcaagttacggttcctgtttgtaatttcctacgggtgcagggggaggtggaggtggtgctctggtactctggtccgatggcggtggcggtgcggtcgcggcgatggtactcctctacctcgaccagccggagatctgccaggtggcccgcctcaacagctccttccacggtgcagcctcggcggactgcgtctaggccgccaagctccccgccaactaccgctaccttgcggccctaaccgcgaccgccgatgacgagggctgtggcgatggagatgccagcggcaagcgcttgaccaagaaggagatttacgctcgtctgtgccgatccaccctctttgatgccacagaaaggaattctcgattctgaagaacaagggagccctttgcatgagtatatcatcaaaggcaatgactattactgggatagatgatcggaggtactggagccacctcgccatagaggaatcaaggtatttcttttctttaaggttgttattttgtatagcttctccttgatgtgtgtatctcatttcctttatatttcttattgctgcaaccacttcaaagtttcaattttagttcaagttttgtagcatcattgtcaagatattacagtgagcaccattagcatttctctcctactacatggcaatgcttttgtattttcaatttgcatcaacatgagcaccattagcaaccaggaaataaagaagttttcacggtgtctcagctaataactttgatggatcatggtcattctgcaagaaaacaaagattaataacaattttcttatatgatgtcgcctgctgaagcaaacaacataacccatcttttaaatataagttagtgtgggtgaaatgtaggaacctatatcttttaaatcagctcctgagggcaatgtatgcattactatatatggtctcaattgccttttaatggatacaagcacatatacattgtagctacattgattcacattgtcttgcttgttttataatgcaaaaattattggtcgaaaccaaaaaaaatctagaatgtccttcttgtctccattattgagtaaaatggcagttgacatcaaagttcatcaacgcagacaaaataaatctagcaacgttatccaatcagacaacaagattataaaggaagaagggagtatttacctgcaataaacatgtctttccatcaatctgaagccgagtaccaccagcttcttattctgcattggctgtttccaattaactggagctattgcagtttaacaatcagaaatggacaccatttatccaactaattaataataaagcaaaaaagaccttacatttactaagaactaatacaaatgtgaatcaattgcatcatactccaaagagaagacatcccagccacgatcaccatccccatgatccatcatctttacctttatccggttcaagatatcaaagtatcttccaagcgactgagatccatttctgataactccaacaagtacaggcactgcagaagtagcgccaatagctgccttcccctctggattgctcatggcctgagaggattgccaatattgcaagggcctcatctaccatccctaccctttttatcatataccaatggattgccatctgctgtattttttttcaacagcaccctaccctttctatttacggtgcgcttttcactatcggtcatggagcacatcatgatttcagactgggcgaatcatccactgcctcacctgtttgtagactgaagcaggctaaggtactatgaatttattttttttgtttttttcctgcatttgtcccccttttattctgacattttgttctagcgaggtgcactccttgaagtctttgaatccaaagttgtccgtgtcaatgggaaatctttggacaagactgccattatggaggagatgaaattatcttctcttcaccagtgaggcatgcttatatatttgagcaacttcatcaggagaaatcaagcactccagcatgatatatgacaacaactcaaagatggtcatgatttgtaagcaaggttgcaggtggctgcgttgctagcaggtgctgatggatcgcaacaaatgggtcaagctggaactgcatctttaccagcacagccttgagatgagcagcctcccgtaacctggacaagaaaattgggtttacagtccaaaactacagttgaaaaacatgacgacctgaatgaagcaagggagaaggtgtgaagagaggattacacaaatgtctgtcttgacttgcagttcagctttgcttcaggtttctgctttggtgcacctggttctaggagggacttggacaatgctgagaggtcatatgctttcagtttcttctgacgccgactccgtgtatttttctgctgaacaaaaaaagattgaaattgtagaacactagcgtcataataaaaagtgaaaggaaatgcaacttatacaaatatgttgat

SEQ ID NO: 26429 - DNA, 1162 bp, Zea mays
  Clone ID: LIB4172-050-B9_FLI
tcctccccctgcttctgctgttggcgctgcctggtgcgtatgcacgcccggcgcggcagtatttgggacagtgtccggggctggagtacaggctgccgccgttcgccgccgcgctccgggcaacctgccccgtctcgacggaggggtactcgtccccctacgaggttgttagtggggaggagcttctgaggatgttggatggcaaggaagagcacacggctgtccttttctatgcatcatggtgccctttctcgcaaagaaccagatcagtctttgatgatctgagctcaatgtttccacgggttaagcacttggccgtggaagagtccagcatcatgaaagccattttgtcaaggtaccatgtccgtgcactgccttccataataatagctcgcaactcacacgtgttctggcctcttggttcgaaagatctcgactccctggtcagcctttacactgctgctacaggtgaagagccagtggcatacatcggtagccggaagtggagcgcagcgcaaagcacagacggctatgcaaaggcttggaacagctcaattattagtgaaacagtgaagcgagaaccctacctagcattgagcatcctgtttatttgcctgagggtgttctttttcttcttcccaaagtcctttgccctcatccaagacttgtggaccggataccgcgagcagatcaacctcggaatcctcggcagattggcccagctgcttgaatgcgtgcctcacgccgtggatgtgaggaaggtgtggagcaagttgaggctcgtggttggagctaatgagaacggtagggtctgggcagccctaacttcgttgccccttggtgggcgaccttctccgatccacgggttgctgttggactgattggctcgaccatctaactgacagcaacaactaatatgcaatgattttatctgtaagcatttaagtaaggctctgggtttgttagattacgatccaactgtagatataatcttgatttgttatgggttttctataaatctacatgagccggtgatagaaaggtttaaatattaaatgtgatatatcgttggatcataatctaacagaccaggagtcttgtttgcatgattgtacataaagtctgattgcatattagttgttgctctgactgacagcacgag

SEQ ID NO: 26430 - DNA, 2986 bp, Zea mays
  Clone ID: LIB4172-051-C3_FLI
cctccgttcaccccgtccatttgatttgcgttcactgcgttgcgtttccttggaggggattgttctctcctctcctttggattggaggtccctccttcttctcctctctctctcagaggaaggcctgaggatccaggaagaggacagcaatgggggaaggtgcaggtgaccgtgtcctgagccgcctccacagcgtcagggagcgcattggcgactcactctctgcccaccccaatgagcttgtcgccgtcttcaccaggctgaaaaaccttggaaagggtatgctgcagccccaccagatcattgccgagtacaacaatgcgatccctgaggctgagcgcgagaagctcaaggatggtgcttttgaggatgtcctgagggcagctcaggaggcgattgtcatccccccatgggttgcacttgccatccgccctaggcctggtgtctgggagtatgtgagggtcaacgtcagtgagctcgctgttgaggagctgagagttcctgagtacctgcagttcaaggaacagcttgtggaagaaggccccaacaacaactttgttcttgagctggactttgagccattcaatgcctccttcccccgtccttctctgtcaaagtccattggcaatggcgtgcagttcctcaacaggcacctgtcatcaaagctcttccatgacaaggagagcatgtaccccttgctcaacttccttcgcgcccacaactacaaggggatgaccatgatgttgaacgacagaatccgcagtctcagtgctctgcaaggtgcgctgaggaaggctgaggagcacctgtccaccctacaagctgataccccatactctgaatttcaccacaggttccaggaacttggtctggagaagggttggggtgattgcgctaagcgtgcacaggagactatccacctcctcttggacctcctggaggccccagatccgtccaccctggagaagttccttggaacgatccccatggtgttcaatgtcgttatcctctcccctcatggttacttcgctcaagctaatgtcttgggttaccctgacaccggaggccaggttgtctacatcttggatcaagtgcgcgctatggagaacgaaatgctgctgaggatcaagcagtgtggtcttgacatcacgccgaagatccttattgtcaccaggttgctccctgatgcaactggcaccacctgtggccagcgccttgagaaggtccttggcaccgagcactgccatatccttcgcgtgccattcagaacagaaaacggaatcgttcgcaagtggatctcgcgatttgaagtctggccgtacctggagacttacactgatgacgtggcgcatgagattgctggagagcttcaggccaatcctgacctgatcatcggaaactacagtgacggaaaccttgttgcgtgtttgctcgcccacaagatgggtgttactcactgtaccattgcccatgcgcttgagaaaactaagtaccctaactccgacctctactggaagaagtttgaggatcactaccacttctcgtgccagttcaccactgacttgattgcaatgaaccatgccgacttcatcatcaccagtaccttccaagagatcgccggaaacaaggacaccgtcggccagtacgagtcacacatggcgttcacaatgcctggcctgtaccgcgttgtccacggcattgatgtgttcgaccccaagttcaacatcgtgtctcctggcgcggacctgtccatctacttcccgtacaccgagtcgcacaagaggctgacctcccttcacccggagattgaggagctcctgtacagccaaaccgagaacacggagcacaagttcgttctgaacgacaggaacaagccaatcatcttctccatggctcgtctcgaccgtgtgaagaacttgactgggctggtggagctgtacggccggaacaagcggctgcaggagctggtgaacctcgtggtcgtctgcggcgaccatggcaacccttccaaggacaaggaggagcaggccgagttcaagaagatgtttgacctcatcgagcagtacaacctgaacgggcacatccgctggatctccgcccagatgaaccgcgtccgcaacggcgagctgtaccgctacatctgcgacaccaagggcgccttcgtgcagcctgctttctacgaggctttcgggctgacggtggttgaggccatgacctgcggcctgcccacgtttgccacagcctacggcggtccggccgagatcatcgtgcacggcgtgtctggctaccacatcgacccttaccagggcgacaaggcgtcggccctgctcgtggacttcttcgacaagtgccaggcggacccgagccactggagcaagatctcccagggcgggctccagcgtatcgaggagaagtacacctggaagctctactcggagaggctgatgaccctcaccggcgtgtacgggttctggaagtacgtgtccaacctggagaggcgcgagacccggcggtacctggagatgctgtacgcgctcaagtaccgcaccatggcgagcaccgtgccgctggccgtggagggagagccctccagcaagtgatgcgcgacggcggccacagacctgatcgatcgatgagcgagagggagcactcggagtgtcgtgtcttttcccttgccatttctttctttttttcccttcccggaggcgaaaaaaagagtctgcttttgctaggcggcgggcgttcgttgctgctctttgcttcaagagttaaatttacctaccttgtcaaggtcttgttccatcattgatccgggtgtcgcttttttagtagtctgatggactgttagtagtttgcgttgcgtcggttgagagggaacgttggtggtggtggtgtgtgtgcagtcaggcgtggtgctccctttgtttcctggatgggatgttgctccttgaataataatcgtagtggccttggagcccttttcctg

SEQ ID NO: 26431 - DNA, 3005 bp, Zea mays
  Clone ID: LIB4172-053-A8_FLI
ccgcaacctcctcccatcccttgcgccagcggattccttggctgcgcggaattctcctagcctcccgagcctccccagctcgagaagggagctcacggtgacgcggcgcgaagggccgggtcagatcttggccgttggccccgaggcggcggtttcgcgtggggtccagcagagcccggcccgcgcgggagccgctctgattcgccgggggacgccgcggggaatgctctacctcaagctgccggcgggggatctagggttccgtccgggggcgccgaggcggggatccggcggcggcggggcctgagggtggcgcgggcgtcggaggcggccgccatggagcaggacccggagcgcgcctgccttcggagcttcgagctccacgagagcgagtcgagcctttacgttctaggaactaattctgacagaacactttggagactactcaagatcgatagatcagagccgtcagagcttgtgatagacgagtgttctactgtatatactgaaagtgaacatcctgacttgttgaagggtcttgatgacgagcacaggtcaactggcggagtaaaatttgttacaaagttttatggcataattggttttatcaaattccttgggccatattacatgttgattattactgagcagaaaaaaatcggggaaatctttggtcatccagtgtatcaggtgaccaggacttcaatggttgaattagcaaattctaagacaagatctacttttcaaaacttcaaggacgagaacagatacaggaagatcttgaatgcacttgatcttaggaaggatttctttttcagttactcataccacattatgagaagtcttcagaagaacttggctgatccacaggatggatggaccttatacgagactatctttgtgtggaatgagtatctgacacggcggatccgtaattgtctcagaaatactttgtggactgttgcattggtccatggtttctttaagcaggataaattctcaatatctggcaaggatattatgttcacactcatcgctagacggtcgaggcattatgctggaaccagatatttaaagaggggggtgaatgagaagggaagagtagcaaatgatgttgagactgagcaaattgtctatgaagctgtgcctggacctactgaagtaagttctgttgtgcagaataggggctcaattccactattctggtcacaggagacatcaaaattgaatcttaaacctgatataatattgcatgagatgcagaataattatgaagctacagagcttcattttgaaaatcttagagcaagatatggaaaccctatcattatcttaaacttgattaagacacgtgagaggcgagagtctatactccgccgagaatttgataaggcgatcaagataataaacaagagcctgtcagaagagaatcatctgaggttcttacattgggatcttcatcaaaactctcaaggaaaacctacaaatgtactcgacgtccttctaaaagtggcatttcgggctctgaatttaactgagttcttctattgtcaagtcgcaccaaattctgagacttctgcacaatgccccaccctattgaatggtcttgatcaatatttatgtgatgacaacaatagtgacgacacagaatgcactgagattgttggtgatgtatcccaagaggatatctcaggcagctctgattcctctggtaatgcaaccacagaagataaatttgagaatagtggactgccaccaccaaaaccaccaaaattccaaaaaggtgttttgaggacaaactgtatagattgcttggatcgtacaaatgttgctcagtatgcacatggtttagctgctcttggacatcaattgcatgcgcttggttttatagaatctccagaactaggtttagaagctcccttggcccatcatttgatgcacttttatgagatgatgggtgacacacttgctgtacagtatagcggttctgctgctcataacaaggtattctctgcaaagagaggtcacttgaagctttttattcagtcacaagagttctttaggacacttcagcggcactacagcaacacctgtatagatgctaacaaacaggctgctataaacttgtttttgggatacttccagccacagcaggaaaaacctgcactgtgggagttagaatcatctgctgggaagcataacaataatctttttgatggccacccaagtacattgaaaagagtaaaatcagatggcaccattcttcatgaaagtaatgcttctatatctggctctggtcgttgccataatgaacagttaagtgcatcgcagcctgatgtccagaatgggtttcaattcccaacttcagaatccgattcacttcatgaaaatgacatttcatcagcttgtggaagtggagtagcacacctaaggtatactcctacagcctctgacgtgcttcatgtcccaagagctaaagttgaatattgccatgattctggtgattcaaactttttggatcttgaatggctttccacttcaggcaactcaagtgatgaaaggtctattgcaactagcacgccagatgcaaacctatcaaatgagaatgtcattagtggcataactcctgatatcatggaaaaccatcttgctgaaatgcagtatcagaagttacctcggaattttgtgcagtgggttaatcacggtgataccttttggtactaagatcgcaattactggaattcaatatgtcgccagcttcccagggtgggcattaacacggatctgagtagtagattatagagtgatatggatgctgcggcaaggcatttctcccgtgatatactccgcaccatccccaaagtcctttattggtccacgtgtttttacaatgggtgagtagatagatatctttctgttgaaagaaaatagagatgataattaggcttattattgttgacctgaaattgtcattattcatgggaacatgtcatattttcttgtgt

SEQ ID NO: 26432 - DNA, 1878 bp, Zea mays
  Clone ID: LIB4172-053-B8_FLI
tcgcccaatatcgcccctccgcggccgccacccttcgcttccgcaccccctcttccgcgcccggcgtttcggcttcttcgtctacccgggcgcgcaggttctcggttatcgcgtcggcgcgcgagatgccgtggccgcacgtgctgacggtggccggctccgactccagcgccggcgcgggcatccaggcggacatcaaggcgtgcgcggccctaggagcctactgctcctccgtaatcactgctgtcaccgcgcagaacaccgtcggcgtccaggggatccatgctgtgccggagaagttcgtgggagagcagctcaggtcggttctctcggacatgtcggtggacgtggtgaaaacagggatgctcccttcagctggagtagtcaaagttctgtgtgagagtcttaggaagtttccagtcaaaggcagctctagtggtggatccggtcatggtgtccaccagcggtgatactctttcaggaccatctactctcgctacatatagggatgaactattttctatggctgatatagtcactccaaatgtgaaagaagcatctaagttacttggtgatgtatcattgcatacaatttctgacatgtgcaatgcagctgaatctatttataaacttggtcccaaatatgtgcttgtgaaaggcggggatatgccagattcatcagatgcaattgatgtgttatttgatggtaaggagttcactgagcttcgtggtctgcgtataaagacccgtaacacacatggaactggttgcacattagcttcatgtattgctgctgaattagcaaaaggcgcaacgatgctgcatgctgtccaggctgcgaagaaatttgtggaatctgctctttatcacagcaaagatcttgtgattggaaatggacctcagggcccttttgaccaccacttcgagctcaagtctccatcatacaagatgggatcactgcaaaagttcaatccagatgacctcttcctgtacgcagtgacagactctgggatgaacaagaagtggggtcgttcgataaaagatgccgtgaaagctgccattgaaggtggcgctaccattgtccaactgagagaaaaagacgccgagacacgggagttcttggaagctgccaaggcctgtgtggaaatctgcaagtccagtggagtgccgctactgatcaatgaccgcgtagatgttgctctggcatgcgacgcagatggcgtccacgttggccaatcagacatgccagcatgggaagtacgacggctcctaggacctggaaaaatcatcggcgtctcatgtaaaaccccggcccaggccgagcaggcatggaaggatggcgcagactacatcggctgtggcggtgtcttcccgaccacgacgaaggcaaacaaccctaccttagggttcgagggcttgaggactgtgtgcttagcttcgaagctacctgtggtggccatcggcggcatcaatgctggaaatgcaggctcggtgatggagcttgggctcccaaatctgaaaggtgtggctgtggtctctgctctgtttgaccgggaacgtgtcgcggctgagacaagaaacctcagatccatcctgatgaagaatgcttactcaaggtcttagagcaagttgggatatgccgcctgttcatttactttctttgtttaggcccgaaataagtttgtaatcaatcactttgtcataaggagaaaccaaacaggcgctgcaatcttcaataaaccggagtcattatttctctggaaaagaacaattctgtgacatttccgaagtgtgatacatttcaaaggcactgaactgtgtaataagaaatcaataatgtaccagaactatatttgatgcaagtactaacttgggaat

SEQ ID NO: 26433 - DNA, 1725 bp, Zea mays
  Clone ID: LIB4172-053-H11_FLI
cggccaccagctttgaccgcctcccctcccctccgctcctgttcctccataccccacccccccgcaggagcggcgcggcggcggcggcggcaaagccaaaggcaagatgttcgggcgcgcgccgaagaagagcgacaacaccaagtactacgagatcctcggggtgcccaagtcggcgtcccaggacgacctcaagaaggcctaccgcaaggcagctatcaagaaccaccccgacaagggcggtgaccccgagaagttcaaggagctcgcacaagcctatgaggttttgagtgatccagagaaacgtgagatttatgatcagtatggtgaagatgcccttaaggaaggaatgggtggtggtgggtcccatgctgatccatttgacattttctcatcattctttggaccctcttttggaggaggtggtggaagcagcaggggaagaaggcaaaggaggggagaagatgtagtccactcacttaaagtttctctggaagatctttacaatggaatctcaaagaagctctctctttcgcgcaatgtcatctgctccaagtgcaagggcaagggctcgaagtctggtgcttcaatgaggtgccctgggtgccagggctcaggtatgaaagtcaccattcgtcagctggggccttccatgatacagcagatgcagcagccttgcaacgagtgcaaggggactggggagagcatcaacgagaaggaccgctgcccagggtgcaagggtgagaaggtcgttcaggagaagaaggttcttgaggttcatgttgagaagggaatgcaacacagccagaagatcaccttccctggtgaagctgatgaagcgcctgataccgtcactggagacattgtattcgtcctccagcagaaggaccactccaagttcaaaagaaagggtgaagatctcttttatgagcacaccctgtctctgaccgaagctctatgtgggttccaatttgttcttacacatctggacaacaggcagcttctgatcaaatcaaaccccggcgaagttgttaaacctgaccaattcaaggcgataaacgacgaggggatgcctatttaccagaggcccttcatgaaggggaagctctacattcatttcacagtggagttccccgactcgctggcgccagagcagtgcaaggctctcgagtcggtacttccgccaaagccttcgtccaagctgacagacatggagatcgatgaatgcgaggagacgaccatgcatgatgtgaacaacatcgaggaagagatgcgcaggaagcaggctcatgctgctcaggaggcctacgaggaggatgacgagatgcctggcggagcccaaagagtgcagtgcgctcaacagtaagcagactaccataatgggattcaaggcactttggttgctcttcaattatgcgagtgcgcctgtggactgtgtggttctatggttttgctgtcgctgagctacgaagtaggaagctgatgcgcccctggccatgcaagcggggaatgtatccttttttgctgctaccgaaaaatgctacccacgcatagctggctaccttataacttttgcttgtgagatttgctagagtgacgattttaatttataggtggacttaatgtttgtgtaaggctaggcataacatcatgtctcaatggacgttgccgttgcacattggtgcattttattttaatgtaacgcatgtgcttgtgctgtcgaac

SEQ ID NO: 26434 - DNA, 1680 bp, Zea mays
  Clone ID: LIB4172-055-G8_FLI
tgaaagcacatctggacctgcgttttgtgacttttagatggaactgtgaaaatatatatggaagaatttttagcggcttttagtggttttcaccaaacggtttttagatttttagcagtttatagttcacaataacttttttcacagctcacagcccacaacagctttttttacagccacgccccaaccaaacaaaccctaatacctgtttggctgtcccaaattttctccatttagcctttgattatgggtttattatttttttaacgatgaaccatgaatttcttgctataatagaaaacagaaaactgcaatgtgaagtacagcgggtcgatgtcttcaaagagcaatcctgttcttttgtccttaaccgtttggttaattacatcaagtgtccctgaatatacatcacgtacctaacaccactctactgcccccctctccccttgcaaattcacagtattttaggcctcatcagtcgtagcttgttgtcacagtgcagatttcagtatgtctttcaagattcagctcttgtcctccattgccatttttgcttttgccttgcatcttcacccttgtgtgtccactgagtttcgccgtgagctctccagctggaccactggcatagctacgtggtatggcgatgctaatggtgccggaagtgaaggtggtgcatgtgggtaccaatatgctgttgaccaaccaccgttctcgtccttgattgctgccggcagccccttcatctatgactctggcaatggatgtggctcttgctatcaggtggtatgctctagcaatcaagcttgctctggttacccggtgacagttgtcatcaccgaccagggccctggtggtggcccatgcctgagccaagcaagcgatggcatgtgcatgaatgagggagcccactttgacatgagtgggactgcatttggcgccatggcaaagcctggaatggccgatcaactccgtgctgctggcctgctacaaatccaatacactcgtgtgcagtgcgaatggcctggagttgatgtaaccttctctgttgactccggctcgaacccgaactatctggctgtgctcatcgagtacgaggactgcgagagcgatctttcagccgtcgacatcatgcagagctcagcagggcaatgggtgccgatgcagcattcgtggggtgcaatctggaggctcgactctggctctgctcttcagggcccgttccacctccgcttgacgttcagctcaggccgggtactcatagccagcaatgccatacctgcagggtggaatgcgggtgcggcgtaccgggcaggcggagtggcggtgactagggccaggcccaggagtggtggcagccaggccggtgaggctgctgctggaacatttagaggtttggtgtatcaccttctgatgtttgtggtattggcgctgtgaattataatgcaaatgcatctttggtagttttgagatgcaaatttaacaaatttaggactacccagggatttagattgtgcattttgatgttttcttgtagctgaggtctgagatggggggagtgttgtgcacgtttttgttgtggttgagttaccatcatgcaactgatcaggttggatggtagtccttgcatgtaaatacacatttggtgaaactgcttaggttaagtgtttagttcctttatcg

SEQ ID NO: 26435 - DNA, 2158 bp, Zea mays
  Clone ID: LIB4172-055-H8_FLI
ccaaaaacccacctcacctcgcccggcccccaacccctccgctgccgagtcccgagtcccgactagtattctattgcatcccctccggggagggctgaaccaattcaacacgctgtgcctgtgcgtgcgcttgtgtcgggcggggtcgcagcagccagccaggatataatccccgcgcgcgccgctcgtaaacagaggagggcgagagggagggcgagctgagccagtcctccgatcacgcgcccgcacacacgcacgcagcgcggcagggagaggaagagcttacaaggccacagcaggcagggcacggagaggctattcaccaccgctgccgcacatgcgagcgggcgcagcagcgcgcggggactctcctcgtgcaatgagcgccgccgcgacgccgcgccaccggctcggggtcgcgctgctgctcctgctgctcctcggtggcgccgacgcgaaggcgcacaactacgaggacgcgctgcggaagagcctgctctacttcgaggcgcagcgctcgggccggctcccgcacagccagcgcgtcacctggcgccaccactccggcctcaccgacggcctggagcaaggggtggacttggtcggcggatactacgacgccggggatcacgtcaagttcgggctccccatggcgttcaccgtcaccatgctgtcgtggagcctgatcgagtacggcgccgacgtcgcggcggccggcgagctcggccacgcgctcgaggccgtcaagtggggcaccgactacttcgtcaaggcgcacaccaggcccgatgagctgtgggctgaggtgggcgacggcgacacggaccactactgctggcagcggccggaggacatgacgacgtcgcggcaggcgtacaaggtcgaccgggaccacccgggctccgacgtcgccggcgagaccgcggcggccatggcggccgcgtccatcgtcttccgcgactccaacccgcactacgcgcacctcctcctgcaccacgcccagcagctgttcgagttcgccgacaagtacaggggcaaatacgacagcagcatcgctgaggtgaagagctactacgcgtccgtgagcgggtacaaggacgagctcctgtgggccgccctgtggctccaccgcgccaccggcagggctgactacctcgactacgtcgtcgacaatgccgacagcttcggcggcaccggctgggccatcaacgagttcagctgggacgtcaagtacgccggcgtccagatcctagcagcaaggttgctgctgagaggggagcacgcgacgcgccaccggagcacgctggagcggtacagggccaaggcggagcgctacgtgtgcgcgtgcctgggccggaacacggaaggcggcgcggacgccaacgtggagcgcagccccggcgggatgctctacgtccggcagtggaacaacatgcagtacgtgaccagcgccgcgttcctgctctccgcctactccgactacctggccgaggccggcgtccggaccgtgtcgtgcgcgggcggcgagaccgtggcggcccgggaggtggccgcgctcgccagggcgcaggtggactacgtgctcggcaccaaccccaggggcgtcagctacctcgtcggctacggccccaagtaccccagccgggtgcaccaccgcgccgcgtccatcgtgccgtacaagcacagcaaggagttcatcggctgcacgcagggcttcgaccactggttcggccgccggagctccaaccccaacgtgctcgtcggcgccatcgtcggcgggccggaccggcgggacaggttcagggacaaccgggagaactacatgcagacggaggcctgcacgtacaacacggccccgatggtcggcatgttcgccaagctgcaccggttggcgcggcaggagcgggaacaggggccgacgccggcgccggcgccggcgcccgtcacgtctgcagcggccgatgtgtaaatagataggaatgtagagggggggctgtacaattttccccattctttggttcattttttgttgggctctgaatttcattttacacagatccaggttattgtatacaaaagaaaaggtagaggcatcgacatgtgcaaatgtaaatccactaccagtacatacgagggaaagaaatggcattcttaactt

SEQ ID NO: 26436 - DNA, 1436 bp, Brassica napus
  Clone ID: LIB4175-001-G4_FLI
aaactctatggggcacgaaaacgccgccgtttgcgaaactcagcagcacgacgacgctgcgtcgcctggattcaagctcgtcggattctccaagttcgtgaggaagaatccaaagtccgacaagttcaaggtaaagcgcttccaccacatcgagttctggtgcggggacgccaccaacgtctcccgccgcttctcgtggggactaggcatgcgattctccgccaaatccgatctctccaccggaaacatggttcacgcctcctacctactcacctccggcgacctccgattcctcttcaccgctccctactctccctctctctccgccggcgaagctcaaccgtccgctacagcctcaatcccatcgttcgatcacgcttcttgccgctccttcttctcttcgcacggactcggcgtgagagccgtagcgatcgaagtcgaagacgctgagtcagcattctcaatcagcgtagcaaacggcgccgttccttcctcccctcctaacgtcctcaacggagccgttacgatcgcggaagttaaactatacggagacgtcgtcctccgttacgttagttattataacggaaccgttagtttcctccccggatttgaatctgttgacgatacgtcgtcgtttccgctagattacggtatacgccgtctcgaccacgcggtgggaaacgtccccgagctcggcccagctttaacttacctcgcggggttcaccggcttccaccagttcgcggagttcactgcagacgacgtgggaacagccgagagcgtattgaactcggctgtgctagccaacaacgacgagatggttctgttgccgataaacgagccggttcacgggacgaagaggaagagccagatccagacgtttcttgagcacaacgaaggagccgggctgcagcatttggctctgatgagcgaagatatattcaggacgctgagggagatgaggaagaggagcggcgttggagggttcgacttcatgccttctcctccgcctacttattacaagaatctcaagaaaagggttggagatgtgcttagtgaggagcagattgaggagtgtgaggagttggggattcttgtggatagagatgatcaggggacgttgcttcagatctttacgaaaccacttggtgacaggccgacgatatttatagagataatacagagagtgggatgcatgaagagagatgaggaagggaaggtttaccagagtggaggatgtggtgggtttggtaaaggtaacttctctgagctctttaagtctattgaagagtatgagaagacacttgaagccaaacagcttgtgggttgaatgaagaagaagaagaaccaaactaaaaggattgtaattgatatgtaaaactgttttatgttatacaaaatagtaaacgatgattacagaaatgtcttctcatcac

SEQ ID NO: 26437 - DNA, 1909 bp, Brassica napus
  Clone ID: LIB4175-009-D2_FLI
cttctcctcgcatcaccgagttagaataaaaaaaacaagtgggttctctgagaaatattcgatttttttttaaaaaaaagactgatgatgacgcttaactcactctctccagctgattccaaatctctttcttctttcttggataccacctcccggttcaatccaacccccaaactcccaggtgggtttagtttgaagaagaggaatcaacggagaggttttggaaaaggagtcaagtgttcagtgcagcaacctcctcctccagcatggcctgggagagctgttcctgagcctcctcgtcaatcttgggatgggcctaaacccatctccatcgttggctctaccggttctattggcactcagacattggatattgtggctgagaatcctgacaaatttagagttgtggctttagctgctggttccaatgttactctccttgctgatcaggtaaagagatttaaaccagcattggttgcagttagaaacgagtcattactcagtgagcttaaagaggctttagctgatttggactataaacctgagattatccctggggagcaaggagtgattgaggttgctcgccacccagacgctgtaactgttgtcaccggaatagtaggttgcgcaggactaaagcctactgttgctgcaattgaagctggaaaagacattgctcttgcaaacaaagagacattaatagcaggcggtccttttgtgcttcctctcgccaacaaacataatgttaagattcttccagcagattcagagcactcagccatattccagtgtattcaaggcttgcctgaaggcactctgcgcaagataatcttgactgcatctggtggagcttttagagattggcctgttgaaaagctcaaggaagttaaagtagcagatgcgttgaagcatcctaactggaacatgggaaagaaaatcacagtggactcagcaacgcttttcaacaagggtcttgaggttattgaagctcattatttgtttggggctgagtatgacgatatagagattgtcatacatcctcagagtatcattcactccatgattgaaacacaggattcatctgtgcttgctcaattaggatggcctgatatgcgtttacctattctctacaccatgtcttggcctgatagggttccttgttctgaagtaacttggcctagacttgacctttgcaaacttggttccttgacattcaagaaaccagacaatgtgaaatacccatcaatggatcttgcttatgctgctggacgagctggtggtacgatgactggagttctcagtgcagctaacgagaaagctgttgaaatgttcattgatgaaaagataagctatttggatatcttcaaggtagtggagttaacatgcgataaacatagaaacgagttggtatcatcgccgtctcttgaggagattgttcactatgacttgtgggcgcgtgagtacgctgctaatgtacagctttcttctggtgcaaggccagttcctgcctgatacatagttgttggagggatattgattagtggaagtgattaagaaatgttgtaacaagtttagtgcaaaatgtatttactttaacaccattttggcaaaggattatctgttctaagttgtacttaatatataaatgatccaaacaagccaacccgaaattaaaaacccaaatgggacattactctgtcggttttatgtgacgttttcaaaattttatgtgaaaacattatgttatttggtgtttttaacaatttgtattttatggtctaattttttattgatttgactagttttagttaatgtaattctgtggaaaatgtaaaatgaataaaaattaactatttttaataggtgtgtaaaattttaacgtcaactaatttgaaacataagtaggatt

SEQ ID NO: 26438 - DNA, 1309 bp, Zea mays
  Clone ID: LIB4185-001-F5_FLI
ctcaactctcatagccaagacgacgacagacggttcaacaactgccactgtcctctatctctcattctctctctctctctgcgcgcgcgtgtctctctcctgaacagcagagcagactgccctgctttcccagcttctatctctgcccagcgccgcctgccctgcctccactaaaaagagctccccagctccaacactcgtagactccggcactccgcgagccagccgccgccaggaagcagcagcagcaggtggctaccaaccaaccagttagcacgtagcaagcccaatttggcagcaaccataatatactccaccggtcgggtctctggtaggcctccagttctccactcccattcgccgatcgatgagggacgccgcggtggtcgtggcggtgcccgggcccggggccgcgacaggaggaagaggaggaggaggagggaagccgggggccgccggggcggcgccgtgcgcggcgtgcaagctgctgcggcggcggtgcgcggccggctgcgtcttcgcgccctacttcccgcccggggagccgcacaagttcgccagcgtgcacaaggtcttcggcgccagcaatgtcagcaagctgctccaggagatcccggcgcagcaccgaggggacgcggtgagcagcctggtgtacgaggccaacgcgcgcgtcagggacccggtgtacggctgcgcgggcgccgtctcgtcgctgcagcagcgggtggaggcgctgcaggcgcagctggcgctggcgcaggccgaggtggtccgcctcaggatgagcaacgactacgtcctgcgccgcctcaaggcggccggcgggggcagcagcagcagctacgccggctcgccgtcgtccatgtcctcgctcaagacggctgcggcagcggcggcggagccggacgcgcgatgcagggccactacgccggagctgctggtgctggacatggtcgtggaccagcccggcatggacgacgacgcccacttctggtcctactagctaaccgcgccgcgcgttccactcaagctaggttgtttttagctgattttagtcgtgccatcgaatcgggtgctgtttttgggtcacagatggtggtacggtagttggtatatatatgtggtatcagggtttaaggatttgtaacagcgtggcacgaccgcacgaggaaggtggcgcggtacttccatgagaagctggaacgttgtcacggatattggtgtgcatcatgctatgcatcgcaaggacctttctcttgcccagttaaacaggtgaagtctgctatggaaatgcaggtaccttttacct

SEQ ID NO: 26439 - DNA, 1203 bp, Zea mays
  Clone ID: LIB4185-002-B9_FLI
actgcaatctcgcagcggctgatggattagcaagcaggacaagagactgagatccatcctccagacacgcgcacgccaaggatcgcattcgccaagcaacgtcgggtcggcggcgcgggggcgatggagacgcggcggccgcggcgcggctggaacaaacgcttcgtcctcccgctcgcgctcctctgcctcgccgtgctgctccccggcgcgctgctcccgccgtccgcctcggcgtcgtcttcgtcgccggccgcgggaggtggcagcaggaaacgccggtgggttgggtttgactactatgtactggcgctgcagtggccgggcaccatctgccgcgagaccagcaactgctgcgacaccaatggctgctgccgatcacagcctctcaagtggttcacgattcatggtctttggccacagtataactatgggggctggccatcatgctgcagaccaaccagattcaacataaataagatcttaatgttgatgccgatactcgagaagtattggccgtccttgtactgtggttcttcttcaacctgctttggtggaagggggccattttgggtgcatgagtgggaaactcatgggacctgtgcttaccctgaaatacaggatgaatatgactacttctccacagcactgtatctctacagcaaatacaatgttacgaaagctctgagaaaagcacgtatccggcctacaagcggcagaaaatacgccgttggccatattgttgccgtcattgaatatgcgtttggggcaatgccgtcactcgtctgtaagaacggctcagttcaagaactcaggctctgcttccacaaggattatcagcctcgtgattgcacgcttgaggccggctctgcaccgaacggcagaagctactgccctcgctacatcacgttcccgtcgtacaaaccgtccgtggtggccaatactacggaggggatcaacaaccaatccaatggcgaggttccgagctacatgcgtacgtctgactctgagtagcgtccaggactccaggttctgtgggcctctgccgagccgagtttgtatcaaatatcaatagagcgagacgccacggcgtgcttgcaaaattaccggcccggtatggtcctgtataattctttcattcacagtatcgaatgactggccaccgcgcaccgggatttggaaatgaaatgtgaatgttaatgt

SEQ ID NO: 26440 - DNA, 511 bp, Zea mays
  Clone ID: LIB4185-002-D1_FLI
agggccgtccagtcgtccaccccaccgccgcagcctcgccccgaggagacaggagaacagcaggatgccggcgacgccgacgatcatcggcgccctccttggactgggcactcagatgtactccaacgccctccgcaagcttccctacatgcgccatccttgggagcatgtgttggggatgggtctcggtgcagtatttgtgaaccagctggtaaaatttgacgagaagctcaaggaggacctcgacaagatgcttgagcgcgccaggctagccaacgagcaacgctacattgatgatgatgaatagctgttcagatttgtttgtcagtgacctgtattttttgcaacatgttgtcagtacacatggtcaggactgtggatcccccatgacttagttgttgcctcagcttccacatttcaactgtggccttgtaataaaatgtcgttgcccaatggatctgatggatcacaattgtaagctacaaattatgggctttgaatatgatcgctt

SEQ ID NO: 26441 - DNA, 897 bp, Zea mays
  Clone ID: LIB4185-002-D5_FLI
cttcgagctcatctaatatagcaaccacacggcccgaaaatggcatccgctttgcgcgtactcgctctcctcctcgtgggcgccgcggtggcggacgccgcgagcatcgtggtgaccaacaagtgcgcgtacaccgtgtggccggcggcgctgccgggcggcggcacggtgctgaacaccggggagtcgtggcccatcgacgtgcccgcggggacgcggagcggccgcgtgtggggccgcacggggtgcggcttcgtcaccaacggcacgctggggcagtgccagacgggcgactgcggcggcacgctggcgtgcagcaaggtcgggttcgagcccatcacgctggccgagtactcgctcggcggcacaggcgccgaccggttcgacatctccctcgtccacggcttcaacgcgcccatgtcgttcctcccggccggcggcggcggcggcggtgccaggtgcggccgcggcgggccgtcgtgccccgtgcaggagatcacgttcgactgcccctccgagcagcggcgggtggccgggtgcggcaacccctgcgacggcaagagcagcagctgcggccccaacaacgggacggagtacttcaagaaggcgtgcccgcagacgatcacgtacccccgggacacgaccaacaccgtcttcacgtgcccggccgggacgagctacgagatcaccttctgcccgtgagaaaccacgagctggcaagcgagctagcgagctgagccaccgacacgtacggataggatcggagctcgtgatggattttggtcctgcatgggctctctctgcagctcgtgtttgcgtacgtatatgtaaacatcggtttatagatcatcatcttatgatgtcatctatatatattatatatttctggatgatatc

SEQ ID NO: 26442 - DNA, 872 bp, Zea mays
  Clone ID: LIB4185-002-G10_FLI
ctcgtctccccctaggggatcgtcggagaggaatcgcaaagagggccgtctcatccgagttaaggaagccatggagcacaaggaggctgggtgccaggcccccgagggacccatcctctgcatcaataactgtggcttcttcggcagcgcggcgaccatgaacatgtgctccaagtgccacaaggagatgataacgaagcaggatcaggccaagctggctgcctcctctatcgacagcatcgtgaacggcagcgacgccgtcatggagccggttgttgctggcagcaacacggtagtagctgttgcccaagttgagttgcaaacaatgaacgtgcagcagcccgctgatgttgccggacccagcgagggggtggcggcgatctccaaaggggggaaggtagggccgaaccggtgcagcgcctgcaggaagagggttggacttacgggattcaactgccggtgtgggaacttgtactgcgcactccaccgctactccgacaagcacgactgcaagttcgactaccggactgctgccagggacgccattgccaaggctaatccggtggtgaaggcagacaagctcgacaagatctagggggggttccctacggttgggtatcaggaagattgtaaaccgcggtaactcgtcatgcggaactgctgccttgccccccgcgcctttctcttccatgtttgctgctacaatcttgttgttgggcattgcagtgcacggtgcacacttgtgtagcccgcctcgagaattcctgcctctgcatctggtcagttctaaaatgatttgcatgttggctatgttgtgtaagctctatttatggtggtctcgctgagacgggtatttggcttcgcagttatct

SEQ ID NO: 26443 - DNA, 1306 bp, Zea mays
  Clone ID: LIB4185-002-H7_FLI
gcgcaatccgttcacgccaccactcatccactccccctccgcgaatctcatttctttactgcggctaggaggcggcggcggcggcggcgatgaagttcggcaagagcctgagcggacagatcgtggagacgctcccggagtggcgcgacaagttcctgtcctacaaggatctcaagaagcgcctcaagctcatcggcgccgggaacggggctgagcggcagccgaagcgggcccgccgcgacgactccggggaggctgacgcggccgcggccgcggcggcaatgacgccagaggaggcggagttcatgcagctcctggaggctgagctcgacaaattcaactcttttttcgtcgagaaggaggaggagtacatcatccgtcagaaggagctgcaggaccgggtggccagggcggccgggcgggaatccaaggaggagctcatgcgggtgcgcaaggagatcgtcgacttccacggcgagatggtgctgctcgagaactacagcgccctcaactacacaggattggttaagattctcaagaaatatgacaagagaactggagccctgatccggctgcctttcattcagaaagttcttcagcagcctttcttcaccactgatctcctgtataagcttgtgaagcagtgtgaagccatgctggagcagctccttccggttagtgaggcatctgtctcaagtgaagatggaaaaggagactctaatgatgaagagaagctggcgaagccaagttcttccttggtaaatggtggtggcatgccagagttagatgagatcgagtacatggagagtatgtacatgaagagcaccgtcgcggcccttaggtcactgaaggagatccggggcaagagctctactgtcagtatgttctcgttgccacctcttcagggcaacaatgcacaggacagctaccagatccgggcagagcaactagatgaggagccggagaggtggagcaaagtaacggtgatagagcaggcggccaaatgacagacttaatgggcaaaacatctgatggctgaacttaaaaattttagacttggacatttgctggagatgggactgggatcccaatctcccattcagaaatttgtatgaattcaggattcctaacagctgcaaaatggtggacatgttaaatcatagaattcccagcacaaccatcggacagaattgggctgattttattcactactgtgaattgatcatgtgtttttactgatatacaaccttatgattcgatgttgcttctgattgtgataatgaaaggaaaaaacaggttttggctt

SEQ ID NO: 26444 - DNA, 1334 bp, Zea mays
  Clone ID: LIB4185-004-E5_FLI
ctagaatagcaggtagcgcctggtggccatggccacggcgtctgcagcttgtcatggcgggggcatcgtgtactacaaggtccttccgatgagcatgttcctgctgctgctccgagggctcgtgcagccggtggcggccgcggcgtgctccgtggacgccatctacagcttcggcgactccatcgcggacacgggcaacctcctgcgcgagggccccgttggcttcttcgcctctatcggcagctacccgtacggccagaccctccgcaaacccacaggccggtgctccgacggcctcctcatcatcgactacttcgcgatggcgctgaacctgtcgctggtgagcccgtacctggacaagggcgccgacttcgccagcggcgccaacttcgcggtggccggggccacggcgctggaccgggccgtgttgctgcagagcggcatcatggctccaccggcgagcgtgccgctcagctcccagctcgactggttcaaggcgcacctcaacgccaccgcctgcccctcgctacaagattgcgccaagaagctcgccggagcgctgttcttggtcggcgagatcggagggaacgactacaactacggcttcttacagggcttcagatcgatcgaggccatgaaggcctacgtgccacaggtcataaacgccataatggacgtcgccaaggaagtgatcgagctaggcgcgacccagatcgtgatcccgggaaacttcccgatcgggtgctccccgagctacctctccctcttcgccgcctccggcgacctcgacgaccggggctgcctcaggagctacaacgccttcgcccagcaccacaacgagcagctccaggcggccatcgacggcctgaggaaggccaacaccgacgtcaccgtcgtgtacgcggactactacggcgccttcatgcacctgctggaccatgcttcgctcctcgggttcgagcagggcgcgctcctgcaggcgtgctgcggggcgggcggcgcgtacaacttcaacatgaactcgatgtgcggcgcgccgggcacgacgacgtgcgcggacccggcgcgccgcgtcagctgggacggcatccacctcacgcagcaggcgtacagggccatcgcgctgtcccttctcatggaggggttcgcgcagccggatgacgccgtgcaagagatctggagctgctgacgtgcacccgttttggtttcattgggcctgtacctgctatcgatacgtatatatttttcctctagactagaattttgtacctgctattgatccatgtataggtgtttgcattgttcatatatataataataacgtgggaaattag

SEQ ID NO: 26445 - DNA, 782 bp, Zea mays
  Clone ID: LIB4185-008-A10_FLI
cagtcaccactcccaagccagtacccacagtcctacgagcagtcgcacgcaagtgtcaagagacaaaacggtcgacatggctcgcacgcaatctgccgtagcggtcgccgtggtggccgcggtgctgctgctggcagcggcggcgacgacctcggaggccgccatcacctgcgggcaggtgagctccgccatcgcgccctgcctctcctacgcccgcggcacggggtccggcccctccgcgtcctgctgtagcggcgtcaggaacctcaagagcgccgccagcaccgccgccgacaggcgcgccgcctgcaactgcctcaagaacgccgccaggggcgtcagcggcctcaacgccggcaacgccgccagcatcccctccaagtgcggcgtcagcatcccctacaccatcagcacctccaccgactgctccagggtgaactaaaacctagaccacgcgcgacgacggccgcctgatcgatcgaccaaccattccgccgtcgccgccggccggatcatcgatcgtcgtcatgatgatatctatcaatctacgcgtgatgatcgatggctacttgtctactgctatgtactactaaataaaatctctccgtgtgtgcacgtacgcttgcatgtgcatggtagcatgtatgtacgacgtcgtccatgtatgtgtgtgtgacgtgtgagacagagagagagagagagagagagagagacaggatcgatcgagagacggtcatgtccttttggctgtttggtttattcatatcacaacttttgagtgt

SEQ ID NO: 26446 - DNA, 697 bp, Zea mays
  Clone ID: LIB4185-008-H11_FLI
gaaaactagaaaaggctcctcccgaccgcaacgcccctcatctccctcgaccccgacatccccgacccgatggcgcccaaggcggagaagaagccagcggagaagaagccggcggccgaggagaaggcggagaagacgaccgcagggaagaagcccaaggccgagaagcggctgcccgcgtccaagtcctccggcaaggagggcggcgagaagaaggggaagaagaaggccaagaagagcgtggagacctacaagatctacatcttcaaggtgctgaagcaggtgcaccccgacatcggcatatcctccaaggccatgtccatcatgaactccttcatcaacgacatctttgagaagctggccggcgaggccgccaagctggcgcggtacaacaagaagcccaccatcacgtcccgcgagatccagacctccgtgcgcctagtcctccccggagagctcgccaagcacgccgtctccgagggaaccaaggccgtcaccaagttcaccagcaactgagcgcgctgcgggatccgcggatctgttagaagggttctttgctgtgtcctttccccagtcccccaccctacccgcctagtagctagcttgcctgctctataaatccggcgcgccggattgtaatggtcctcttagatttgatgtccctgttgtggaatatagttgtatctctccgcttgct

SEQ ID NO: 26447 - DNA, 569 bp, Zea mays
  Clone ID: LIB4185-009-G5_FLI
ctagctttacctccccacaagcgcctccaagatgaagctcgtcaggttcttgatgaagctgaacaacgaaacggtgaccatcgagcttaagaacggcaccgtcgtacacggaaccattaccggtgttgacatcagcatgaatactcatctgaagactgtgaagctgacactaaaagggaaaaatcctgttacccttgatcaccttagtgtgaggggaaacaacatccgctattatatccttcctgacagcctaaacctggagactttgctggttgaggaaacaccaagggtcaagcctaagaagcctacttctgggaagcccttgggccgtgggcgtggccgtggtcgtgggcgcggtcggggtcggggacgttgagcatgctagctgcttttggaaattgcattgcgtgcatctgcagtgtaatctacattcctatcaattgtacgaagtatgcctttgattatgcaaccatgtatcaattgtttttttttgccgtggatttatgttgatgaggttaccatgtgatcatatgttctttccctagaacttttaagaacaattaaatact

SEQ ID NO: 26448 - DNA, 1354 bp, Zea mays
  Clone ID: LIB4185-010-F4_FLI
gttcccccctctcctctggcggtcggagccggttcctctgacgtactgcaggggcagtagggtcactgcgcgcgggccctgtcgcacgcgggggccacgcggcagtgcccaccccccacgtcagaggatctcgttccctggcggtctggcctgtagttctagctcgttccccccgcaagctcgcgacctcgcctagcggccaaaccacgctagagttcgcagttggaagaggggaggaggaagaggacgagatggcgagggatgacgggttcccggtgtgggaagcggcgctgctcgctggcgtggctgccgtcttcgctgcggggctggctggcgtctacatctccatgcctcgctccgactacagcttcctcaagctcccccgcaacctccaggagctccaagtcctcactgtccatctggagggctacagcagtgactacaccatccaggtgctggtgggctactgtgccgtgtacatattcatgcagacgttcatgatcccagggaccattttcatgtccctgcttgccggggccctctttgggcagctcggtggtctagccctggtgatctttgctgccactgccggtgcttcttcctgttatttcctgtccaagctagtagggaaaccactggtcttctcgttgtggccagacaagctcacgttcttccaaaagcaggttgcaaaaagaagagagaagctgctgaattacatgcttttcctgagagtcactccaacactgcccaatactttcatcaatttttcttcacctatagtgggtgtgccataccatactttcttctttgcgacggccattggcctcgtcccagctgcctatgtgactgtcagggctggaattgctttgagcgacctgagatcgttgaatgatctgtatgatccgcagtcgatagcggtgctgttcctgatcgggcttgtttcggtggcgccaacgttgctgggcaagaacgagaagccaaccagcgcatcggacatggcagctaacaccaactgatcactagtacacgccactccagctctcttctcatgtacatacaaaagtccagcgtttggtagtggtggcttcgagactctggatcaaataggacatgtcgccggccacgaacatggcgagggtcccaatctgtagatctgtcgacacttctgggaaacttttgtgctgactgctgattttgcagaagtgatgtctcatgatcacctcatcgtgaatcttgctggcaaaacgggctgggaacatctctctttcggttgctttgttttacattgtttcgctgttgtatcttgcacacgtcaaccagattcaatcaatacagccgattcagtgattcattc

SEQ ID NO: 26449 - DNA, 600 bp, Zea mays
  Clone ID: LIB4185-010-G6_FLI
cgacgtctgccggcagtgctcctgctcctcctcctccttcccggccgccgcgcgagcttgggttagtgtctcttctaagcggagacctgtgagaggagccatcatcatggccgctgttgagactgttgtcctcaaggttgctatgtcatgcgagggttgcgccggggcggtcagaagagtgctctccaagatggaaggagttgaaaccttcgacatagacctcaaggagcagaaggtgacagtcaaaggcaatgtcaagcctgaggacgtcttccagacggtttccaagtcggggaagaggacctcctactgggagggcgaagccacggccccggacgctgcggcggctccagaagccgaagcagctcccagcaccgcggcagaagcgcctcctcctgctgctccggcggcgccagagatcaccccagccaaagctgacgcctgatcgtcacgctattattcactcacatgtgatgctgtgcggctgcgactcctaaaccttaaatctagaaatagctggggattgggtttgcatcgtgttcttgccggtctagcaagtgactataagaataatggaataaacgatgacccagtgtgtgt

SEQ ID NO: 26450 - DNA, 647 bp, Zea mays
  Clone ID: LIB4185-011-F10_FLI
gtgtagtgcagccaaggcagcagagcgtgaggtgcactaccaggcaacaaggaaaaaaatggagctccaggcaaggtgcgtctgcgtcgtcgcgatgctcctggtggccagcttcgcggggctggatacggcgcacggcgcgggagagtgcggccgcgtcccggtggaccaggtggcgctcaagcttgctccgtgcgcggcggccacgcagaacccgcgcgccgcggtgccgccgagctgctgcgcgcaggtgcgcgccatcgggcgcgtccccaagtgcctgtgcgccgtcatgctgtccgacaccgcgcggaaggccggcgtcaagcctgccgtggccatgaccatccccaagcgctgcgccatcgccagccgccccgtcggctacaagtgcggcccatataccctgccatgaggtgatcatgaggagccaagtgatggcgggcagtgttgtggcagtggcacctgaaggactccaaactctgactgccaatatgccgtgacctctgtcgcatcttactttccaaagatcccgagaataatgtggctgtaataatgcctcaactttggaataaaattgtatctttttcaccaagtcgataacactgtaaaatgcaattgacaagaacagtttccaaacttctgtc

SEQ ID NO: 26451 - DNA, 834 bp, Zea mays
  Clone ID: LIB4185-011-F6_FLI
gcacccgaccgctttccgcatggcttcccacatcgacttccgctgcttggatgagggcctcggcggcgagcgcggcaagcgcaagcgtcgcgaggatgccgaggcggcggccgcggattccatggacctcgatgccgacgcgcaccggccgtctaagctccgcgccatgccttccctctccgacccctcgaagccggcctccttcggccagcccacctacgacggcgtcatcgcagggcggttgtcgggacggcggtggaaggaggcccgcacccggcgagcgtcggccgtggcggtgtcgcggaagccgaccccgctggagcagcgcgtccgggagaagtcgctgaagcgcgcgtaccaggcccgcaaggcggagctcaaggaagagatccggcagaacaaggtggccaagcggaaggcccgcgaggagcgtgagaagcggaagcaggagaacgtgctccgcacgggcaccaaactgcagagggtcaccaacccaaagacgatccagaagatcgccaagtccaagaagcgcaagcagctcaaggtcgtccccgacgagttcctcggcggcaagaagtcggtggccaaccggcgcatgcaggtgcctggactcgaaaattgaatctgacaggcctcgatctctctgtatctgttctgtggcggcgttgagttggcaaggttagttcgacgacgattttgtacttgcttctggttatgtagtttgaagcgtgattaaattaagcgattaaaatggcgtgcaatagaagttatcaagttctgatatgagattttactgccgcatagtcaattttgttgggattatgggctttcgat

SEQ ID NO: 26452 - DNA, 1002 bp, Zea mays
  Clone ID: LIB4185-013-F8_FLI
tcgctcccgctgctcctcgtctggctccagctccagcttctcctcgcgtccgcctgcgaccgctgcgtgcgccactccaaggccgcctactacacctccgcgctcaccctcgccggcggctcctgtgggtacggcaccgatgccgcctccttgagcgccgggttcctcgccgccgccagccccgcgctgtaccgcgccggcgtcggctgcggcgcctgcttccaggtgcggtgcaaggacaagaagctgtgcggcgcggcgggcgccagggtggtggtcacggaccgcgccaggaccaaccgcaccgacctcgtgctcagcagcaccgcgttcgcggccatggcgcgccccggcatggccgcacgcctcgcagcacgccgcgccgtcgacgtcgagtacaaaagggtgccgtgcgagtacaagcacaggaacctgtcggtgagggtggaggacaggagccatgcccccggcgacctcgccatcaggttcctctaccagggcgggcagaccgacatcgtcgccgtagacgtcgcgcaggtgggttcgtccaactggaggttcatgacgcgcgacgacgggccggcgtggagcacgaggcaggcgccgccgggcccgctccagctcagggtggtggtgacgggcgggtacgacggcaagtgggtgtgggccgaccgcgaggtgctgccgcggcggcggcgcgccggcgaggtctacgacacgggcgtccagatcacggacgtcgcccaggagggctgcttcccgtgtgacacgcacgagtgggaggagtgacggctgcaacggaactcgctgaggactggcgagtgggcctgcggagttgagttgctctgtctggctccttcgtgtcactcgctgccttttgagttttgacggagtggcacttttaacgacgagaggagagccccgaaacccctctccctcccctgtacatgaattagctgcatgcgtcgtcgtcgttgccatggccgttgtttcaaccggatc

SEQ ID NO: 26453 - DNA, 990 bp, Zea mays
  Clone ID: LIB4185-014-A6_FLI
ctcccgcacaccctgcctgatccctcccaataagctccccagctccacgccggacgcagcagcagcagcagtagagatggccgccctcgccgcctcctccacggccgccttcgccgccaagccgcgcctcccacgcgcgcgcctcaccgtggcctgctccgccaccggcggcgacggcaacggcagcagcagcagtgtgtcgctcgcatcctccgtgaagacgttctcggccgcgctggctctgtcgtcggtgcttctctcctcggccgccacctcccctccccccgcggccgctgacatcgcggggctgaccccgtgcaaggagtccaaggcgttcgccaagcgcgagaagaactcgatcaagaagctcaccgcgtcgctcaagaagtacgcgcccgacagcgccccggccctcgccatcaacgccaccatcgagaagaccaagcggcggttcgagaactacggcaagttcggcctgctctgcggcgccgacggcctgccgcacctcatcgtcagcggcgaccagcggcactggggcgagttcgtcaccccgggcctgctcttcctctacatcgccgggtggatcgggtgggtcggcaggagctacctcatcgccatcagcggcgagaagaagcccgccatgagggagatcatcatcgacgtcgagctcgccacccgcctcctccccagggggttcatctggcccgtcgcggcctaccgcgagctcatcaacggagacctcgtcgtcgacgacaaggacatcggctactactagctgctgcacctgtgcttgcacatcgctgctggcgagttgggcagtcgtcgtacgtgggaaacatggcttttggtgtaggaggaaggaatggaagtggtctgttgtacttaaagaaactagatgaagaagtcttgtataactgaaacttcacccctctcttgtgtatgatgtattcaccttcgtcttgaaaattcttgagaacggtttcatcttgc

SEQ ID NO: 26454 - DNA, 937 bp, Zea mays
  Clone ID: LIB4185-014-E12_FLI
gcacgaggagcggcggcgtggaccggcgccgcatcccccaactcgctgctgctctcgcgctcgcctccccacgccgccgcgctcgcgccttcgctgggaagctccatgcggaggcggctcctgctcggcgtcggcaccccggccgtggcggcgctggcggccgcggcgccgccagcggtgctgcaggacggggcggtcactgtgctcatcaccgccggcgcctactctcttgtgcgcgtcttcgacgagctcaccgagcggcggctcatcgaaaagagcttgagcaggaaggttgtgcacgtgctgtccggcgtcctgttcatgtcatcttggcccctggtcagcaattcgacagaagcacggtatttcgccgcggttgtcccgttcctgaactccatgaggcttctgatatatggactccgtctctacactgatgaagctctggtaaaatcagtgacacgtgaaggaaaaccagaggaattgctgagaggccactctattatgtcctggtgctgctgttcagcgttttagtcttctggcgtgagtcccccatcgggatcgtctccttgtcgatgatgagcggtggcgatggtttcgctgacattgttgggaggaggtatggctcagcgaagctgccattcaatcggaagaagagctgggccgggagcatctcgatgttcatttctggtttcctgctgtccgcgatgatgatgctctacttctcaagcctgggttacattgatgttatctgggaagaggcacttggtaagctggcgcttgttgcactagcagcgacagtagtggagtgcgttcctgtgaccgaagttgtagatgacaacatatctgttcctttggccaccatgctggtagcttttctcttgtttagctccaaccgcacaatagttaattaaaatactactagtgcattatttaagac

SEQ ID NO: 26455 - DNA, 880 bp, Zea mays
  Clone ID: LIB4185-014-E9_FLI
gcacgaggtcagatcagatcgtagcagccaaggattccgcgctccgggggtgccatgaagctgaagctcctctctccctgccttctcctcctcgccttctttgccaccgcggcgtacgcggcgtcggcgtcggcgtcgcgcgcggcggccgtcgtcaggggcgcgggcgccccgtcgcagtcggagttggagtcggacccggagaaccagtgcgtgtacacggtgtacgtgcggacggggtccatctggaagggcggcacggactcgaccatcggcgtgacgctgctgggccccgacggcacgggcatccggatccgggacctggcggggtggggcggcctcatgggcgccggccacgactactacgagcgcggcaacctggacatcttcagcggccggggcccctgcatgagccaggcgccctgcgccatgaacctcacctccgacggcaccggcgcgcaccacggctggtactgcaactacctcgaggccacggtcacggggccccacctcgggtgcgcgcagcagctcttcaccgtcgagcagtggctcgccaccgacgcgtcgccctaccgcctgtacgcggtcgtcgacaagtgcaagacgaagcggcaggagccgcgacgctcgccggccggcgaggccgaggccaccgtgaccgcgctctaggtacgaccagtagtaaatcatcgacagaggctagctcctgcctctgctgtgtgtaattactgtatgtgagtgaccgatcccatcggattgcgttcgtcttgtggagacgctgcgtgatcgcgcgattggtttcgctttcgccgccttgtttttgcacgaggaggttctgctagtgcgtacggggagaataaaagcagcattcctgctgtcc

SEQ ID NO: 26456 - DNA, 818 bp, Zea mays
  Clone ID: LIB4185-015-A4_FLI
ggtttcctgggcgttacgtctcatgcgcttgtggccttttacataagcaacccccccgacctcttttccctaccctctctttcgttacctacaggctacagctcccgtctctccgccgcttgcttggaaaacgaagaaaccctcctccaccaacccaatccagctacatccgtctgggtgaactccagggccaggagcagttcgccgccttcgttcgcatcacctacgcggttcgatccaactggcaggaaggaacgtgatggccaagacgagctcgttcaagctggagcacccccttgagaagaggcagtctgaggctaatcggatcagagagaagtaccctgacagaattccagtgattgttgagaaggctgagaggagtgacattcctgacatcgacaagaaaaagtacctcgtccctgctgatcttacggttggacaattcgtgtatgttgttaggaagagaatcaagctcagtgctgagaaagctatcttcatctttgtgaagaacacccttccaccaacagctgctctgatgtcttcaatctatgaagagaacaaggatgaggatggattcctctacatgacctacagtggtgagaacaccttcgggctcctctagatggctcaccacaatcgggtctgccttgcccttgcttccctactgatgccctgcctcgtgtaaataagacctgccaagcaattgtgtatattctggtttcctcgctcaactgctggaagtctaaaacctaccttatcatggacaccgtttaaattaagtaattgactggacctgaatctggggggtcctatgacct

SEQ ID NO: 26457 - DNA, 789 bp, Zea mays
  Clone ID: LIB4185-015-B1_FLI
gctcctctatcatagggatatatggatataagacgtgatttccatatggccgaaggggaaggagaatggagctactccaagaattgtaggcgccagcaagtagctgtccgcgagaccaggccaatggtcgagactgccgtcaagcaggtgtacgcagctctcttccccagaaccatggtcgtcgccgacctcggatgctctgcagggccgaacacgctgctcttcatctctagcgtcctgagcagcatcgctgctgcggctgctgctgaacggtgcaagcaggttgtgaaagggtcctcctcctcctccctactatgtcatggggctaccggagtcctattacaacaggctgtttcctcgtcagactgtgcatctgttccactcctcctactgcctccactggcgctcccaggaacctgagggactagaggcgtggagaaagccttgcctgaacgaggacaacatctacatcgcaaggagtaggaccacgacaccttctgtggcgaaactgttccaggagcagttccagaaggacttctccctcttcctcaagctgcgccacgaagagctcgtgcatggagggcgaatggtgcttgtatttctcggcaggaagaacgaggacgcgtacagtggcgacctcaaccagctcttcgcactggtcgcaacagcgttgcagtctcttgttttgaaagttagttatattagttgcatatatatgtatgtaaatttttcttgtaatttttttgcttaattgttttcactaattaatctgtggaggaaattaaaagc

SEQ ID NO: 26458 - DNA, 778 bp, Zea mays; identical to SEQ ID NO: 25443
  Clone ID: LIB4185-015-B8_FLI

SEQ ID NO: 26459 - DNA, 762 bp, Zea mays
  Clone ID: LIB4185-015-E6_FLI
aggcagatccaagaagagggaagagcaccaaggaccttcggcgcccgttcaggatccacatcttcccgagcgagttcttggttgacctcttcccccttcggaccacctccaaggctcttggtgtagcttgccactctcaccaatcaagttttcatgtctgatctcgacattcagatcccaactgccttcgatcccttcgctgaggccaatgctggggactctggtgcggcagcagggtcaaaggactacgttcacgtgcgcatccagcagcgtaatggtcgcaagagcctgactaccgtccagggattgaagaaggagttcagctacagcaagatcctcaaagatctcaagaaagagttctgctgcaatggtacagtggtccaggacccagaacttggacaggtcattcagctccagggtgatcagaggaagaacgtctcgaatttcctcgtccaggccggcattgtgaagaaggagcacatcaagattcatggtttctgagcaaccgccgggtccatagcaaaccaaccctgcatgcagggccagcttattatatataatatctgaggtggagcatatctatctggctgtgtactgcaagcaggcctagtacgccgcctgcgcgttcctcctattacacatataggcccctccctgcgtgtatgcttgttaccgtcgtgtcgaaccttgtactacgaggctccatcgaacatcgatggcttgcttctttatcagaacatgtttgaataaacgctatttggt

SEQ ID NO: 26460 - DNA, 836 bp, Zea mays
  Clone ID: LIB4185-016-E2_FLI
gcaaaacgaactgcccgatttcaacggcccatatcactccaccaaccctaaaaccgcttccgcaaccacgtataaaaacaccgcacgcgccgccgccgccgtcctattcctcggagaggagaagccgccgtcgcagcaatcacagcagcccggagaacggccaggtccgacaagatgcagatcttcgtgaagacgctgacagggaagaccatcaccctcgaggtcgagagcagcgacaccatcgacaatgtcaaggccaagatccaggacaaggaagggatcccgccggaccagcagcggctgatctttgccgggaagcagctggaggatggccgcacccttgcggactataacatccaaaaggagtctacgctccacctcgtgctcaggctccgcggtggcatcattgagccctcgctgcaggcgctcgctcgcaagtacaaccaggacaagatgatctgccgcaaatgctatgcacggctgcaccctagggctgtcaactgccgcaagaagaagtgtggtcacagcaaccagctgagggccaagaagaagatcaagaactgaggtgttgctgctagtcagtttcatggacaatgttgtgctgtatttttgtttggttgttgaaccgtgtttgtttaccgaacatattggccttatgttatgttttaccatgttgtcgatgacacaatactatatgacgatagcaactatgctattgtagttttggtcattgttcacctgatatgtgccatatttcggtacaatttcgttagtgggcatcccgaactgtttcctttctactcattccattttaaattattgaacttttatttagc

SEQ ID NO: 26461 - DNA, 816 bp, Zea mays
  Clone ID: LIB4185-016-E4_FLI
ctccaaggctgctcccagcaactcgtttctttcttcgagagagggcaaaaaccggcaaggggagcgaagcggagagtctcgagagcaagggagcgcggtgacgtcatcgttttccaaggtttctcgatcggctgctatggcgaccagggcggcgtcgagattcctgcagcgcaggctcctgtcttccggcggcaaggtcctcagcgaggaggagaaggccgcggagaaagtgtacatcaagaaaatggaacaagagaagctggagaagctcgcacgcaagggccccagctcaggagagcaaccttcgtcgactacagtctctgcagcaagtgatgtgaagactggggctgggccaacagagtcagcgtctgcaaacgtgtctaccgacaagaacaggaactacgctgtcctggcaggcacaattgctgctctgagtggcctgggttggtatctattgtcaaagcctaagaagtcggaggaggttgtggactgaagagggggttacgaatgcgagctgtggatggttggccttatatttcaccatggtttactttctgcgcacaccttctggaaataattgttgaaacatacgctgcagtctgcattacttgttctgaggcctgttgcaacaccgaacattgaagtctgtactcgagacgttccgtagttctctccctcgcttgacaggttgcaaatgttgagtgatgcttgtcctacgtcgttgctggagaagtggagaggtttttttggtactgatgttttgaatgtaaactcgttgccactggccagcacacatgacgaagagcattctgtgat

SEQ ID NO: 26462 - DNA, 1225 bp, Zea mays
  Clone ID: LIB4185-018-A5_FLI
gcacgaggcacgcccttgactgtgaagttgcaccgtccgcctctgcgagtcgggtggtcgccgcacgaggacggaacggaatgctcagtctcgccgcccacatcacgccgctgtcctactccacacaccgcgctcacctactccaatccagacccctctctccctcacccacagtccccgccggcgccgcgtccgcgtcctgtgcgcctcgctcactctgcttccgccgccgccgcagcagtcgtctcgcagcggagcggacccggaggcctaccatggcagcggcaatctcgctggaggccggcggggccctggcccatgacctagggtctgcagtcgtcacaggtggtgtcgccctcgcgctcctcaaattctttgaggagctcgccaagcgcggcgtcttcgagcagaaactcagcaggaagcttgttcatataagcgttgggctggtattcatgctcttttggcctctttttagctctggatggtatactcctttccttgctgcgctagcaccaggggttaacattataaggatgcttctactggggctgggacttatgaaaaacgaggctatggttaaatcaatgagccgctctggagattacagggaacttctcaagggcccactgtattatgctgctactataacttttgccacgtctcttttatggagaacctcaccagttgctatagcacttatatgcaacttatgtgctggggatggtatagccgatgttgttgggagacgcctaggtaaagaaaagcttccatacaatcccaacaaatcatatgctggaagcatagcaatggcggtggctggttttctggcctcagttgggtatatgcattacttccacactttcggttttattgaggaaacatggtacatggctttaagcttcctcgtggtctctgtagctgcagcactcgttgaatcgcaccccatcagcacagaacttgatgacaatttgactgttcctttgacatcattcctagttggtagcctcatcttttgatgtttaggcgcaaggacgtatgagatgtttctccgtcatgctgtaatcttctgatgtttaggctcaaggacatatgagatgtttctccgtcatgctgtattttatgtaaaacgtttctaaaatactactataattgtgagaatctgtacctagagtttggagaatatgttcggtttgtttatcataatacaagagtgtgtttggtt

SEQ ID NO: 26463 - DNA, 1070 bp, Zea mays
  Clone ID: LIB4185-019-A4_FLI
cttagctccactccagctccaatcacagtcgtgaccagagcgcgagagctagctagagggccgtgaaaatgccgatcaataggatcgccctggggagccaccaggaggtgtaccacccgggcgccctcaaggcggcgttcgctgagttcatctccaccctcatcttcgtcttcgccggccagggctccggcatggccttcagcaagctgaccggcggcggcccgacgaccccggcgggcctgatcgcggcggcggtggcgcacgcgttcgcgctgttcgtggcggtgtctgtgggcgcgaacatctccggcgggcacgtgaaccctgccgtgaccttcggcgccttcgtgggcggcaacatcaccctgttccgggggctcctgtactgggtggcgcagctgctggggtccaccgtggcgtgcttcctgctccgcttctcgacgggcgggcaggccacgggcaccttcgggctgacgggcgtgtcggtgtgggaggcgctggtgctggagatcgtgatgaccttcgggctggtgtacacggtgtacgccacggcggtggacccgaagaagggcagcctgggcaccatcgcccccattgccatcggcttcatcgtgggggccaacatcctggtgggcggcgccttcgacggcgcgtccatgaaccccgccgtgtccttcggccccgccctcgtcagctgggagtggggctaccagtgggtgtactgggtcgggcccctcatcggcggcggcctcgccggcgtcatctacgagctgctcttcatctcccacacccacgagcagctcccctccaccgactactaaaagccgaagccgaccgacctaggggtgcgcagcgcagctagcgcatccagctctctctccccgctcgccgccgtttagtttctctcgtgcacgtgcatgcatcgtcgactgtctcaggccgccgctgcgccggcgccgctcgcatcgtttgcttccttggaccagcagtcgtcgccgtcaggctgaactgcttgtaaccgtgaattccggacccgtttgcttctgtaagatttgtgcatttgcctgagt

SEQ ID NO: 26464 - DNA, 951 bp, Zea mays
  Clone ID: LIB4185-020-G3_FLI
ccatggtctcgctgctccctcgcgctccctcactcgccttcctcgctaagtccgcctcttcgcagcggccgcctgcgccatccatgtcgtcgcccttctccgccgcttccgtggccgcggggtcagaggcggcagccggcacgaggaagctgcctgtgctgctgttcgacgtcatggacaccctcgtccgggacccgttctaccaccacatccccggcttctttcaaatgtccatgaaggaactactagaagccaagcatccaacggcttggtcagaatttgagaaaggactgattgatgagaatgagctggccaaaaagttcttcaaggatggcagatcgtttgatttgcaaggtctaaaagagtgcatggtgagagcatatgaatacattgatggcgtcgaagatattctttgctgtttgaagaaaaataattatgaaatgcatgcttttacaaattatccagtatggtaccaattaattgaggataagctaaagctctcaaagtatttatcttggacattttgttcttgtagaactggaaagcgcaaaccttcgcccgagttttatcttcaagctgcagatcaactcaacgttgatccagcaagctgcgtttttattgatgataggatgataaacattgaagcagctcttagtgtaggaatggttgggttgcagtttaaaagtgctgaggcactacagaaggacttgtgtgctctgggagttgaattatctcctcttgtttgtgaaggtgaagcacaagtacaataaggtcgtgtgtgccctatcttatcttatgctcaaccaaactacaatacgaatgtacataatgtatggtgcccttgctttgtgagctatgtcaataaattattgtgctaatctgaatcgtctatcaaatataactgatatgttaactgcacatattctctcctatgaagagctttttgttgtc

SEQ ID NO: 26465 - DNA, 854 bp, Zea mays
  Clone ID: LIB4185-021-H10_FLI
cgccagcgccatccatcgcggcaaaagccgagacgacccaggaatctcggcaccgtcgcccccctttctctctcgctcaaaagttgctgctggagccctctcccctctctccgaccaccaaccatggatgaggcgcaagttgtggagtcaaaggatggaaccatctcggttgcttctgcatttgctggttatcaggaagctgtgcaagacagggatcacaaattcttgacaaaagcagtggaagaagcatatcgaggagtcgattgcggtgacggaggtccattcggagcagttgtcgtctgtaatgacgaagtagtagtcagctgccataacatggttctgaagcacactgaccctactgcgcatgctgaagtaactgcaattagagaggcttgcaaaaagcttgggaaaattgagctctcagactgcgaaatttacgcgtcctgcgagccatgcccaatgtgctttggtgcagttcatctctcccgaatcaagaggctggtttatggggccaaggcagaggctgccatcgccattggatttgatgacttcattgcagatgctctgagaggcactgggttctaccagaaggccaacttggagatcaagaaagctgacggcaatggtgcattgatcgctgagcaagtctttgaaaagactaaagagaagttccagatgtactgatgctgagcagaagagagatctcagatttgtacaatgcttactcataaggacaagaaataatacagtgcccaaatgtccattgtttcgggaaaaaaatctcaattccactgttcaacattttgatgatgcctgaatttcttgttaacagacacaagattgttatttgctgt

SEQ ID NO: 26466 - DNA, 863 bp, Zea mays
  Clone ID: LIB4185-023-A10_FLI
ccgaatctgagcctcgcggtgggcatgtcctcgtcctcttccttccccacctctcgcttccccttcgctgccggcgccagggcccccggcggcagaggcggtggaggcgggagcagcgtgcggccgtgggggtcgaccggcgggacgtcggtgtcttcatctgggaaacggatacagaaggagctgctggacctcaacgcctccgactgctccgcggggcccaagggcgacaacctgtaccactggctctccaccatcttcgggccccaaggatcgccatatgaacgagggatatttttccttgacatcgtgtttcctcctgattatcccttcaaacctcccatggtaactttcaaaacaaggatttaccattgcaatattgattccacccgtaaagtgcatttggacattctgaaggatggttggagtccagctttcactatttcaaaggtgttattggccatcaaagacatcatcaacaatccagatccatacaccccgcttgtgatgagcatttcacgtcagtatctgactgatagagctaaacatgatgaaacagcagctgagtggacaatgagatttgcaagatagaggattctgtttgcatctaagcacgattgaccttgtaaaaaaatcttaatgtggcctgacgcctgaaatggtgaatgttggcaaaggagccatcagccatgtattatttgatgtgagttgtgacataaaggtgtactttatgcttgagtgttctttaatcgctgcttttaggtggagaataatctttttcgattttgcacttctgccaaagttgcaccctgaactcttcagaacttttcttccgagtttatttctaaaaatggtttctattg

SEQ ID NO: 26467 - DNA, 1013 bp, Zea mays
  Clone ID: LIB4185-025-D7_FLI
gtgccagcgccccttcctcccttcgtctccgccgccgcggactcctcgccggaaccctaaatggaccccggcgccggtgcacactactccgcccgtaccgcggaggaagtcttccgcgatttccgcggccgccgcgcgggcatgatcaaggccctcaccaacgatgtggagaagttctaccagctgtgcgaccccgaaaaggaaaacttgtgcctttatggctaccccaacgaaacatgggaagtaactttgccagcagaggaagttcctccagagatccctgaaccagctttgggtataaactttgctagggatggcatgaacgagaaggattggttggcgttagttgctgtccacagcgatgcctggttactagctgttgcattctactttgcagcccggtttgggtttgacaaagaggccaggcggcgactcttcaacatgataaataacttgcccacaatatttgaagtagcgactggggttgccaagaaacaaaacaaggagaaggaacccaataataccagcaaaagcaacaaaccaagttcgaaaatgacaacaagacccgagtctcatttgaaggcgacaaaagtggcgccccctaaggatgaagatgatgagagcggtgaagagtatgaagaagaggaagagcgtgataacaccttatgtggatcctgtggaacaaatgacggcaaggacgaattctggatctgttgtgatagttgcgagcggtggtaccatgggaagtgtgtcaagatcacgcctgcacgagctgagcacatcaagcactacaaatgcccagattgcagcaacaagagggcaagagcctagcaccaagccctgctgtgactctggagtgaagtaagcgccaaatcattgatgtctgcagatatatgcctagctgtctagcttgtagacttgctttccatttggaatgaacgctgttgattcactcggttgccctcagcagctcatgttgctcaggcttaattgtgtttaatgttttactagcg

SEQ ID NO: 26468 - DNA, 764 bp, Zea mays
  Clone ID: LIB4185-025-E8_FLI
tttaccttctccagtcctctctgctggactctcggcagattccgctccagcgcccaccgtcgcccaccgtcgcctttcaaaaagctagagggttcctcgagagggagaagcgtacccggcagctccgctccgtcagtccgtccgcccccaagaatgtcagacgaggccaggcgcgggcccgcgggcgccgcgcaggtggtgcttcgggcctcctccgaggaccgcaagccggtgggctcggggtctccgccgccggcagcgaccgcgactgcggttgcgcacaagatccagctcaagagtgccgacatgaaggaggagatgcggcaggaggccttcgaaattgctcgcatcgcattcgagaagcacagtatggagaaggacatcgcggagtacataaagaaggagttcgacaagaaccacggcccaacctggcactgcatcgtcggccgcaacttcggttcctacgtgacgcacgagacaaactactttgtatatttctacatcgactctaaagctgtcttgctattcaagtctgggtgattgtcgcagccaatagagtcaaccttgcatgcctacatcttctttctctcgtgtatgctccatcccctcccctttcccctcagagtcgtctgcagccaagcctggaagccggtaatcttatgagcctgcatgttgatgtatcagcaacggattattcttcgcatgccatagtgtgagatcaggttgcatcttatttatgtctgatatatcttggtgttgtgagt

SEQ ID NO: 26469 - DNA, 834 bp, Zea mays
  Clone ID: LIB4185-026-B6_FLI
cccaagcagtcctcgcagcagatggcagttcccggcggccgcaacggactcagggacgaggacgacgacatggcccagcacgccgaggccttcggcggcgtctctgacgacgaggacgtgcccccccaccttcgcgccctcgccaacgccgcccagtccggcgacgtcaccgcccttgtggctgccctcgataatcatgatggcagtattgatgttccagttgaagatggtgatactttgctccatctggcatgcttatatggtcatcttccttgtgtgcagctattgctggaacgtggagctagcttggaatgccaagacgaagaaggtgctattcctcttcacgatgcttgtgctggaggcttcactgagctggtccaatatattctcaactttgctgccaacaaggatggttgcgtagtgagaatgctcaacactattgattctgaaggcgatacgccgctccatcatgctgctagaggagaacatttggatgttgtcaagcttcttctccaggctggggcgtcccccaagaaggagaacacttacgggcagacacccgctgatatggctgaccaagacaccgaagttcgaaccctgttgactgccaagcaaattgaggcaagcacacacatgagtgatgattaagcggcattggaatccttagttgcaactggtaatgttgagaaatagccgtaacatcttatctgccatccaaacttcatttgaactgaagtaatattgtaatcagactagtatggaggggttagcttagctacatgatcatgctccttttccttatcgctgcattatactaaagatgaagtgaacacc

SEQ ID NO: 26470 - DNA, 1421 bp, Zea mays
  Clone ID: LIB4185-028-F2_FLI
ctttgacaagggaaaaaaccaggtctgtgtgtgtgtgagagagagggaggcgaaggcaactcaggcgacgcgatggcgatggcggcgctgcgacgcgaggggaggcgcctcatcctctcctccaccgtccccaacccgtctctggcggccgcttcctctgcggtgacgcgatcttccgccgtctcgcaaccggagatggctccacttggtgcacggtctatttcaactcaaatcgtgaggaaccggatgaagagtgtcaggaatatccagaagatcacaaaggctatgaagatggttgcagcatcaaagctccgggcagttcagacaaggactgaaaattcacgtggcttgtggcaaccgttcaccgcccttcttggggatgctcctagtgttgacgtcaagaagaatgtgattgtggccattacctctgataagggactctgtggtggtattaattcaacatcagtgaaagttagcagggcccttcacaaattgacatctggtccagaaaaagaaaccaagtatgttatattaggagaaaagggcaaagttcagctgttgcgtgactcaaaggacagcattgaaatgactgcaactgaactgcagaagaaccctatcaactacacacaggttgccgtgctcgcggatgacatattgaaaaatgtggaatatgatgctctgagggttattttcaacaagttccaatctgtcatatcgtttaagcccacaatggtaacaatactttcccccgaggttgcagaaaaagaatcagaagctggtgggaagatgggtgacctagattcttatgagattgaaggcggcgagacaaaatcagagattttgcagaatctagctgagttccagttttcttgtgtcctgtacaatggtgccctagagaatgcatgcagtgagcttggagcccgtatgtctgccatggacagctctagcagaaatgctggcgatatgcttgatcgtctcactctcacttacaacaggacacgccaagcatccatcaccacagagcttactgagattatatctggtgcatcggcccttgaggggtagtgaagagactgcggacttcttccttttgccgtttgtgttcctctcccatgaaggcttttttcctcgggagtctcagtttcagctcctttcatttcacttttccttgagaaacttgctctcatgctttgttgcaataatcaggccaacgacaatgatagtgccgtgcacccttggcacattgcagaaagagtgtaaacagctatggttaatgggtggttttcatgaatggtgatgatcaatatatgtattgttgcacatgatcagcaatgttgtattggtggggtgactaatgcctgccgccaaactgagcgatataacgcatcattaatgacatttgttcaatctggactttaaac

SEQ ID NO: 26471 - DNA, 824 bp, Zea mays
  Clone ID: LIB4185-028-F9_FLI
gtgacggtgacggcgtcaggctcagctcgctcgcccccccacgaaaaccctaatggcgtcccgcctccttcacctccgccgcctcattactcctccctccaccgtccccgccgcttccttctccaccgccgtcagcgcgaccccgcgcgtctccgcgctcgtcgacgagatctgcgggctcaccctcctcgaggcctcgtccctggccgatgccctgcgcggccgcctcggcgtcgaccagttgccgccactagctatcctcacgggcggcgccgcaccgctcgtcggcggcggagtaggtcccggcgcggccggcgaggaggcgaaggccaaggaggagaagatggcgttcgacgtgaagctggaggggttcgacgccgcggcgaagctcaagatcatcaaggagctgagggcgttcacgaatctgggtctgaaggaggccaaggatctcgtggagaaggcgcccgccgtgctcaaggctggagttcccaaggaggaggcggagagtatcgccgagaagatgcgggcgctcggcgccaagattgttctcgagtgaacgacgagagctgtgtatgccctcgtttcttgatttgtttcgtgtttcttgtatgaaaaaagagagaattttggaacaaggagataataattagtaaatttgactagagatcttttcactgcgagtgcagacaccaattgggcttcggtgaatacgaacttagacttagtgatcaactttcgagttctatatcaatgttttttatgatatgtatgacatatagcgaactctagcatcagagtaccatcttctgctgactttgtttacc

SEQ ID NO: 26472 - DNA, 1637 bp, Zea mays
  Clone ID: LIB4185-029-A2_FLI
ttgctggggtgcttgccgttgggcaggggggagcgtgtggggaggagggccgggaatatggggggagcccaaattcggttgcggggggggggggaagtggattgggtcgggtgcaggaaggggggaagagaggggagaaaaaaaaagggttgtcaaagagggggggcagagaaggcatggggaacaaccataagagttggtggctgaagtgggaggggggatgggggagcggaggggaagaaggggggggggtaggagagaggaaagagcgtggggggggggggtaccgcatggggggggggggggggggcgtaaaacgttcggagtgagggaaatgcgttatggccggcggggtgtgggggtggggggagggggggggggggagagagagagagagagagagagagagagagagagagagagagagagagagaggtctacgggccaaatcgtcgactgcgggagcttatccgcactctgaccggtgctacctccaacctgagcccgctcccagactcccagtcccctccgcattccgcaccgccgcctcgccatggaggcagctgccgccgccttcttgtcccctccccgcgtcgccctcgacgcccgcacactcttctccccgccccgttgcctccccgtctcgccctcatcccagctccgccttgctgctcggccccgcgcgctcgccggcgccaagccgcggttcctgagcccccatcgagaacccgccgtcgacggcggtcgcggcgccagggatgtcgtcgcgatggtggtgccgttcctgaggggggccgcgtgggagcagccaccgccggacttggcctcattcctatacaagaaccggatcgtgtacttggggatgtgcctcgttccgtcggtcacggagctcatgctcgccgagtttctctacctccagtatgacgacgccgagaagccaatctacatgtacatcaattccactggcaccaccaagaatggcgagaagttaggctatgagacagaagctcttgcagtatatgatgctatgaggtatgttaaagttcctattttcactctgtgtgtcggtaatgcatggggagaagctgctttactcttagctgctggcgctaaaggtaaccgtgccgcacttccatcatcgacaataatgataaaacagccaattggtcgctttcaaggtcaggcaacagacgttgacattgcaagaaaagagattcgaaatgtcaagatagaaatggttaagctgctggcaagacacatcggtaaaccaatggaagagattgctcgggacatcaggcgtcctaaatactttagccccagtgaagctgtggattatggcatcatcgacaaggtgatatacaacgagaaaatccaggaagatggcggtgttgtgtcagaactcaaaagatcaaatttgatatagtgttctttttccacaagtagacacgtctttgtatgtttagtggtcattcacgtgcctttgagtattgagtagttaccactcgatcactcattagctggttgtagaggcgtagagcacatagccaatgcattgaacaagcatttccttcccccctctgccgtttcaacgctgtattgcccttacccaacgggcgtgctgaaagatgaattttggt

SEQ ID NO: 26473 - DNA, 990 bp, Zea mays
  Clone ID: LIB4185-029-F5_FLI
ctttctgaatccagactccagaggggcgggcgtgtcctgtcggatgacgagccggcgcgacaggttggagccttcgccggctgcggccgcggtggcgctgctgctgctgctggtggccgccgcgccggcgtctgggcaggtggcgacgtcgtgcacggcgtcgctgatatcgacgttcacgccgtgcctcaacttcgtgacggggagcaccaacggcggcggctcgccgacgaagcagtgctgcggggtgctggcggagatggtgcgcacgggcgccgactgcgcctgtctcatcctcacgggcaacgttcccttcagcctccccatcaaccgcacgctcgccgtctccctccccaagctctgcagctccacctccgtcccgctccagtgcagagacacggcgacgcaaatcccagctccaggacctatcgccttcgctccggctctgcctccactgccacccatcccaccggaatcgtccgaccctccggcggatcccacggcgatccctccggcggtggactcgccgccgttctcccagaggccagtggtggtgcccagctcggcagttaggaggtcgcacgtatccgtggcggctgtcgccgctgtgctgcccatagttgctgccgcgtccattttcgtttgatcaggatgtggtgctgtaggatgcatgcgttgtggtgtgcggtttgagaaggaactatctgtgttcccgggattttgagttggcttgtgatcatgattttgtacagcgtattataaacagcacagtaagaaatatggctccaggagtccaggcagaaccaatcctcttctcccacctctctgcctaatttctccttttttttatttaccccgtgctcccttgcctcatgtatctgtctcccgcaagagcaattatgaacatttaatttcgctatcgcaaaagtttgtttgggtgcaaaacattttgtaacaaactatcgtgcttttgtgaaacgttttgttttg

SEQ ID NO: 26474 - DNA, 807 bp, Zea mays
  Clone ID: LIB4185-029-G3_FLI
cgacgacgccgacgccgatcccctcgtccgccgtatccggtctctcaccatagctcctccgctattgagctcccaatctgaagcggaagcagagagcagcctcacggatatcctcgtcgggaagccctctaactcctcagccacctctggaaatctgaacccaaatgtcctagctgagcttttcgccatgtaccgcgaatggcaagaagagaatgccaagaaaattagccgaaaacagatccaacatggaacgtcttggtgcaggaggagatagaaaacaagatagaaacagctgatgcattggcagttaaacttctccagcggttcaattattgtcttacttacatgagatccacctcccacaatcttgctgaagtgcatccgctgcagatcgaagttggtgagtcaaagggcaggttaactgaagtcataagcaactgcgatgcattgtgtaagagaattgctgcagaaggaccagaaagcctacgatcatctgttcaacctttcatggctgctagagcggaggcagaagggagtggttcacttgacccaaaacaagagtcctgaattgtacaatctaactgctgacagcatgcgcaaagaaacttcagaggatgattagtttgtcctgaacaaatatattatataaacacgtttaggaattgttcggttattctcaatacatatggattggatgagattggaaaaaattaagaagaagtttgacttgtttgggattcaaacctatcaaatctcactcaattcacgtggattgagagctaatcgaacaagcccttataatgttgg

SEQ ID NO: 26475 - DNA, 799 bp, Zea mays
  Clone ID: LIB4185-030-B11_FLI
cggcagcgcaccacgccgccgccgccgccgtcccacgcattgtctgttgctcagcttctcctagcccagctcctgctagctaggctaggcctaggctgctacatactgccatcatccatggagtcgcctcctgatcaggcggcggcggcggcggcgcgccaggacaaggagcagcgggactacagactcatcgcaaaagccgtggacgaagcgtaccgggcggtggagtgcgacggcggcgggtaccccttcggcgcggtcgtcgtccacggcggcggcgacgacgaggtggtcagcagcagccacaactcggtccggaaggacgccgacccgtcggcgcacgccgaagtgaccgccatcagacaggcgtgcaagaagctggggaaaaccagcctcgccggctgcgagatctacacgtcctgcgagccgtgcccgatgtgcctggggctcattcgcctggccaagataaagaaggtggtgtacggagccaagtcggaggtcgccgctgccgccgggctcaacggcgtcctcccagaggtcttcagagagtactaccagaaatccggcgtggagatgaggcaggccgagggcgaggcggcaacccggatcgccgaggaggtgttcgagaagaccaagggcaagtttcgcaacaagtaaacgcgctggagatggcgccgggcggatggctgttgcctgttgctagtggaatggttgccgtttccaagctttttgtccgggggacctttgatcagaggtcacatgcccagagaccggaataaattcacccctttccccccct

SEQ ID NO: 26476 - DNA, 739 bp, Zea mays
  Clone ID: LIB4185-031-A7_FLI
catccactggaatcataaaagaacagagcggagcagctgcacttccgcgtcgagaaatcattagagctcaagaaaacaggtcagcaatggaggccacggcgacgccaagaacccaagaagtgatgaagcccgagcccggcacggccaaggtgaccgtggacgaggtgacgctccgcaagttcgagctgtccgacgtggacgcgatgatggcgtgggcgtcggacccgcaggtggccgccgtgtgccggtgggagccctacgagtcgacggagccgctgctggccttcatccgcgacgtggtactccctcacccgtggttccgcgccatctgcctccgcggcgagccccgccccgtcggcgccgtgtccgtgtccccgacgggggacccgtgccgcgccgagctcggctacgtgctggcgcgcgcgcactggggccggggcgtggccacggccgccgtgaagcgcacggtggccacggtgttcgccgaggtgccggggctggagcgcgtcgaggcgctcgtggacgtggccaacccggcgtcgcagcgcgtgctggagaaggccgggttcacgagggaggccgtgctccgcaagtacggcgccatcaaaggcgtcgtcagggacatggtcatgtccagcttcatcgacaccgacccagtgcccgagtgacttgagcgcccctgttgcaaatcttttgctgtcggatgcatccagttccgaatttgaatgcaagcacttcc

SEQ ID NO: 26477 - DNA, 835 bp, Zea mays
  Clone ID: LIB4185-033-C2_FLI
gcacgaggctcgatcccagcatccgagagagctccacaggccaggtccccatcgccgcggcgcttgccccacctctcccccgcccggtagtagcctcgccgccgttgccgagatggggttcgtgtccttcgtcgggagggtgctcttcgtcgccgctttcctcctctccgcctaccaggagtttaatgaattcggtgctgatggtggaccagcagctaaggcccttcggcccaaattcaacgtgtttgtcaaaaatgtatctgctcatctgggagtagctgtgccacacattgagttgaagcatgtgattgctgctacaattggtcttaagggtcttggaagcctcctttttattttgagcagctctctcggtgcttatctcctgctgctgtaccttgctttgatcactcctatcatccatgacttctacaactacgatatggagaaggcagaatttgcaggcctctttgcgaagttcacccaggatttggcgctgatcggagctctgctcttctttctgggcatgaagaactccatcccgaagcggcagggcggcaagaagaaggcccccaaggcgaagacgaactagggctgcttagatagctgcacgcctcaggcggggtgtatcaggagacaggtctatttcgaagcaggcccagcgcgatgcagcgaatgccatcgagctgcgcttttacatgtttatcatcagattccattttgcggcctgaacaaaggtgtgaccggggtgggttaggcgactagattgcacgattatgtacttgcgatttgtttgttgaactgggttgccgacggttaatcttctccatttgatttt

SEQ ID NO: 26478 - DNA, 1256 bp, Zea mays
  Clone ID: LIB4185-033-E4_FLI
gacgtcccaatcgagctaatctcacaccgccagtgccagtgccagcggcagctgctaatccgtgccgtgttccagcagcgatgggagtggagtcggagtgcgacaggataaagggcccctggagccccgaggaggacgaggcgctgcggcgtctcgtggagcgccacggcgcgcggaactggacggcgatcgggcgcggcatcccggggcggtcggggaagtcgtgccggctgcggtggtgcaaccagctgtcgccgcaggtggagcgccgccccttcacgcccgaggaggacgccgcgatcctggccgcgcacgcccggctgggcaaccggtgggccgccatcgcgcgccttctcccggggcgcaccgacaacgccgttaagaaccactggaactcgtcgctcaagcggaagctcgccaccgccacggcgacctccagcggcagtgatgctgagcgggcgtgcaagcgcgcaagccctggcccggggagcccgacggcgtcggaccgcagcgacctcagccacggctgcggcgccgcgcaggtgttccgtcccgtcccgcgcgccggaggcttcgacgccatcagcgccgcagacgtgcgccctccgcccccgccagcagtcgcagacgaggacccgctcacctcgctctccctctcgctgccggggctggaccagtcgccgtcgggcttccaccacgacagcgcccggagccacttccaggagctctccccctcgtcgtccccgtcgccgcagtctactccacccgccttccctccgcaggcggctccgtctcagtcgtcgtacgcgttcagcggcgagctggttgccgcgatgcaggagatgatccgcgccgaggtgcgcaagtacatgtccggcgcggggctccgcgccggatgcgggcccggggccgtgggcgaggtgtgcatgccgcagctggtggagggtgtgatgcgcgccgccgcggagcgcgtcggcgtcgtcacacggccgtagaaacccggaaacggaccaaatcagatctgatcaatgcgaagcattgtgttaattaagatcccgtccgtcctgtgtagcagcgctacgtagactactactactactagtcgttctctggccgttgtatttagcagaggagctcgcgtttgtttattcttcggcggctgtcgctctgaatccagaaaggaacagagcggcggtgtaaagccgggagcggaagcggaggttggcaataatcgagatcgagcctgccatttctat

SEQ ID NO: 26479 - DNA, 974 bp, Zea mays
  Clone ID: LIB4185-033-E8_FLI
gtaggatcgagggagagggagagcggccaagcgtggaccaacgactcctcttctccgatcctcccgcagctgcaggccgtagctagctctataaaaagctaagggagcctgcctgccatcgtcgtgcatcgtcatccaccacgatcgataaagctaattaagctgctactgctacgctagcctcgatcgatcaagcaagcagctcacagacccaccggcccacccacccacccacatggcggcgtcccgttccgctctgatcacgctgctcgtccttgtgagctccgtcgcggcggcctcggcgaccacgttcaccgtcggcgacagtagcggctggagtcgtagcgtcaactacgacaactgggccagtggcaagaccttcacggatggagatcagctagtgttcaacttcgccaccgggaaccacgacgtggtggaggtggacaagagcggatacgacggctgctccaccaccaacgccgccaacacaatccaaaacggcccggccaccgtcaacctcacctccggcacccactactacatctgcggcttcaccggccactgcagcgccgggatgaagctcgctgtcaccgtcggctccggctccggctccgggtcccccacccccggcggcggctcgcccagcacacccacaccaaccaccccgagcgcccccacccccgacactccggccagcgcgtccgtgcgcctcacggccggcccagcgctcgccgtggccgccaccgtgctcgtcgccctcttctgatctgatctgatctgatactgcatgcatgcaccgtgccaggaccaggatagaggcagtgcaggatcatagtattcttgtgtacgtacgtacatactttgttgttgagctagcgttttcattctgacgacggcggattattgtactctcgtacgtttttatttccacatgtactactgtctatcattcatgcttccaattcttcattgtt

SEQ ID NO: 26480 - DNA, 725 bp, Zea mays
  Clone ID: LIB4185-035-C11_FLI
cagccccatcccgccgccgcaggcgagaaccagcgccaccttaggttagggcggccgccgccggagaagtgcgcggttgccaagatgcagatcttcgtgaagaccctgacggggaagaccatcacgctggaggtggagtcctcggacaccatcgacaacgtgaaggccaagatccaggacaaggagggcatcccgccggaccagcagcgcctcatcttcgccggcaagcagctcgaggatggccgcaccctcgccgactacaacatccagaaggagtcgacgctgcacctggtgctccgcctcaggggaggcgccaagaagcgcaagaagaagacgtacaccaagcccaagaagatcaagcacaagcacaagaaggtgaagctcgccgtgctccagttctacaaggttgacgacgccaccggcaaggtcacccgcctccgcaaggagtgccccaacgccgagtgcggcgcgggggtcttcatggccaaccacttcgaccgccactactgcggtaagtgtggcctcacctacgtctacaaccagcaggcgtaggatgccccttctttctttcggtaaggaaactgggaagtcttgctaggtgataatcctttttgctttgttttgttttgttgcaatggtagtagtttcttggaacagaacacctgtatctcttttggcgacgcttaatttgggtttaattatatcatgtcgttatgggtcctgtc

SEQ ID NO: 26481 - DNA, 1096 bp, Zea mays
  Clone ID: LIB4185-035-C3_FLI
aggagactgaggaggcatgtgaccctcttcactcgcttcaccctgttcatcactcgcttgtacaagaagtcacgcaccaaacgggcaagggcaaacaccaccaaagaaggcgagaacgcactccgtccctctcctccaggaccgcccgctcttatcccgtttctcccttctctgggctcggagaatcggagatggcgtccagcgcctctcggttcatcaagtgcgtcacggtcggcgacggtgccgtgggcaagacatgtatgctcatctgctacaccagcaacaagttccccactgattacatacccacggtgttcgacaatttcagtgcaaatgtcgttgtggatggcaccacggtgaatttgggcctgtgggataccgcagggcaggaagattacaaccgactgaggcctctaagctaccgtggtgcagatgttttcgtgcttgcattctcacttgtgagtcgagctagctatgagaatatcatgaagaagtggataccggagcttcagcattatgcacgtggggtgcctgttgtgttggtaggcacaaaatttgatcttcgtgaagacaagcactacttgatggaccatcctgggttggtgcctgttaccacagcacaaggggaggaacttcgtagacaaattggtgctatgtattacatcgaatgcagttcgaagacacagcagaatgtcaaagctgtgttcgatgctgccatcaaggttgtaatccagcctccaactaaactaagagaaaagaagaaaaagaaatcacgcaagggatgttcgatggtgaacatcttatctggaagaaaaatgctatgcttcaagtcctgaatgatcgaagggggtcttacctgaactaataccatgagtgtgaccccaagttcgcgaagcttgaaatcttgatgcgctcgttgcgcatgtatatttgcacctttggttattaatcactagaggtagatgattgaaactaatctgcttaaccaatgtgcactgctgggcgctggcgtggttagctatatcagttaggcagttcgacagaggtcaaagagattgagattttgttctttcttggcaatgtcacagcttttgtg

SEQ ID NO: 26482 - DNA, 1069 bp, Zea mays
  Clone ID: LIB4185-036-A11_FLI
ggagagcgaccccagcagacaagagacagacgagagagagcgagcaagccgagcatcgtgacctctctctgtttctctctctcttcccttctcgtcttctgcaagaagccagtgaccgtctctgtttctctcattccctttcatcactctgctggtctccctcttccacctctggtcttggccatggcctccagcgcctcccggttcatcaagtgcgtcacagtgggggacggcgccgtgggaaagacctgcatgctcatctgctacaccagcaacaagttccccactgattacatacccactgtcttcgataacttcagtgcaaacgtggtagtcgacggtaccacggtgaatttgggcctttgggatactgcagggcaggaagattacaacagactgaggccactgagctaccgcggagcagatgtgttcgtgctcgccttctcgcttgtcagccgagctagctacgagaatgttatgaagaagtggctaccggagcttcagcattatgcaccgggtgtccccatagtgttggccggaactaaattggatcttcgtgaagacaggcactacttagttgaccatcctggtgcggtacctgttactacagcacagggggaggaactgcgcaagcacattggcgcaacttgctacatcgaatgcagctcaaaaactcagcagaatgtgaaagctgtgtttgatgctgccatcaaggtagtaatcaggcctccgacgaagcagcgagaaaggaagaaaaagaaagaacggcgaggatgctcaatattctgcagccgtatcatgcacgcaagaagactaggatgcttcaagtgatagaaggccttcttcgacgataacgtaggcttctaagatgaatcgagatcgtgtatagtttgtctccatgttccaaagtgctcgttgcgcttgtgcacttgggctggtaatgtgtatatttagtctttgccaattgatatttaggagaaatattaagcacttcgtttatgtaccattggctcataatgagctgggaagtccaatacatactaagaagtaacaatattttcttccgatg

SEQ ID NO: 26483 - DNA, 625 bp, Zea mays
  Clone ID: LIB4185-037-F7_FLI
cttcgttcgttcagttcatccgtgttcttgtttgcgaggtcgagagagagaggatgtcgtgctgcggaggcaactgtgggtgcggctccggctgcaagtgcggcaacggctgcggagggtgcagcaagatgtacccggacatggctgagcaggtgaccaccaccacccaggctctcatcatgggtgtcgcaccatccaaggggcacgccgagggcgggttcgaggcggccgccggagctgagaacggcgggtgcaagtgcggcggcaactgccagtgcgacccctgcaactgcggcaagtgagctaggtgctccaccctgcaggccggccggaggaagctagctaattattataagctaaataaagtatagcggcgtcgctgtgtgtgtttcgagtcagtcagtcagttagttgcgtgccatggctggcatgctctgagtctgagatgatgatgatgcctgatggcggcgtcgtgtcctgtagtcctcccctgccccctcgggcgcttctggcggcgagcagtgtgttgtgttgtgttgtgtgggtgcagcacggtagcaggctagccatgtgccctgctgtgttgtgtcaccatccatctataataatcttatatctatacccc

SEQ ID NO: 26484 - DNA, 756 bp, Zea mays
  Clone ID: LIB4185-039-A9_FLI
gacggatcagcgtgtcaactgacagccctatgtccttcgccgctttctcatggccgtttcgccgccggggcggggctggcagcagtggcgcaagcaagtccgccgccacggcagaggaggacgaggagctgggcgtgaccccgcagctcctcgacttcctccggacgctctcgcccgacgccttcaaggccgccgcactccagctccaaggaggctccacggaggcggccgccggcgacctcaccagctggcaggagcggcacgccgtgctcgtgctatccaaagctaaggaactcgccaagattcggtatgatctgtgccctcggcacctgaaggataagcagttctggaggatatacttcctgctcgccaagagttacatctcaccgtatgaactacgtgccatacagaaggaaaaactcagacggatggagacagaaaactgcaagccaaaacaagtgatctctgttgaggtggagatgcaagaatcgaagcgcactagtctctcacaagcatcagaagtagatctagaatctcaggtttagttttgcagttatagcttctaacagatctagcttaggtaacgcaatcagtagcccttttatgattcctccacacaccaaatagctccacgagttcttcagatcttggatcgactctcgctagactaccagtccgctgtgtgcttttgtgtactgaaaccaagtaggtcctttcctgcattacgcagcatatgtgcttgttggctgtgctccg

SEQ ID NO: 26485 - DNA, 1031 bp, Zea mays
  Clone ID: LIB4185-039-B2_FLI
ctcactactacatacatcaccaactaggatcgatctctcgacagcaaatagctagcaatggagaagtacaccaaagccctagcgtcattgctcagcatgctggtgctggcacctctcctcgccatggccaccgacccagaccccctgcaggacttctgcgtcgccgacctcaacggcaagctgtcagtgaacgggtacccatgccagccgccgtcgtcggccggcgaccagttcctcttctcgaccaagatcgccacgggaggcaaccccctggccaacccgaacggctccaacgtgacggagctggacgtgtccgagtggcccggcgtgaacacgctgggcgtgtccatgaaccgcgtcgacttcgcgcccggcggcaccaacccgccccacgtccacccgcgcgccaccgaggtcgggctcgtcacccgcggcgagctcctcgtgggcatcgtcggcagcctcgactccgggaacaggtactactccaaggtggtccgcgccggggagacgttcgtcatcccgcgcggcctcgtgcacttccagttcaacgtcggcaaggaggacgccaccatggtggtgtcgttcaacagccagaaaccgggcatcatcttcgtgcccctcacgctgttcggctcctctccgccgatccccacgccggtgctctccaaggcgctccgggtggacgccagtgtcgtggatctcatcaagtccaagttcgccggtgggtactgagactgagacccagcatgcatcttgctagcgcactatgcatgcgccgacaatggctttgcgtgatatttctcgttacggaatgggcgacgtcgtggagatccgcaacagtttgatacgccagggaaataaaataatgttcatgcgtcagagcacgtataataagctatattttcgttaagattcagtcgtagtaaaaagtaaagattattcttgcttctgtgttcactgcctagctagtctatgggtaaatcgtatttgctcattttacatgtaataataagaatggatctatatat

SEQ ID NO: 26486 - DNA, 1122 bp, Zea mays
  Clone ID: LIB4185-039-B5_FLI
caaaaaggcaaagcagagcccgcaagcggagaggctacagaagggtatgggtcacctccgcggcctcaccgccgcgcggctcctcgcggcggccttcctgctctccgttgccgtcccggccgccagagcccaggaagaaaccgagcacgaggaggagttcagctacgtcgtcggcgacgagaacgggccggagcactggggcagcatcaaggcggagtggggcaactgcagcgccgggcggatgcagtcccccatcgacctctcccacgagcgcgtctcgctggtgcggtccctcggctacctcacccactcctaccgccccgccgaggccgccatcgccaaccgcggccacgacatcatggtgaggttcaagggcgacgccggcttcctggtgatcaacggcacggcgtactacctgaagcagatgcactggcactcgcccaccgagcacaccgtcgacggccgcaggtgagaacgaatgaatggtggtctgctggtctcgtcgtcgtcgttgagagccaataatataataaagactcgacgtgcgtacgtgtggaccgcgtacgacatggagctgcacctggtgcacgagagctcggcgaacaaggcggcggtgatcggcatgctctacgagatcggcgccgaggacccgttcctgcaagcgctggagccgtccatccaccggatcgccgacaggcaggaccgggaggaggccatcggcgtggtggacccccggcgcgcgcgcggcagggccagcgtctactaccgctacgtgggctccctcaccacgccgccctgcaccgagggggtcatctggaccgtcgtcaagagggtccgcaccgtgtccaggcaccagctggagctgctcagggaagccgtgcacgacggcatggagaagaacgcgaggccggttcaggacgtcaacgacagggacatcagcatcttccgcccaaagccacacaagcactactagtactagctatggtataggttgcacagtccagcagcgcgcgtagttggtatcgatcagtagtgatgcacgagctagctgacgcggttcagtgttggggagaggtgtctgctgtatatggttacggttttgttttataattctttccatct

SEQ ID NO: 26487 - DNA, 1420 bp, Zea mays
  Clone ID: LIB4185-039-C6_FLI
ccaagagttgatccacccaggccaggcacccgcccgtcccccggcggcggagatggcgaggaacgagacggcggccgcggccgcgccgggcgtcgacttccaccttcccgacgagatcctggccgtgatccccaccgacccgtacgagcagctggacgtggcgcgcaagatcacctccatggccatcgcctcccgcgtctcccgcctcgaggccgacgctgcgcgcctccgccgtgacctcgccgaccgtgaccgcgccgaggccgacctccgcgcctgcctcgccgactccgacgcgcgccttgccaccgctctcgacgagaacgcgaagctggcgaaggaaagggactcgctcgcggcgacggtcaaaaagctgaccaggaatttggcgaagttggaggcttttaagaaacaattgatgaaatcattgagtgaagataatctattgcaactgtctgaaaccagtcaagatcacaacgcagaagatttgacagctcgagtcccattttggaaagatgaagtttcgagcagtaacacttcttcagatgcctccagcagatctacaattactgaatccgtccatgacggaggataccagttctcgatcacaccatatatgcctccaaaattaactcctggctcaacaactatgatttcgtcctctagtggttctccccgagcttattcaactggcccaccctctcccaagttcttatctggtccgacttcacctgcaaaagctcgatctgagggccaattggcattttcatcatggcaaggatcatcaagtcatcagtattcagcacctacctctcctccccaacgccgctcattcacagggcgaccacgtatagatgggaaggaattcttccgacaagcacggacaagactttcgtatgagcaatttggagcatttttggccaatatcaaggagttcaatgctcagaaacaatcacgggaggacaccctgtcaaaagcagaagagatttttggaacagaacacaatgatctgtacatttctttccagaatatgcttaaccgaaactaatcatgaaaatttgtcagaagtagtattttctctcaaaatcaagcagggtagattctgttggaataaacgatgcccttccgtaggttctcaagatcacattgtagagatatgtatataggccaccttaattcgaggtgttccttctcaataatttggagctgtgacttaaaagcggaaatcgcatagcatacattcactcattccctgaaattcaaggcttcctgcttgtctttctgctgtaaatccggatgcagatctcttgagctattaaggtgccttccctagttccctttgtagaaagctgtataaaactgccctttgccgttcttctaactgccaagggtacacggaatggatatatgatcacggtgc

SEQ ID NO: 26488 - DNA, 627 bp, Zea mays
  Clone ID: LIB4185-040-F3_FLI
ctccgtctgatctcggtgatctgtctccacgacaaggagtgcactgtcagctctagcttgctgcagaacaagggcaagatggcaagaggtggtcggctactgatcctctccctggggcttgtgctcctctacttcgtctcaggaagtgttgctgctgctgctgcacagaaaacgtggtgcgttgccaagccgtcggcgtccaacgatatcctgtctctgaacctcaactacgcgtgctcccaggtgagctgcggcgtgatccagaagggcgggccgtgctactacccggacaacctggtgtcgcgcgccgccgtcgccatgaacctctactatgccgccaatggcaggcacccttggaactgctacttcaacaactcggcgctcgtggtgcagtccgatcccagctatggatcctgcacctactactgatgctcttttgtagcagagatcggtcgatgaaaggaaatataatccctgtgtatgctgtgctgtgttgtgtctagagatgacaatggggacctgaattccccgcgaggaatttcctgttgccatcgctagttgcgccctagtagaggtgtctcttgttccattcagttgatatgcatgataacatttggagatgcatgc

SEQ ID NO: 26489 - DNA, 932 bp, Zea mays
  Clone ID: LIB4185-040-F6_FLI
ccgttctccacctcaattattgcccacccatccccgctccctcctctcctctcctcccgtcccacccatcacctcgcaccagcgccgggggaatggcggccgcgctgtggacgctgctagtggcggtggccctgtcggcggcgctggcctcgaaccgccccgtggcggcgacggcgacggcggcggcggaggcggcgaacgaggtgctccgcgcgcaccagctgccggggggcctgctgccggcggggatcacggcgttccggcacgacgccgccacgggggcgttcgaggcccggctggacgcgccctgcacggcgcgcttcgaggtcggcctccgctacaacgccaccgtctccggggtcatcagccccggccagatcgccgacatctccggcgtcgccgcgcaggacctcttcatgtggttccccgtccacgacatcaaggtcgacatcccctcctccggcgtcatctacttcaacgtcggcgtcgtcaagaagcacctcccgctcgccgtcttcgacgcgccgccggcctgcacgcccgacccgctcctgcaggtaataaacccatctctcgaccctcggtcttttttttttttttgatagaatcgttggcgctgtttgcgagtcctgagtttcttctccggcgcccgcagcggctggaggacgtgggcgagggcggattggccgtggtgggcgccgcggcgtcccggcgatgatgggtggaggagaacggaggagggttcgacggcgccggcgagccaggatcacgagcgcagttttgagaggagaacgggcgatcgccggccttcttcgatgcacatagatagcgtgggcatttccatctgttttcttttttctgcttcctactagtggctacactagtaaccaacctcgtctatcattgttcgtttcgtcaagctgttgtcattt

SEQ ID NO: 26490 - DNA, 1122 bp, Zea mays
  Clone ID: LIB4185-042-F2_FLI
gtaaagcagggagcatcttgagtgttcgacagtgagccatggagaagacgtccgagagcgccataccgccggcggcatccccgctgatgctgttcgggtcgtgggcgagctcgtacacgcaccgcgtgcagctggcgctgcggctcaagggcttggagtacgactacgtggaggaggacctggggaacaagagcgacgagctgctgcgccacaaccccgtccacaagaaggtgcccgtgctcgtccacggcggccgcgcgctcccggagtccgtcattatcctccagtaccttgacgacgcctggccggagacccgcccgctgctccccgccgacgccttcgaccgcgcgctcgcgcggttctggtgccacttcgccgacgacaagctcgggccggcggtgggcgcggtgttcgcgtcgacgggggagggccaggaggcggcggtgcggcaggtgcacgagatcctggcgctgatcgagtccgagctccgcgacggcgcgttccggggccgccgcttcttcggcggcgacgaggtgggcctgctggacgtcgtcctgggctgcggctcctactggctcgccgtgttcgaggaggtgaccggggtgcgcctcgtggacgccgacgccttcccgcgcttccacgcctggctgcgcgacttcgaggccctggacgaggtccgggagaccatccccgcggtggaccgcctgctcgagtacgcgcgcggcctccgccacatgctgctcggcctcgcgggggccggcgccggcgccggcgcggacgcgccctccaccgacgcccccgccgcaccgccggcctcggctgacatcgccgtcgacatttgaacgcagggcgtcgtcgcgccgggcgtctgccagcgccgtccggctagccatcagtagctagtacgtagtaccagtatagtttgcagagtcgattgcgccatgtgtgtgtggtggctgcgtgcctgtgcctgtgcctgccggcctggcctggcctggagtgcggttctgctgccgccacagttaattggcccagtttgtctagctgtcgagtttttttttcaactctctctgcctgtctccgactcttcccttctttttgataaagttcgtccctgcagtt

SEQ ID NO: 26491 - DNA, 1182 bp, Zea mays
  Clone ID: LIB4185-045-F11_FLI
tctctatcgacgaagctgtggaggaaaacgaaggatctccccgtgcttgtgcatgccagatcgcctgctctacgtccgcatcccgtccctcgcgaaactcggcactcccagggttcgtttctttgtttcacctactctcgttgtttatgctaatttgttaggcgcctttgcttcaggaaatggtgattgtatcgtactattctggggggaaagcgcaattatttgagggcaagttgattcatcatggaggggtgtgcaaaattcatggcttcagacaccggcaagaagctcattcagatcgatgtgagctcggatacagtgtgcccttggtgcttcgtcggtaaaaagaaccttgagaaagcaatggagcaaagcatgggcaagtttgatttcgaggtccgttggcatccattctttctgaaccccgacgcgcctaaggagggcgtcaagaaatctgacttcttcaagatgaagttcggtcctgtccaatatgaggatatttcgaggactcgggcttgaatatgacatgtcaggattgacagggaacacgatggatagtcataggctcataacacatgctggacaccaaggctatgacaagcaaaatgctcttgttgaagaattgttcctcaattaccattgccaaggaaagtacattggtgacaagcaggttttgctggatgctgcaagaaaggtgggcatagaaggggccgaggaactgcttgaagatcctaccaaaggagtccatgaggttcaggaagagctcaagaagtactcatcggacatctccggggtcccacattttgtgatcaataataaatatcaactcagtgggggccagccaccaaatgaattcatgagggcgtttgagatggctgcaaaagatggagcttaatggcgcttatttgcgagaaaaaactgtggaaccagttgtgtttcgtagttttgatgtggtgatattagtgacgaagatggtgtggatgttcacttttgaatagagttctaggtgattggatatggaacatgggttatgtcctgtaaatagaggccagtctgtatatttgatttgatttcaaccgaaagctgtggttttcagaacctgagatttcagcatgaaaacctattgtaagcacccctgcggacattaacatcaagaaaaaatctataaaaataaattttcgc

SEQ ID NO: 26492 - DNA, 1291 bp, Zea mays
  Clone ID: LIB4185-046-C6_FLI
gtcgcttttgacctatcggggggcgccgggcgggcgtaacggaaccaaggcggccaggtagctgctgtgctgctacgagtagtaagcactatatatataacgggcaacggcaaagccatcgtcgtcgtcgtggaactcgtacttgcgtgcgtgcgcacaagaacgcgggtcagagctgctggcggttggaggagcagaggagatcgctgtgcgggcggcgatggagaagccccggcaggtggcgcggaaattcctggcccggccgcagcacgagggcgccggcgccgtcgtccgccgcagcatcggcaggttcgagctgaggtacttcgacccgttccttgtcctcgacgagttcacagtttctgctccggccggcttccccgaccacccgcaccgaggcttcgagaccgtcacctacatgcttgagggcgccgtgacgcacgaggacttcgagggccaccgtggcaccatcaaggccggcgacgtgcagtggatgacggccggccgcggcatcgtgcactccgagatgcccgccggccccggcacgtccaggggcctgcagctctgggtcaacctctcctccgccaacaaaatggtcgagcccgggtaccaggagatccagagcaaggacatcgcgtgcacgtccgacggcgacggcggcgtcacggtgcgcgtgatcgccggccacgccatgggcgtgcgctcgccggtgcgcacgcgcacgccgaccatgtacctggacttcacggtgcgcccgcgcggcgcggtgcggcagcccgtgcgcgcgtcctggaacgccttcgcctacgtgctggagggcgagggcgtgttcggcgccgagcggtgcgcgcccgtcggcgcccaccacctgctgctgctcggccacggcgacggcctcgaggtctggaacaagttgcccgaccgcccgctccgcttcctgctcgtcgccggcgagcccatcggggagcccgtcgcgcagctcggccccttcgtcatgaacaccgaggaggagatcgacatgaccgtcaacgacttcgagtgctacgccaatgggttcgagaaggcccgccactggaagtcgcaggcgatgctggcgcttggcgtagagtagggcgagacatgagcacaggatcaccaaagaaaacgaatagatttttttttgcttcttttttccccattattatcgttccggtttgttgcgttcaattttaacccccaacattggatcgctttgtgtacatatctgccgtaaattatttttttatcaataacgaaattaccagctgttcat

SEQ ID NO: 26493 - DNA, 1287 bp, Zea mays
  Clone ID: LIB4185-046-E7_FLI
ccatcacttgctggggggagctctgccgagacacgcacgctgctggagataggcatccagacacggcaccaccagtccaccaccaccaccaccaccaccgtgacgtgagtgcccgagcgcgcggccgccatcaggctcccccgtcgtcctcgccgggcggctaggtcagagccgggagaggcgggggccggcggcgctaggctaggctaggctaggcagcggcgtacgtgcgtggccgccgcgcgatcggcatgggcgacggcgaggcggcggtgccgagcaggttccgcacggtctgcgtcttctgcggcagcaacgccggccgccgcaaggtgtacgccgacgccgccctcgagctcggccacgagctggtgcggaggggcatcaacctcgtctatggcggcggcagcatcggtctgatgggcgtgattgctcggacggttcgtcacggcggctgccatgtcctcggggtgattcctaaagcgctcatgcctattgagatatcaggtgaaagcgtgggagaggtgagggtcgtggacgacatgcaccagaggaaagccgagatggctcgtcagtcccaagccttcatcgctctcccaggggggtacgggacgatggaggagctgctggagatgatcacctggtgccagctcgggatccatgacaaaccagttgggttgctgaacgtcgacggctactacgacccgctgctcgccctgttcgagaaaggcgccgccgagggtttcatcagcaccgactgcagccagatattcgtctcggcgccaaccgcgagcgagctgctcacaaagatggagcaatacacccgggtgcaccaggaggtagccccagcgacgagctgggagatctcggagctcggctacggcagaggaggaggaggaggagaaggagacgccgccgccgccacgccgccagcagatgcaggagcagaagagggaaaaggcggctcgtagcacccatccatctcatgaagcggatcgggtcggatcggatcggagctcaccttcctccacctactgcttgctgatgtgatgacgcgtctgttacggtttcctggcaaatttgtttcgtcaaagtcgatctctcctccaaagtccaaaacccggttgaaccaggtgccggccgggtcgggacgtactggggagacgatgatatctctgtgttgggtgcttggattgtgtaagctagctgctgctggtattattcctgttttctttttctttttcccccggtgtgtggtgcttgtggaaatggaatctgtgctggtgc

SEQ ID NO: 26494 - DNA, 1106 bp, Zea mays
  Clone ID: LIB4185-048-F9_FLI
cttgactggcaagacaatcacccttgaggtggagtcctcagacaccattgacaatgtcaaggcaaagatccaggacaaggaaggcatcccaccggaccagcaacgtctcatctttgccggcaagcagttggaggatgggaggacccttgctgactacaacatccagaaggagagcaccctccacttggtgctgcgtcttaggggtggcatgcagatctttgtgaaaacccttactggcaagaccatcactcttgaggtggagtcttcagataccattgacaatgtcaaggccaagatccaggacaaggagggcatcccgccggaccagcagcgtcttatctttgccggcaagcagctggaggatggacgcacccttgcggattacaacattcagaaggagagcaccctccacctggtgctgcgcctcaggggaggaatgcagatcttcgtgaagacattgacaggcaagaccatcaccttggaggttgagagctccgacaccattgataatgtgaaggccaaaatccaggacaaggagggtatccccccggaccagcagcggctgatcttcgccggcaagcagctggaggatggtcgcaccttggctgactacaacatccagaaggagagcaccctccatctggtgctccgcctgaggggtggtatgcagatctttgtgaagaccttgactggcaagaccataaccctggaggttgagagctctgacaccatcgacaacgtgaaggctaagatccaggacaaggaggggattcccccagaccagcagcgtctgatcttcgccggcaagcagctggaggatggtcgcacccttgcagactacaatatccagaaggagagcaccctccacctggtgctccgtcttcgcggtggttattaagccatcagtcgttgaagctgctgctgtatctgggttatccagtgtctctgccattgcccatggatggtactgtctttcaaagtatttgtatggtttgtgtcgtgagtcgtgactgagctggtttcatggaccagttgtgttctcgttacccaaaactatcgtgcggcagcatatggcttaatcatgaataaatgtggtgtttgaattt

SEQ ID NO: 26495 - DNA, 1168 bp, Zea mays
  Clone ID: LIB4185-048-H10_FLI
cgggcctcctccgagtctccgacctcctcctgtcttcggtgtcgtcgcccgcctccccatgaggccgccctcgagacatgcctcgtagcctcggcgtcagtagcagcagcagcaccaggcgctccctccgcgtcgcgccccccgcctcacccccgctgcggcggccgccgtcgccggcatggccatgccgttcgcgcgccgcgacatcgaggcggcgggcgccggcgccagcagcgacgactctcctgccgctaagaagggcaagcccgagctcgcaggggcgcgcccggctttgacgaggtccgaggcgttcgcgttcgcggccgtgctcgcgctcttcaccgccgggatcttctgcgtcttcctcaccgcgccacgcggcgagtttgggcagatcctccgcctcccgcgcagccttgccgacgtccgccttctcaaagacaatcttgctgtttacgcgagagattaccaaacgaattttatattgggttattgctcaatatacatcttcatgcaaacattcatgatccctgggacaatattcatgtctttacttgctggggctctttttggagtgattaaaggtggcattttggtagttttcactgccacagccggtggatcttcttgctattttgtctccaagctgattggcaggcccttggttagttggttgtggcctgaaaaactgagatatttccaatcagagattgctaagaggaaagaaaagctgctgaattatatgctttttctgagaataactccaactttgcccaatacattcataaatatggcgtcaccgattgttgacatacctttccatattttctttgctgcaacactagttggtcttattccagcatcttatattactgtaaaggctggtagagccctaggcgatctgaaatcagttagagagttgtatgacttcaagacattagtggttctgttccttattggatctgttgttgtcgttccaacaatcctgaaaaggaagagaacatacgaatgatgtcttagagcatctacatactttctttagatgttcaaaatgtattaggatttttttaccttttgtttttttgaaatcgtatacattttcaattctatacgtagggatttaaaatcgaatcgaatgctttttaatactagatgatccccccatttt

SEQ ID NO: 26496 - DNA, 777 bp, Zea mays
  Clone ID: LIB4185-050-A1_FLI
gcacatctcctcgcatttcttcccatccgatccccccttcgcaaccaaaaccccaactcgccccgcatcgatggcgcccaaggccgagaagaaacccgcggcgaagaagccggcggaggaggagcccgcggccgagaaggcgcccgccgggaagaagccgaaggcggagaagcgggtccccgctggcaagtccgctgccaaggaaggcggcgagggcaagaggggcaagaagaagggcaagaagagcgtggagacctacaagatctacatcttcaaggtgctgaagcaggtgcacccggacattggcatctcctccaaggccatgtccatcatgaactccttcattaacgatatcttcgagaagctcgctgctgaggccgccaagctcgcgcgctataacaagaagcctaccatcacctcccgtgagatccagacctccgtgcgcctcgtccttcccggggagctcgccaagcacgccgtctccgagggcaccaaggccgtcaccaagttcacctcggcctaggctgcgcggccgccgcttgcaggattctctcctgtgttcacgtctcttgctgtagttaggtgctgctgcctgctggcttctatgtatgttatctatctgtctgtagcaactgtgttatctgataggaccgtaatggtgcttattcaacccagctatatgtttctatgtgaatcatctctctatcggttgttgagtaactttatattgtgatgaagatgtgaatgtgatttataaaatgcgtcagtttctacggt

SEQ ID NO: 26497 - DNA, 1381 bp, Zea mays
  Clone ID: LIB4185-053-A12_FLI
aggaccgtttcatcctctttccccaatccgttcaacgacggcttcaggaacccttcctccggcggccgccacaacgaagcctcgggcaccgcaaagcaaatcctatcctatcagtcgaatcgtgcgtctcgccgagcctcgatcctatccccgccacgccgatccctcgtcggtcgtccgaatctggtggactatctccatcgccgggcgtccatttttggccgggtgagccgggggtgggtatttggtgccgtgggttgctgctctcgcccgtcgatgcttggttagcagaagagacggcggcggtaccatgttgcagtgcctggatggagtgaagcagctccttgccgtgctcctcaagtgctgccacatcgacctcaagcagcccaacggcctagaggatccggaggtgctcgctagggagaccgtgtttagcgtgagcgaggtcgaggcattgtatgagctgttcaagaagatcagcagtgctgtgattgatgatgggctgatcaacaaggaggagtttcagttggcgctgttcaagactaataagaaggaaagtttgtttgctgatcgggtatttgacttatttgatacaaaacacaatgggattcttggatttgaagaatttgctcgggcgctctcagtatttcatcccaatgctcccttggatgagaagattgagttttcattccaactttatgacctcaagcaacaaggcttcattgaaagacaggaggtaaagcaaatggttgttgctacacttgctgagtcaggaatgaatcttttagatgaggtcatagagagcatcattgataagacttttgaggaggcagacacaaagcatgatgggaaaattgacaaagaagaatggcgcaatttagtagtgaggcatccctctttattgaagaacatgacactacaatatctcaaggacatcaccactacatttccgagctttgtcttccattctcaggtcgatgatacctgaatttctgaaaactaatgaatgtcagaaggtggactgcttgctttgctaagcaaactttcagtgcctgtttgatggttgaaaaatctcatcgtcctgaaggcatcaaatcatcgtttgttgttaataatctttttccttgttttgtatttggaattcttgctggatcctgtgtgaatcctcttctattttccctctccattgttcctttattctatttcggttttgatggccagtacttgagtcaggtaatgtgtacaaagttgcgtctgatgctgcctgtcattgaattgtatggcatgtgaggaagatttaaattgtatattcaacttttgtggtcatgatagttgcacatatttttaccatcctttctaatttatatttgttatttttttc

SEQ ID NO: 26498 - DNA, 753 bp, Zea mays
  Clone ID: LIB4185-055-C9_FLI
gcacgaggcaccgccggcgcctactctcttgtgcgcgtcttcgacgagctcaccgagcggcggctcatcgaaaagagcttgagcaggaaggttgtgcacgtgctgtccggcgtcctgttcatgtcatcttggcccctgttcagcaattcgacagaagcacggtatttcgccgcggttgtcccgttcctgaactccatgaggcttctgatatatggactccgtctctacactgatgaagctctggtaaaatcagtgacacgtgaaggaaaaccagaggaattgctgagaggtccactctattatgtcctggtgctgctgttcagcgttttagtcttctggcgtgagtcccccatcgggatcgtctccttgtcgatgatgagcggtggcgatggtttcgctgacattgttgggaggaggtatggctcagcgaagctgccattcaatcggaagaagagctgggccgggagcatctcgatgttcatttctggtttcctgctgtccgcgatgatgatgctctacttctcaagcctgggttacattgatgttatctgggaagaggcacttggtaagctggcgcttgttgcactagcagcgacagtagtggagtgcgttcctgtgaccgaagttgtagatgacaacatatctgttcctttggccaccatgctggtagcttttctcttgtttagctccaaccgcacaatagttaattaaaatactactagtgcattatttaagacatgtgatgagttcttc

SEQ ID NO: 26499 - DNA, 3653 bp, Mus musculus
  Clone ID: LIB4187-042-H1_FLI
cgagaccaaccgagaagccgaggcccgccgacgccggcccgagaccctccgaaaggccgaggtccgccgacaccgacccgagaccctccgagaggcggaacgcggcggagcccgggccgcccgcgtgtcgggcggacgctgcgaaaagatgaatttgcaacaggtttcctggattggattgatcagtttgatttgttctgtatttggccaaacagataaaaatagatgtttaaaagcaaatgccaaatcttgcggagaatgtatacaagcagggccaaattgtgggtggtgtacaaatacgacatttttgcaagaaggaatgcctacttctgcacgatgtgatgatttagaagctttgaaaaagaagggttgccagccaagtgacatagagaatcccagaggctctcaaactataaagaaaaataaaaatgtcaccaatcgcagcaaagggatggcagagaagctccggccagaagacattactcagatccaaccacaacagctgcttctaaaattgagatcaggagaaccacagaagtttacattaaaattcaagagggctgaagattaccctattgatctctactaccttatggatctctcctactctatgaaagatgatctggagaatgtgaaaagtcttggaacggatttgatgaatgaaatgaggaggattacttcagacttccgcattggctttggctcatttgtggagaaaactgtgatgccgtatattagcacaaccccagcaaagctaagaaatccttgtacaagtgaacaaaactgcaccagcccatttagctacaaaaatgtgcttagtcttactgacagaggagagtttttcaatgaacttgttggtcagcaacgcatatctggaaacttggattctccagaaggtggttttgatgcaatcatgcaggttgcggtttgtggatcgctgattggctggaggaatgtaacacgactgctggtgttttccacggatgctgggtttcactttgctggagatgggaaacttggtggtattgttttacccaatgatggacaatgtcacctggaaaataatgtatatacaatgagccattactatgattatccttcaattgctcaccttgttcagaaactaagtgaaaataatattcagacgatttttgcagttactgaagagttccaacctgtttacaaggaattgaagaatttgattcctaagtcagcagtgggcacactgtctggaaactctagtaatgtgatccagctaatcatcgatgcctacaactctctttcttcagaagtcattctggaaaatagcaaattgccagacggagtaacaataaattacaaatcctattgcaagaatggggtgaatgggacaggagaaaatggacgaaagtgttccaacatttctattggagatgaggttcaatttgaaattagcataactgctaataaatgtccaaataaggagtctgaaaccattaaaattaaacctctgggcttcactgaagaagtagaggtcgttcttcagttcatctgtaagtgcaattgtcaaagccatggcatcccagccagtcccaagtgccatgagggaaatgggacatttgagtgtggagcctgcaggtgcaatgaggggcgtgttgggaggcactgtgaatgtagcacagatgaagtgaacagtgaagacatggacgcttactgcaggaaagagaacagttcggaaatctgcagtaacaatggagaatgtgtctgtggacagtgtgtgtgtaggaagagagataatacaaatgaaatttactctggaaaattctgcgagtgtgataacttcaactgtgataggtctaatggcttaatttgtggaggcaatggcgtgtgcaggtgtcgtgtttgtgaatgctatcccaattacactggcagtgcatgtgactgttctttggacactggtccatgtctagcgtcaaatggtcagatctgcaatggccggggtatttgtgaatgtggtgcttgtaagtgcacagatcccaagtttcaagggccaacttgtgagacatgtcagacctgccttggcgtctgtgcagagcataaagaatgtgttcagtgcagagccttcaataaaggagaaaagaaagacacgtgtgcacaggagtgctcccacttcaatctcaccaaagtagaaagcagggagaagttgccccagccggtgcaggtcgatcctgtgacccattgcaaggagaaggacattgatgactgctggttctatttcacctattcagtgaatggcaacaatgaagctatcgtgcatgttgtggagactccagactgtcctactggtcccgacatcatcccaattgtagcaggcgtggttgctggaattgttcttattggccttgccttgctgctgatttggaaacttttaatgataattcatgacagaagggaatttgctaaatttgaaaaggagaaaatgaatgccaagtgggacacgggtgaaaatcctatttacaagagtgccgtgacaactgtggtcaatccgaagtatgagggaaaatgaatcctactcaggcggattttgcaacaccaagctcacagcagcagcatcttagtcacagtagggtagttttggggctctgtggccagggttttattcacatgcaggtttggaaaatgtacaatatgtataatttttaattttttattattttgaaaataatgttataatccatgccagggactgacagaagacttgagaaaggatctttatccttgtcagctgaggtcacagtgtgcctttttaacccttccttctggaccattggaatcaagctctcactagattgaatgacactgctagtgccaatgcagggcagagctgagcagcgtcgcagcatctgaaccatgactgattttcagcttcacagggtggccagggctggttatacagaatcaaagaacagtccttgctggtggctttgttctttgtttagcctgctggctgccctctgggaattcccagtgatgtatgtggaagacaagagtgttgacagtttccaattaaaataaaattgacacagttgatgttcaagtccattggaaaaattctgagaggtgggaaggaaatcttagctttaaaacctgtgtgccattgtgagttacttgatcctgtaactccgacgccttttctttataaatccaaccttggataaaagtactgggaacttctctgctaaaaagtccctgacttagcactattcacataaaggccataattttagtagcattgctgagtggggaccttttgggttgagcttattttaccttttttttttttctttaattcctggtgctcctttatcaccttctctaatcttttaatgtgtctgtttgcaatatgggggttagactttttatcattaccttttcttttccttggctgtacatttacctttttcacaaatactgtaagctgtcctgctgcttgcaggactacagggcctgggcagggccccccagcaacaattcacccacagtgcacctgcacatgcctttcctacatgcttgctctgtctcgaactagtcacaatcttgttttaagtgccttttcattttgacagtgctattaactgaagttatttattaaaataaaaaggcctaaatacatt

SEQ ID NO: 26500 - DNA, 2496 bp, Glycine max
  Clone ID: LIB4198-002-E7_FLI
cacaatgacaatgtggtgaaaaacgctcggatttgaagatggacatggacgtggaagaagcttctgcacctaaagagagaaagcccgttttggtgatcttggtgggcgctccagggagcgggaagtccaccttctgcgaagaagttatgggttcctctactcgcccttgggttcgcgtttgccaggacactattggaaatggtaaagcaggaaataaagctcagtgcctaagcagtgcaactagagcattgaaggatgggaagagtgtatttattgataggtgcaatcttgacagagaacagcgttcagaatttataaagcttggtgatggaccccaaatagatgtccatgcagttgtacttgatcttcctgctaagctttgtatttctcgatcagtcaaacgaactgggcatgaaggaaatttgcagggtggaaaagctgctgcagttgtgaatagaatgcttcaacataaagagcttcccaaattaagtgaaggctttagccggataacattttgtcagaatgaaagtgatgtaaaaaatgctcttaacacatacagcacacttgggccactggatagtcttcaatatggctgctttggccagaagaatcctgattccaaaattcaagttggtataatgaagttccttaaaagagcagaggtcccagttgctgctgcatctagagagagtggcattgaagaccctacttcccagactccgggtaaaaataactcctgctgcaaagataagcaaacattttcctcaattcctgataatgacaactcagagacgaaggaagtagaaaaccaagcagttggctctgttggttcccatgccaatcaagtttctctggatgatattcccactctggcatttccatctatttcaacatctgattttcaattcaaccatgagaaggcagctgatattattgttgagaaggttgcagagttctcaaataagtttaggaatgccagacttgttcttgttgacttgtctcataaatcaaagattctgtccttagttaaggctaaaattgcaggaaaaaacattgatgcccaaaagttctttacccatgttggggacattactcatctttattccaggggaggtttgcgatgtaatgtcattgctaacgctgccaactggaggttaaatcctggaggtggaggtgtaaatgcagcaatttttaatgctgcaggtcctgaactggagtctgcaacaaaagaaaaagtacaatctctttctccagggaatgctgctgttgttcctctaccttcatcttctcctttgttcaccagagagggtgtaacccatgtaatacatgttgttggacctaatatgaacccacaaagaccaaattgtctaaataatgattataataaaggctgcaaaattctccaagatgcttatacttcactttttgaaggctttgcatctattgtgaggaaccagacatggcatccagtaggaaaaagtgaaaaccttgaaaggaagtctttagagttgcaggttcagtctgattgttccagaaattatttcacaaaaactgatcaaaagagtaagagagatgttgatcatggattgggaaaaagtaagaaatacaaggggactcgggatgactctggattgacctttactgattctaggaatgaaaatgttgattcagagcatagaactgagaggagcatgactaagacatggggatcatgggctcaagctcttcaccaaatagctatgcatccagaaaagcttaaggatgacttgcttgaaatttccgatgatgttgttgtattgaatgatatgtatcccaaggcacggaagcatgttctggtgttggcacgaaccggaggtcttgattgccttgcagatgtccaaaaggagcaccttcagttattgaacaagatgcatgatgtgggtttaaagtgggctgagaagttcttgaacgagaatgcttccctggtatttcgtctcggatatcactcggcaccatcaatgcgacaactacatttacatgttattagccaggacttcgaatcaatacatttaaagaacaagaagcactggaactcatttaacacagctttctttcgtgactcggtagatgtaatagacgagatctctagtgatgggaaggcaaaattgaaagatgatgacaaactactgtctatggagttgaggtgccacagatgtagaagtgcacatccaaacataccgcgtttaaaatcacatattagcaactgccaatccccctttcctgctcacctgcttcaacacggacgtttggtgcgtgcaccaggagaacctcatagcaatgtccagtagtactagttttctgtctactctttttttgtgctcggcattttttgtctactctactgctgagcaagactagttttgagcttgtcttttttttagtacatgagataaaatcaccaatgtgtagttaaagattgaagcacttttgcacgatgatattagatggtttgacgtc

SEQ ID NO: 26501 - DNA, 1409 bp, Glycine max
  Clone ID: LIB4200-006-E8_FLI
ctttgtttgattaccgcattggtctctctctctctctctcattatctcactgcgattcactctagtgagagaaagaagagaaggaaacacacgcagagtttaaaatggctctgcgcaccctctcttcgctgcaatgaagaaacgtttttttttcttctccgaagaagaaaaatggctctcggcgacgatgcgcagcaccactctcactctccctcgttcctcgattcccttctctgcgaagagcgagaaacgttcgaggaagactttgacgcgaacggtgacgagtgcgagaccgaaaacaacgacccctctgtgataaagtcgcaacctttgcccttggttttgtacgacaatgacctgttctgggaagacgacgagctcgtgtcgttaatcgcgaaagagggagagacccatttgcgttctttttctgatggggccctggaagggcctcgtgttgaagctgtgaactgggtttcgaaagtttctgggcactatgggttctctgctttgaccactgttcttgctgttaactacttcgataggttcatcacaagtttgaagtttcagagggacaagccgtggatgacacagctcgctgctgttgcttgtttgtcccttgctgcgaaaacagaagagacccatgtgccactcctcttggaccttcaagtggaggagtcaaggtttgtgtttgaggcaaagactattcagagaatggagctgctggtgctgtcaactcttaagtggaggatgcttccggtgaccccaatttccttctttgaacacattgtgagaaggcttggtttgaaaagtcgcttgcattgggagtttctgtggcgttgtgagcgggttcttctcaatatcattgcggattcaagggttatgagttatcttccttctacattggctgctgcgacaatgatccatgttattaaagaaattgaatcatttaatgcgactgagtacattgatcagcttctgggtttactaaagattagcgaggaacaagtgaacaagtgctacagaatcatacagaaactattaggttgccatgaaggcatttacggccttccccagaaatgcaagcgactatctgaattgggtagcccgagtgctgttactgatgcatctttcagttgtgatagctcaaatgattcatgggccgtgtcatcatcagtctcactttcactggagccgcagttgaagaggagaagatctcaggaccagcaaatgcgattgccttctgttagtcgtgtgtcaattgatgttcttaatagccctcattaataatgatcttagtatttacttcaaatgtggtagctttctttcatatcaatctggcagttatgttattgaaatgcaactaaattatgttcttagttatagacatttctagccaaaatttgaaaatt

SEQ ID NO: 26502 - DNA, 689 bp, Glycine max
  Clone ID: LIB4200-007-D2_FLI
cttggtttcaatgaaccatgacactcaatcctgcatggaccccaatgtgatggaggctaaggtggtggtgagttcttgtggccatgatggaccctttggcgccactggggtgaagaggctcaagagcattgggttgattgatagtgtgccagggatgaaagcccttgacatgaacaaggcagaggatgccattgtgaagctcactagggaggttgtgcctggcatgattgttactgggatggaagttgctgagattgatggtgctccaaggatgggtccaacatttggagcaatgatgatttcagggcagaaagcagcccatctggctttgagatcattgggacttcccaatgctttggattctgtaggaaacgttcatcctgagcttgtcctagctgctgctgaatctgctgaaattgcagacgcttaattaatgttgcaacaaatttaagttaaaatatcagtgcttgcaactagaaataatacttgtagttagggaattaagctttgaaggtgttggtagtgatctattggggtggttgatgtgactctctacgaagtttgttaataatatgaaggtttgaaggtatgggtagggtaccatccacacctttgtctcaagttttatattttgttcaatttattttattttaaatttttaaaaaagacaatgaagtaattgatgcgat

SEQ ID NO: 26503 - DNA, 1064 bp, Glycine max
  Clone ID: LIB4202-003-D12_FLI
gcacgatgatgcccaatacagatcaggcattccgtctgaattgggccacattcagtgcgggggaaaggcgttcttccgatgctacttctgatctctctatatttgtgggggacttggccattgatgttactgatgctatgctgcaagagacttttgctggccgatattcatctattaagggagcaaaagttgtcattgattctaataccggccgctcaaaaggctatggttttgttaggtttggtgatgaaaatgagagaacgagggcaatgactgaaatgaatggtgtttattgttctagtaggcccatgcgaataggtgttgcaactcccaagaaaacttatggctaccaacaacaatattcttctcaagctgtgctattggccggtggacacgcagctaatggtgctgtggcccaaggttcccattctgaaggggatttaaacaacaccactatatttgttggagggcttgattctgacaccagtgatgaggatctcagacaaccatttttgcaatttggtgaggttgtctctgtgaaaattccagtgggtaaagggtgtggatttgttcaatttgcagacagaaagaatgctgaggaagcaattcacgcattgaatgggacagtaattgggaagcagacagtgcgactttcttggggtcgcagtccaggaaataagcattggagatctgattccaatggaggctattttggtggtcagagttatggaggccatggatttgctgtgagacagaatcaggatatagccatgcaacctgcaactgcaattcaaggggcttcctaacggggcctagtaaaactgtgtgttgaagtaggatggattttattgctctcctctaaactgtagtattattttaaatttgtagcttggttgtaaggtatgcgaggttcttaagattgtattaaaatgtctgaaattttggattgaacccgattatatattatgactcaggtatttttttaaaaccctcaaaacatattggtagcagacagctaagattattttaaatacttatctttacagtacaatgttactgcttgc

SEQ ID NO: 26504 - DNA, 1088 bp, Glycine max
  Clone ID: LIB4202-003-E2_FLI
tgatgctgaaggcggcaccgcgtgcagtaatctactacctctcggagcacccggctatcgtggggttccggtggagccacgcccaatcatggggcgccacgtggtccttcctcttctcctcaattgcctcctacctcttcctctcagtcttcctatacttctctctttctctcctcttccgccgccgtcaaatccctctcggcccccttcccgccgtccacagcctctccatgtccctcatctccgccacgatcttcgccggcatcctcctctctgccgccgccgagatcagcgacacgcggtggttctggcggcgctccaaaacccccctacagtggctcctctgcttccccttgggcacgcgcccctcggggcgcgtcttcttctggtcctacgtctactacctctcccgcttcctccacatgctccgcaccctcctcagaatcctacgccaccgcaggctatcattttttcatctgttgagtaactcaatctccgcactcgcctccttcctctggctcgagttctcgcagtcctttcaagtcctcgcaattctcttcgccacgctcgtgtacgcagccgtctacggctaccgcttctggaccgccatcggcctccgcggcgcgtgcttccccttcgtcctcagctgccagatcgtgctcctcgcctgcaatgttgcctgccacgtcgccgtcttcttcctccacttcttcctcaagggcgggtgcaatgggatcggcgcgtgggtcttcaactcaatcctcaacctcgctcttcttatgctctctcttaacttctacgtgagaatgcacgttcacaagaggaggaggaaagttagggatgttactgttactgttgctactgcactgtcttaacgagcgcgtgagtgcaacaaatattgaagtttaattgtggaaatatatattagacacgagttggttgttgcaatttggggtcccaagtgtgttccctttttaatgttcatcatttttagcatggaacaggtgaacaagatattatagtatagtgttgttggaaagcaaatattatagtagtaatatttttgtggtacggattatgattttgtg

SEQ ID NO: 26505 - DNA, 677 bp, Glycine max
  Clone ID: LIB4202-004-F10_FLI
ctccattattaaaaaagtatcctgcaaacctatctgtcacagcatattcatacttctttggagctgtattgatggtaactacatcattctttgcaactaatgaatcaactgactggagattgacacaatctgaaacaatagccgttatttatgctggatttattgcatctgcccttaattatggactcattacatggtgcaacaagatcttggggccagccatggttgctctttataatccacttcaacctggagcttctgctctcctatccagaatttttcttggaagtccaatttacatgggaagcatcataggaggatctttgatcattattggtttgtatgcggttacttgggcgtcatatagagaaagacatgcagctgctggagttgtttctcatggctcttgggtctcggaatcactagttcatgacaagagttcttttagggttaacattttctcaggaccccccagcctgtccacaaagccttcggattaacgaaatgaattgtggaatttcatgtaaaaagtcgtcccataatgctttgctgtctttatacataatagttgttttgaagaaattaagagagttgacgttaaaattttgatgaacttatcaaattccacaaggctatttgtcatcttaaaaatgatttcatataagaattttgttttc

SEQ ID NO: 26506 - DNA, 428 bp, Glycine max
  Clone ID: LIB4202-005-E8_FLI
gggaaatggtgaggttgcaggccgggtttttgaagcctgtgaagtccagggcccaagttgttgaagaagaaggctgaggggaaggagaagagtgaggattctgatcaaggttaagtttttaaaaacggtcagcgaccgttatttcaaagttttttttaactgtctgcgaccgtacttgtgaccacatcggccacatttgtccgtgatatcaacaaatctacttaaaaccttattggtcatctcccaggttacttctacttgtaatgtaatattagcatttggatttgtggttttatgtggtgactggtgactccatttttttacttttggaaataagtaataactctagatgtcaatagcctaactaagtgtttcgatgcttttccatatggatgtttgattaaagatgtattctaatgcattgagag

SEQ ID NO: 26507 - DNA, 617 bp, Glycine max
  Clone ID: LIB4202-008-H6_FLI
gttcaaaggggagagaatggacggtgataaacccatcttcagcgtgaggagagcgtcgatcataggacggtcgcgtgcgagtttgacggtggagatgtacgacaacccaggtgaggagtaccagatcgatgggtgcttctcgcagcgttgctgcacggttttcaatgtgacgaaggaatcggtggctgagattcgtcgtaaagtggaccccaccaccagcgtcgtgcttgggaaggaagtgttctccctttgcgttaagcctggttttgatgcggcttttgccatggggtttgtgcttgtcctagatcagatcaacggtgaggattacgttgatgatcgtgctaccacggagcctgcggtgcaccccgccacagaagattagaagggaatagagtgcatttccagatttttcttcaatcacactggcatgatgggtggctttatttaatttaactcactaatccttgggatttggattgtccctcacaaagggaacctccgccccttcttttctgggtcatgctcatgcccttgaaagaataaacttttcaattcccaatgcgattgtgtaaattttacatcaagcataaaaatatcagttgagctttcctactttc

SEQ ID NO: 26508 - DNA, 2249 bp, Homo sapiens
  Clone ID: LIB4218-029-A5_FLI
ccgcgctgttgctaggcaacagcgtgcgagctcagatcagcgtggggtggaggagaagtggagtttggaagttcaggggcacaggggcacaggcccacgactgcagcgggatggaccagtactgcatcctgggccgcatcggggagggcgcccacggcatcgtcttcaaggccaagcacgtggagactggcgagatagttgccctcaagaaggtggccctaaggcggttggaggacggcttccctaaccaggccctgcgggagattaaggctctgcaggagatggaggacaatcagtatgtggtacaactgaaggctgtgttcccacacggtggaggctttgtgctggcctttgagttcatgctgtcggatctggccgaggtggtgcgccatgcccagaggccactagcccaggcacaggtcaagagctacctgcagatgctgctcaagggtgtcgccttctgccatgccaacaacattgtacatcgggacctgaaacctgccaacctgctcatcagcgcctcaggccagctcaagatagcggactttggcctggctcgagtcttttccccagacggcagccgcctctacacacaccaggtggccaccaggtggtaccgagcccccgagctcctgtatggtgcccgccagtatgaccagggcgtcgatctgtggtctgtgggctgcatcatgggggagctgttgaatgggtccccccttttcccgggcaagaacgatattgaacagctttgctatgtgcttcgcatcttgggcaccccaaaccctcaagtctggccggagctcactgagctgccggactacaacaagatctcctttaaggagcaggtgcccatgcccctggaggaggtgctgcctgacgtctctccccaggcattggatctgctgggtcaattccttctctaccctcctcaccagcgcatcgcagcttccaaggtagggggagaggctgtagtctctgctccttcagctcccctccccatcaccctggtactctgtacttggtagccatgtgaccccatcacatcagcgaccctcagaacctgtgattggcatggaccagcaccagacatctggaacccaggggacaggggccttggagcagatgtcgtatgcttgggtgccatcacctcatgacgctgcctgctgttgtgccctgtgctcactcctctccagccccaggggctctcctccatcagtacttcttcacagctcccctgcctgcccatccatctgagctgccgattcctcagcgtctagggggacctgcccccaaggcccatccagggcccccccacatccatgacttccacgtggaccggcctcttgaggagtcgctgttgaacccagagctgattcggcccttcatcctggaggggtgagaagttggccctggtcccgtctgcctgctcctcaggaccactcagtccacctgttcctctgccacctgcctggcttcaccctccaaggcctccccatggccacagtgggcccacaccacaccctgccccttagcccttgcgagggttggtctcgaggcagaggtcatgttcccagccaagagtatgagaacatccagtcgagcagaggagattcatggcctgtgctcggtgagccttaccttctgtgtgctactgacgtacccatcaggacagtgagctctgctgccagtcaaggcctgcatatgcagaatgacgatgcctgccttggtgctgcttccccgagtgctgcctcctggtcaaggagaagtgcagagagtaaggtgtccttatgttggaaactcaagtggaaggaagatttggtttggttttattctcagagccattaaacactagttcagtatgtgagatatagattctaaaaacctcaggtggctctgccttatgtctgttcctccttcatttctctcaagggaaatggctaaggtggcattgtctcatggctctcgtttttggggtcatggggagggtagcaccaggcatagccacttttgccctgagggactcctgtgtacttcacatcactgagcactcatttagaagtgagggagacagaagtctaggcccagggatggctccagttggggatccagcaggagaccctctgcacatgaggctggtttaccaacatctactccctcaggatgagcgtgagccagaagcagctgtgtatttaaggaaacaagcgttcctggaattaatttataaatttaataaatcccaatataatccc

SEQ ID NO: 26509 - DNA, 2452 bp, Homo sapiens
  Clone ID: LIB4218-039-G3_FLI
ccccaagtttgttgtgaccggcgggggacgccggtggtggcggcagcggcggctgcgggggcaccgggccgcggcgccaccatggcggtgcgacaggcgctgggccgcggcctgcagctgggtcgagcgctgctgctgcgcttcacgggcaagcccggccgggcctacggcttggggcggccgggcccggcggcgggctgtgtccgcggggagcgtccaggctgggccgcaggaccgggcgcggagcctcgcagggtcgggctcgggctccctaaccgtctccgcttcttccgccagtcggtggccgggctggcggcgcggttgcagcggcagttcgtggtgcgggcctggggctgcgcgggcccttgcggccgggcagtctttctggccttcgggctagggctgggcctcatcgaggaaaaacaggcggagagccggcgggcggtctcggcctgtcaggagatccaggcaatttttacccagaaaagcaagccggggcctgacccgttggacacgagacgcttgcagggctttcggctggaggagtatctgatagggcagtccattggtaagggctgcagtgctgctgtgtatgaagccaccatgcctacattgccccagaacctggaggtgacaaagagcaccgggttgcttccagggagaggcccaggtaccagtgcaccaggagaagggcaggagcgagctccgggggcccctgccttccccttggccatcaagatgatgtggaacatctcggcaggttcctccagcgaagccatcttgaacacaatgagccaggagctggtcccagcgagccgagtggccttggctggggagtatggagcagtcacttacagaaaatccaagagaggtcccaagcaactagcccctcaccccaacatcatccgggttctccgcgccttcacctcttccgtgccgctgctgccaggggccctggtcgactaccctgatgtgctgccctcacgcctccaccctgaaggcctgggccatggccggacgctgttcctcgttatgaagaactatccctgtaccctgcgccagtacctttgtgtgaacacacccagcccccgcctcgccgccatgatgctgctgcagctgctggaaggcgtggaccatctggttcaacagggcatcgcgcacagagacctgaaatccgacaacatccttgtggagctggacccagacggctgcccctggctggtgatcgcagattttggctgctgcctggctgatgagagcatcggcctgcagttgcccttcagcagctggtacgtggatcggggcggaaacggctgtctgatggccccagaggtgtccacggcccgtcctggccccagggcagtgattgactacagcaaggctgatgcctgggcagtgggagccatcgcctatgaaatcttcgggcttgtcaatcccttctacggccagggcaaggcccaccttgaaagccgcagctaccaagaggctcagctacctgcactgcccgagtcagtgcctccagacgtgagacagttggtgagggcactgctccagcgagaggccagcaagagaccatctgcccgagtagccgcaaatgtgcttcatctaagcctctggggtgaacatattctagccctgaagaatctgaagttagacaagatggttggctggctcctccaacaatcggccgccactttgttggccaacaggctcacagagaagtgttgtgtggaaacaaaaatgaagatgctctttctggctaacctggagtgtgaaacgctctgccaggcagccctcctcctctgctcatggagggcagccctgtgatgtccctgcatggagctggtgaattactaaaagaacttggcatcctctgtgtcgtgatggtctgtgaatggtgagggtgggagtcaggagacaagacagcgcagagagggctggttagccggaaaaggcctcgggcttggcaaatggaagaacttgagtgagagttcagtctgcagtcctgtgctcacagacatctgaaaagtgaatggccaagctggtctagtagatgaggctggactgaggaggggtaggcctgcatccacatagaggatccaggccaaggcactggctgtcagtggcagagtttggctgtgacctttgcccctaacacgaggaactcgtttgaagggggcagcgtagcatgtctgatttgccacctggatgaaggcagacatcaacatgggtcagcacgttcagttacgggagtgggaaattacatgaggcctgggcctctgcgttcccaagctgtgcgttctggaccagctactgaattattaatctcacttagcgaaagtgacggatgagcagtaagtaagtaagtgtggggatttaaacttgagggtttccctcctgactagcctctcttacaggaattgtgaaatattaaatgcaaatttacaactgc

SEQ ID NO: 26510 - DNA, 1170 bp, Homo sapiens
  Clone ID: LIB4218-046-D1_FLI
acaacatcagaacccctctccatccccaccaaccgcctcacccagcgcatcatccccaggcgctttgctctgtccaccaagattcctgacaccaaaggctgcttgcagtgtcgtgtggtgcggaacccctacacgggtgccaccttcctgctggccgccctgcccaccagcctgctcctgctgcagtggtatgagccgctgcagaagtttctgctgctgaagaacttctccagccctctgcccagcccagctgggatgctggagccgctggtgctggatgggaaggagctgccgcaggtgtgtgttggggccgaggggcctgaggggcccggctgccgcgtcctgttccatgtcctgcccctggaggctggcctgacgcccgacatcctcatcccacctgaggggatcccaggctcggcccagcaggtgatccaggtggacagggacacaatcctagtcagctttgaacgctgtgtgaggattgtcaacatgcagggcgagcccacggccacactggcacctgagctgacctttgatttccccatcgagactgtggtgtgcctgcaggacagtgtgctggccttctggagccatgggatgcaaggccgaagcctggataccaatgaggtgacccaggagatcacagatgaaacaaggatcttccgagtgcttggggcccacagagacatcatcctggagagcattcccactgacaacccagaggcgcacagcaacctctacatcctcacgggccaccagagcacctactaagagcagcgggcctgtccaggggctccccgccccaccccacgccttagctgcaggcccttttgggcaaaggggcccatcctagaccagaggagcccaggccctggccctgctggggctgaaggtcagaagtaatcctgagaaatgtttcaggcctggggagggaggggagcccccgacgcctctgcaataactggaccagggggagctgctgtcactcccccatccccgaggcagcccagtccctagtgcccaaggcagggaccctgggcctgggccatccattccattttgttccacatttcctttctactctttctgccaagagcctgcccctgcatttgtcctgggaaacacggtatttaagagagaactatattggtattaaagctggtttgtttt

SEQ ID NO: 26511 - DNA, 2142 bp, Homo sapiens
  Clone ID: LIB4218-078-C4_FLI
gtgacgtggcctacaggaaccgccccagtggtcagctgccgcgctgttgctaggcaacagcgtgcgagctcagatcagcgtggggtggaggagaagtggagtttggaagttcaggggcacaggggcacaggcccacgactgcagcgggatggaccagtactgcatcctgggccgcatcggggagggcgcccacggcatcgtcttcaaggccaagcacgtggagactggcgagatagttgccctcaagaaggtggccctaaggcggttggaagacggcttccctaaccaggccctgcgggagattaaggctctgcaggagatggaggacaatcagtatgtggtacaactgaaggctgtgttcccacacggtggaggctttgtgctggcctttgagttcatgctgtcggatctggccgaggtggtgcgccatgcccagaggccactagcccaggcacaggtcaagagctacctgcagatgctgctcaagggtgtcgccttctgccatgccaacaacattgtacatcgggacctgaaacctgccaacctgctcatcagcgcctcaggccagctcaagatagcggactttggcctggctcgagtcttttccccagacggcagccgcctctacacacaccaggtggccaccaggtctgtgggctgcatcatgggggagctgttgaatgggtccccccttttcccgggcaagaacgatattgaacagctttgctatgtgcttcgcatcttgggcaccccaaaccctcaagtctggccggagctcactgagctgccggactacaacaagatctcctttaaggagcaggtgcccatgcccctggaggaggtgctgcctgacgtctctccccaggcattggatctgctgggtcaattccttctctaccctcctcaccagcgcatcgcagcttccaaggctctcctccatcagtacttcttcacagctcccctgcctgcccatccatctgagctgccgattcctcagcgtctagggggacctgcccccaaggcccatccagggcccccccacatccatgacttccacgtggaccggcctcttgaggagtcgctgttgaacccagagctgattcggcccttcatcctggaggggtgagaagttggccctggtcccgtctgcctgctcctcaggaccactcagtccacctgttcctctgccacctgcctggcttcaccctccaaggcctccccatggccacagtgggcccacaccacaccctgccccttagcccttgcgagggttggtctcgaggcagaggtcatgttcccagccaagagtatgagaacatccagtcgagcagaggagattcatggcctgtgctcggtgagccttaccttctgtgtgctactgacgtacccatcaggacagtgagctctgctgccagtcaaggcctgcatatgcagaatgacgatgcctgccttggtgctgcttccccgagtgctgcctcctggtcaaggagaagtgcagagagtaaggtgtccttatgttggaaactcaagtggaaggaagatttggtttggttttattctcagagccattaaacactagttcagtatgtgagatatagattctaaaaacctcaggtggctctgccttatgtctgttcctccttcatttctctcaagggaaatggctaaggtggcattgtctcatggctctcgtttttggggtcatggggagggtagcaccaggcatagccacttttgccctgagggactcctgtgtgcttcacatcactgagcactcatttagaagtgagggagacagaagtctaggcccagggatggctccagttggggatccagcaggagaccctctgcacatgaggctggtttaccaacatctactccctcaggatgagcgtgagccagaagcagctgtgtatttaaggaaacaagcgttcctggaattaatttataaatttaataaatcccaatataatcccagctagtgctttttccttattataatttgataaggtgattataaaagatacatggaaggaagtggaaccagatgcagaagaggaaatgatggaaggacttatggtatcagataccaatatttaaaagtttgtataataataaagagtatgattgtggttcaaggat

SEQ ID NO: 26512 - DNA, 1568 bp, Homo sapiens
  Clone ID: LIB4218-091-D2_FLI
aattgatcattcttgggtgtttctcgcagagggggatttggcagggtcataggacaatagtagagggaaggtcagcagataaacaagtgaacaaaggtctctggttttcctaggcagagtgtttgtgtccctgggtacttgagattagggagtggtgatgactcttaacgagcatgctgccttcaagcatctgttaaacaaagcacatcttgcaccgccctaatccatttaaccctgagtggacacagcacatgtttcagagagcacagggttgggggtaaggtcatagatcaacaggatcccaaggcagaagaatttttcttagtacagaacaaaatgaaaagtctcccatgtctacttctttctacacagacacagcaaccatccgatttctcaatcttttccccacctttcccccttttctattccacaaaaccgccattgccatcatggcccgttctcaatgagctgctgggcacacctcccagacggggtggcggccgggcagaggggctcctcacttcccagtaggggcggccgggcagaggcgcccctcacctccctccctgacggggcggctggccgggcggggggctgacccccccacctccctcccggacagggcggctgtctgggcgggggggctgagccccccacctccctcccggacggggcggctggccgggcggggggctgaccccccccacctccctccgtcctgggcattttcatatccttccttctgacactttcttttccctccatgagaggcaacattttctggggtaccacaaacaaccacgactttgtttctctcaaatgttgggtgtctgtggggccctgcctctgccctggtggtggcacgcctgctcagttgcaacccaaaggaggtctctttggagtttacacaaggccagggctttgtggggaccttctgagcaaacagctgtttgatgttgcctcactccagcacccagagtggccaacgccgcctggattctaggcgccaaccccctctcccacaacctgggggagcccctgccaccttcctccgcacgaatattccatttggctttgtctgtcattagcacattggaactcaggtcctgcagtttgcagtggtcactgctgatgaggatgatgttggagggtttgagattcctgaaaccaagaggtgggtttgcctctggatgccaaggggccacctgggcagccaccacccacaaccccaggtgggaccagtgtgtgtgctgagcctgactctctgctccctgccccacctggttctgcagcagcagcccacatcctcctctcctccacaaaatgccccatctcagcctactttttaagcagttgtttcctatgtacagaaatatactcaattattttaaatcgggggaaaaatcctcaaccacaagtaggaacacacccagcactccgaagaggccccttaattgacacattcacctccttagatatctcagctacacgtttgcctggggattgatttttggccattgtgcgacgtctagtgacatgaacactggatgtggaatgtgagcattccc

SEQ ID NO: 26513 - DNA, 3451 bp, Homo sapiens
  Clone ID: LIB4218-102-H9_FLI
tggcgcccggggtccccgctgcacggggccactaggaccctcggcgtcccttcccctcccccgccctgccccctctcccgccgcgcggacccgggcgttctcggcgcccagcttttgagctcgcgtccccaggccggcggggggggaggggaagagaggggaccctgggacccccgccccccccacccggccgcccctgccccccgggacccggagaagatgtcttcgcggacggtgctggccccgggcaacgatcggaactcggacacgcatggcaccttgggcagtggccgctcctcggacaaaggcccgtcctggtccagccgctcactgggtgcccgttgccggaactccatcgcctcctgtcccgaggagcagccccacgtgggcaactaccgcctgctgaggaccattgggaagggcaactttgccaaagtcaagctggctcggcacatcctcactggtcgggaggttgccatcaagattatcgacaaaacccagctgaatcccagcagcctgcagaagctgttccgagaagtccgcatcatgaagggcctaaaccaccccaacatcgtgaagctctttgaggtgattgagactgagaagacgctgtacctggtgatggagtacgcaagtgctggagaagtgtttgactacctcgtgtcgcatggccgcatgaaggagaaggaagctcgagccaagttccgacagattgtttcggctgtgcactattgtcaccagaaaaatattgtacacagggacctgaaggctgagaacctcttgctggatgccgaggccaacatcaagattgctgactttggcttcagcaacgagttcacgctgggatcgaagctggacacgttctgcgggagccccccatatgccgccccggagctgtttcagggcaagaagtacgacgggccggaggtggacatctggagcctgggagtcatcctgtacaccctcgtcagcggctccctgcccttcgacgggcacaacctcaaggagctgcgggagcgagtactcagagggaagtaccgggtccctttctacatgtcaacagactgtgagagcatcctgcggagatttttggtgctgaacccagctaaacgctgtactctcgagcaaatcatgaaagacaaatggatcaacatcggctatgagggtgaggagttgaagccatacacagagcccgaggaggacttcggggacaccaagagaattgaggtgatggtgggtatgggctacacacgggaagaaatcaaagagtccttgaccagccagaagtacaacgaagtgaccgccacctacctcctgctgggcaggaagactgaggagggtggggaccggggcgccccagggctggccctggcacgggtgcgggcgcccagcgacaccaccaacggaacaagttccagcaaaggcaccagccacagcaaagggcagcggagttcctcttccacctaccaccgccagcgcaggcatagcgatttctgtggcccatcccctgcacccctgcaccccaaacgcagcccgacgagcacgggggaggcggagctgaaggaggagcggctgccaggccggaaggcgagctgcagcaccgcggggagtgggagtcgagggctgcccccctccagccccatggtcagcagcgcccacaaccccaacaaggcagagatcccagagcggcggaaggacagcacgagcacccccaacaacctccctcctagcatgatgacccgcagaaacacctacgtttgcacagaacgcccgggggctgagcgcccgtcactgttgccaaatgggaaagaaaacagctcaggcaccccacgggtgccccctgcctccccctccagtcacagcctggcacccccatcaggggagcggagccgcctggcacgcggttccaccatccgcagcaccttccatggtggccaggtccgggaccggcgggcagggggtgggggtggtgggggtgtgcagaatgggccccctgcctctcccacactggcccatgaggctgcacccctgcccgccgggcggccccgccccaccaccaacctcttcaccaagctgacctccaaactgacccgaagggtcgcagacgaacctgagagaatcgggggacctgaggtcacaagttgccatctaccttgggatcaaacggaaaccgccccccggctgctccgattcccctggagtgtgaagctgaccagctcgcgccctcctgaggccctgatggcagctctgcgccaggccacagcagccgcccgctgccgctgccgccagccacagccgttcctgctggcctgcctgcacgggggtgcgggcgggcccgagcccctgtcccacttcgaagtggaggtctgccagctgccccggccaggcttgcggggagttctcttccgccgtgtggcgggcaccgccctggccttccgcaccctcgtcacccgcatctccaacgacctcgagctctgagccaccacggtcccagggcccttactcttcctctcccttgtcgccttcacttctacaggaggggaaggggccagggaggggattctccctttatcatcacctcagtttccctgaattatatttgggggcaaagattgtcccctctgctgttctctggggccgctcagcacagaagaaggatgagggggctcagcgggggagctggcaccttcctggagcctccagccagtcctgtcctccctcgccctaccaagagggcacctgaggagactttggggacagggcaggggcagggagggaaactgaggaaatcttccattcctcccaacagctcaaaattaggccttgggcaggggcagggagagctgctgagcctaaagactggagaatctgggggactgggagtgggggtcagagaggcagattccttcccctcccgtcccctcacgctcaaacccccacttcctgccccaggctggcgcggggcactttgtacaaatccttgtaaataccccacaccctcccctctgcaaaggtctcttgaggagctgccgctgtcacctacggtttttaagttattacaccccgaccctcctcctgtcagccccctcacctgcagcctgttgcccaataaatttaggagagtccccccctccccaatgctgaccctaggattttccttccctgccctcacctgcaaatgagttaaagaagaggcgtgggaatccaggcagtggtttttcctttcggagcctcggttttctcatctgcagaatgggagcggtgggggtgggaaggtaaggatggtcgtggaagaaggcaggatggaactcggcctcatccccgaggccccagttcctatatcgggccccccattcatccactcacactcccagccaccatgttacactggactctaagccacttcttactccagtagtaaatttattcaataaacaatcattgacccatg

SEQ ID NO: 26514 - DNA, 2147 bp, Homo sapiens
  Clone ID: LIB4219-022-B12_FLI
gtttgttgtgaccggcgggggacgccggtggtggcggcagcggcggctgcgggggcaccgggccgcggcgccaccatggcggtgcgacaggcgctgggccgcggcctgcagctgggtcgagcgctgctgctgcgcttcacgggcaagcccggccgggcctacggcttggggcggccgggcccggcggcgggctgtgtccgcggggagcgtccaggctgggccgcaggaccgggcgcggagcctcgcagggtcgggctcgggcttcctaaccgtctccgcttcttccgccagtcggtggccgggctggcggcgcggttgcagcggcagttcgtggtgcgggcctggggctgcgcgggcccttgcggccgggcagtctttctggccttcgggctagggctgggcctcatcgaggaaaaacaggcggagagccggcgggcggtctcggcctgtcaggagatccaggcaatttttacccagaaaagcaagccggggcctgacccgttggacacgagacgcttgcagggctttcggctggaggagtatctgatagggcagtccattggtaagggctgcagtgctgctgtgtatgaagccaccatgcctacattgccccagaacctggaggtgacaaagagcaccgggttgcttccagggagaggcccaggtaccagtgcaccaggagaagggcaggagcgagctccgggggcccctgccttccccttggccatcaagatgatgtggaacatctcggcaggttcctccagcgaagccatcttgaacacaatgagccaggagctggtcccagcgagccgagtggccttggctggggagtatggagcagtcacttacagaaaatccaagagaggtcccaagcaactagcccctcaccccaacatcatccgggttctccgcgccttcacctcttccgtgccgctgctgccaggggccctggtcgactaccctgatgtgctgccctcacgcctccaccctgaaggcctgggccatggccggacgctgttcctcgttatgaagaactatccctgtaccctgcgccagtacctttgtgtgaacacacccagcccccgcctcgccgccatgatgctgctgcagctgctggaaggcgtggaccatctggttcaacagggcatcgcgcacagagacctgaaatccgacaacatccttgtggagctggacccagacggctgcccctggctggtgatcgcagattttggctgctgcctggctgatgagagcatcggcctgcagttgcccttcagcagctggtacgtggatcggggcggaaacggctgtctgatggccccagaggtgtccacggcccgtcctggccccagggcagtgattgactacagcaaggctgatgcctgggcagtgggagccatcgcctatgaaatcttcgggcttgtcaatcccttctacggccagggcaaggcccaccttgaaagccgcagctaccaagaggctcagctacctgcactgcccgagtcagtgcctccagacgtgagacagttggtgagggcactgctccagcgagaggccagcaagagaccatctgcccgagtagccgcaaatgtgcttcatctaagcctctggggtgaacatattctagccctgaagaatctgaagttagacaagatggttggctggctcctccaacaatcggccgccactttgttggccaacaggctcacagagaagtgttgtgtggaaacaaaaatgaagatgctctttctggctaacctggagtgtgaaacgctctgcatccacatagaggatccaggccaaggcactggctgtcagtggcagagtttggctgtgacctttgcccctaacacgaggaactcgtttgaagggggcagcgtagcatgtctgatttgccacctggatgaaggcagacatcaacatgggtcagcacgttgagttacgggagtgggaaattacatgaggcctgggcctctgcgttcccaagctgtgcgttctggaccagctactgaattattaatctcacttagcgaaagtgacggatgagcagtaagtaagtaagtgtggggatttaaacttgagggtttccctcctgactagcctctcttacaggaattgtgaaatattaaatgcaaatttacaactgc

SEQ ID NO: 26515 - DNA, 2944 bp, Homo sapiens
  Clone ID: LIB4219-030-G2_FLI
ggacggcaccaagggagctgccccatggacagggccccacagagacagcaccgagcctcacgggagctgctggctgcaaagaagacccacacctcacaaattgaagtgatcccttgcaaaatctgtggggacaagtcgtctgggatccactacggggttatcacctgtgaggggtgcaagggcttcttccgccggagccagcgctgtaacgcggcctactcctgcacccgtcagcagaactgccccatcgaccgcaccagccgaaaccgatgccagcactgccgcctgcagaaatgcctggcgctgggcatgtcccgagatgctgtcaagttcggccgcatgtccaagaagcagagggacagcctgcatgcagaagtgcagaaacagctgcagcagcggcaacagcagcaacaggaaccagtggtcaagacccctccagcaggggcccaaggagcagataccctcacctacaccttggggctcccagacgggcagctgcccctgggctcctcgcctgacctgcctgaggcttctgcctgtccccctggcctcctgaaagcctcaggctctgggccctcatattccaacaacttggccaaggcagggctcaatggggcctcatgccaccttgaatacagccctgagcggggcaaggctgagggcagagagagcttctatagcacaggcagccagctgacccctgaccgatgtggacttcgttttgaggaacacaggcatcctgggcttggggaactgggacagggcccagacagctacggcagccccagtttccgcagcacaccggaggcaccctatgcctccctgacagagatagagcacctggtgcagagcgtctgcaagtcctacagggagacatgccagctgcggctggaggacctgctgcggcagcgctccaacatcttctcccgggaggaagtgactggctaccagaggaagtccatgtgggagatgtgggaacggtgtgcccaccacctcaccgaggccattcagtacgtggtggagttcgccaagaggctctcaggctttatggagctctgccagaatgaccagattgtgcttctcaaagcaggagcaatggaagtggtgctggttaggatgtgccgggcctacaatgctgacaaccgcacggtcttttttgaaggcaaatacggtggcatggagctgttccgagccttgggctgcagcgagctcatcagctccatctttgacttctcccactccctaagtgccttgcacttttccgaggatgagattgccctctacacagcccttgttctcatcaatgcccatcggccagggctccaagagaaaaggaaagtagaacagctgcagtacaatctggagctggcctttcatcatcatctctgcaagactcatcgccaaagcatcctggcaaagctgccacccaaggggaagcttcggagcctgtgtagccagcatgtggaaaggctgcagatcttccagcacctccaccccatcgtggtccaagccgctttccctccactctacaaggagctcttcagcactgaaaccgagtcacctgtggggctgtccaagtgacctggaagagggactccttgcctctccctatggcctgctggcccacctccctggaccccgttccaccctcacccttttcctttcccatgaaccctggagggtggtccccaccagctctttggaagtgagcagatgctgcggctggctttctgtcagcaggccggcctggcagtgggacaatcgccagagggtggggctggcagaacaccatctccagcctcagctttgacctgtctcatttcccatattccttcacacccagcttctggaaggcatggggtggctgggatttaaggacttctgggggaccaagacatcctcaagaaaacaggggcatccagggctccctggatgaatagaatgcaattcattcagaagctcagaagctaagaataagcctttgaaatacctcattgcatttccctttgggcttcggcttggggagatggatcaagctcagagactggcagtgagagcccagaaggacctgtataaaatgaatctggagctttacattttctgcctctgccttcctcccagctcagcaaggaagtatttgggcaccctaccctttacctggggtctaaccaaaaatggatgggatgaggatgagaggctggagataattgttttatgggatttgggtgtgggactagggtacaatgaaggccaagagcatctcagacatagagttaaaactcaaacctcttatgtgcactttaaagatagactttaggggctggcacaaatctgatcagagacacatatccatacacaggtgaaacacatacagactcaacagcaatcatgcagttccagagacacatgaacctgacacaatctctcttatccttgaggccacagcttggaggagcctagaggcctcaggggaaagtcccaatcctgagggaccctcccaaacatttccatggtgctccagtccactgatcttgggtctggggtgatccaaataccaccccagctccagctgtcttctaccactagaagacccaagagaagcagaagtcgctcgcactggtcagtcggaaggcaagatcagatcctggaggactttcctggcctgcccgccagccctgctcttgttgtggagaaggaagcagatgtgatcacatcaccccgtcattgggcaccgctgactccagcatggaggacaccagggagcagggcctgggcctgtttccccagctgtgatcttgcccagaacctctcttggcttcataaacagctgtgaaccctcccctgaaggattaacagcaatgatgggcagtcgtggagttgggggggttgggggtgggattgtgtcctctaaggggacgggttcatctgagtaaacataaacccc

SEQ ID NO: 26516 - DNA, 1950 bp, Homo sapiens
  Clone ID: LIB4219-043-E7_FLI
ggagaagtggagtttggaagttcaggggcacaggggcacaggcccacgactgcagcgggatggaccagtactgcatcctgggccgcatcggggagggcgcccacggcatcgtcttcaaggccaagcacgtggagactggcgagatagttgccctcaagaaggtggccctaaggcggttggaagacggcttccctaaccaggccctgcgggagattaaggctctgcaggagatggaggacaatcagtatgtggtacaactgaaggctgtgttcccacacggtggaggctttgtgctggcctttgagttcatgctgtcggatctggccgaggtggtgcgccatgcccagaggccactagcccaggcacaggtcaagagctacctgcagatgctgctcaagggtgtcgccttctgccatgccaacaacattgtacatcgggacctgaaacctgccaacctgctcatcagcgcctcaggccagctcaagatagcggactttggcctggctcgagtcttttccccagacggcagccgcctctacacacaccaggtggccaccaggtggtaccgagcccccgagctcctgtatggtgcccgccagtatgaccagggcgtcgatctgtggtctgtgggctgcatcatgggggagctgttgaatgggtccccccttttcccgggcaagaacgatattgaacagctttgctatgtgcttcgcatcttgggcaccccaaaccctcaagtctggccggagctcactgagctgccggactacaacaagatctcctttaaggagcaggtgcccatgcccctggaggaggtgctgcctgacgtctctccccaggcattggatctgctgggtcaattccttctctaccctcctcaccagcgcatcgcagcttccaaggctctcctccatcagtacttcttcacagctcccctgcctgcccatccatctgagctgccgattcctcagcgtctagggggacctgcccccaaggcccatccagggcccccccacatccatgacttccacgtggaccggcctcttgaggagtcgctgttgaacccagagctgattcggcccttcatcctggaggggtgagaagttggccctggtcccgtctgcctgctcctcaggaccactcagtccacctgttcctctgccacctgcctggcttcaccctccaaggcctccccatggccacagtgggcccacaccacaccctgccccttagcccttgcgagggttggtctcgaggcagaggtcatgttcccagccaagagtatgagaacatccagtcgagcagaggagattcatggcctgtgctcggtgagccttaccttctgtgtgctactgacgtacccatcaggacagtgagctctgctgccagtcaaggcctgcatatgcagaatgacgatgcctgccttggtgctgcttccccgagtgctgcctcctggtcaaggagaagtgcagagagtaaggtgtccttatgttggaaactcaagtggaaggaagatttggtttggttttattctcagagccattaaacactagttcagtatgtgagatatagattctaaaaacctcaggtggctctgccttatgtctgttcctccttcatttctctcaagggaaatggctaaggtggcattgtctcatggctctcgtttttggggtcatggggagggtagcaccaggcatagccacttttgccctgagggactcctgtgtgcttcacatcactgagcactcatttagaagtgagggagacagaagtctaggcccagggatggctccagttggggatccagcaggagaccctctgcacatgaggctggtttaccaacatctactccctcaggatgagcgtgagccagaagcagctgtgtatttaaggaaacaagcgttcctggaattaatttataaatttaataaatcccaatataatccc

SEQ ID NO: 26517 - DNA, 1742 bp, Homo sapiens
  Clone ID: LIB4219-051-H12_FLI
gggaggcggcggcggcggcggcggcggctcgggtggctgcgctgggaggcggcggtgagaggctcgcacgcctccagcccggccccggccccccgggagggagagccgagcagccccggctctgggctacggactatgggcgaatagctctgaccacccggcgaagagctgagaatgaagcggagagcatcagacagaggagctggggaaacgtcggccagggccaaggctctaggaagtgggatttctggaaataatgcaaagagagctggaccattcatccttggtccccgtctgggcaactcaccggtgccaagcatagtgcagtgtttggcgaggaaagatggcacggatgacttctatcagctgaagatcctgaccctggaggagaggggggaccaaggcatagagagccaggaagagcggcagggcaagatgctgctgcacaccgagtactcactgctgtctctcctgcacacgcaggatggcgtggtgcaccaccacggcctcttccaggaccgcacctgtgaaatcgttgaggacacagaatccagccggatggttaagaagatgaagaagcgcatctgcctcgtcctggactgcctctgtgctcatgacttcagcgataagaccgctgacctcatcaacctgcagcactacgtcatcaaggagaagaggctcagcgagagggagactgtggtaatcttctacgacgtggtccgcgtggtggaggccctgcaccagaaaaatatcgtgcacagagacctgaagctggggaacatggtgctcaacaagaggacacatcggataaccatcaccaacttctgcctcgggaagcatctggtgagcgagggggacctgctgaaggaccagagagggagccctgcctacatcagtcccgacgtgctcagcggccggccgtaccgtggcaagcccagtgacatgtgggccctgggcgtggtgctcttcaccatgctgtatggccagttccccttctacgacagcatcccgcaggagctcttccgcaagatcaaggctgccgagtataccattcctgaggatggacgggtttctgagaacaccgtgtgtctcatccggaagctgctggtccttgacccccagcagcgcctggccgccgccgacgtcctggaggccctcagtgccatcattgcatcatggcagtccctgtcatctctgagtgggcctttgcaagtggttcctgacattgatgaccaaatgagcaatgcggatagctcccaggaggcgaaggtgacggaggagtgctcccagtacgagtttgagaactacatgcgtcagcagctgctgctggccgaggagaagagctccatccatgacgcccggagctgggtacccaagcggcagttcggcagcgcaccaccggtgcgacggctgggccacgacgcacagcccatgacctccttggacacggccatcctggcgcagcgctacctgcggaaataacagcctcagccggggccaccagcactgctgccacttcttccagccccagccaaaggcgtggctgtcagggctgggccctgtagtgctggactctcccgggccacaatagggacagggcagggacagggacagcccaggtcacacgtggggtcagcagaggtaccacgaagctaccttttgggatgattgctcgattgtttggtttttaaatctgagaagcctagataactaatctgcttttaatcacgatgttttaatct

SEQ ID NO: 26518 - DNA, 5669 bp, Homo sapiens
  Clone ID: LIB4219-057-F7_FLI
gccggcggcgggtggcctgcccaacgtgtgctgggtgggagaaggcgaggcggcagcgatgctgtctcttccgtgaggagcgcagaggaggtcgcggcgccggaggccccagaaggctcgaaggcgccgcgggctggggtcggtggcttagggagcccgtccggccatggtggccgcgggtggtggttggcgcggctgcgctgcggcccggggcagtgcggagccgggacagtcgcggcgctgacgcccgcgggccccagctgcagatatgaagcggagccgctgccgcgaccgaccgcagccgccgccgcccgaccgccgggaggatggagttcagcgggcagcggagctgtctcagtctttgccgccgcgccggcgagcgccgcccgggaggcagcggctggaggagcggacgggccccgcggggcccgagggcaaggagcaggatgtagtaactggagttagtcccctgctcttcaggaaactcagtaatcctgacatattttcatccactggaaaagttaaacttcagcgacaactgagtcaggatgattgtaagttatggagaggaaacctggccagctctctatcgggtaagcagctgctccctttgtccagcagtgtacatagcagtgtgggacaggtgacttggcagtcgtcaggagaagcatcaaacctggttcgaatgagaaaccagtcccttggacagtctgcaccttctcttactgctggcctggagttgagccttccaagaagaggcagcttgatccattgatgttcctggttgcattattatactatgctggtcaccgaatgttgtcggacaagtaaccgcaagagcttgattgtgacctctagcacatcacctacactaccacggccacactcaccactccatggccacacaggtaacagtcctttggacagcccccggaatttctctccaaatgcacctgctcacttttcttttgttcctgcccgtaggactgatgggcggcgctggtctttggcctctttgccctcttcaggatatggaactaacactcctagctccactgtctcatcatcatgctcctcacaggaaaagctgcatcagttgcctttccagcctacagctgatgagctgcactttttgacgaagcatttcagcacagagagcgtaccagatgaggaaggacggcagtccccagccatgcggcctcgctcccggagcctcagtcccggacgatccccagtatcctttgacagtgaaataataatgatgaatcatgtttacaaagaaagattcccaaaggccaccgcacaaatggaagagcgactagcagagtttatttcctccaacactccagacagcgtgctgcccttggcagatggagccctgagctttattcatcatcaggtgattgagatggcccgagactgcctggataaatctcggagtggcctcattacatcacaatacttctacgaacttcaagagaatttggagaaacttttacaagatgagtttgaccctgaagagttctaccaccttttagaagcagctgagggccacgccaaagagggacaagggattaaatgtgacattccccgctacatcgttagccagctgggcctcacccgggatcccctagaagaaatggcccagttgagcagctgtgacagtcctgacactccagagacagatgattctattgagggccatggggcatctctgccatctaaaaagacaccctctgaagaggacttcgagaccattaagctcatcagcaatggcgcctatggggctgtatttctggtgcggcacaagtccacccggcagcgctttgccatgaagaagatcaacaagcagaacctgatcctacggaaccagatccagcaggccttcgtggagcgtgacatactgactttcgctgagaacccctttgtggtcagcatgttctgctcctttgataccaagcgccacttgtgcatggtgatggagtacgttgaagggggagactgtgccactctgctgaagaatattggggccctgcctgtggacatggtgcgtctatactttgcggaaactgtgctggccctggagtacttacacaactatggcatcgtgcaccgtgacctcaagcctgacaacctcctaattacatccatggggcacatcaagctcacggactttggactgtccaaaatgggcctcatgagtctgacaacgaacttgtatgagggtcatattgaaaaggatgcccgggaattcctggacaagcaggtatgcgggaccccagaatacattgcgcctgaggtgatcctgcgccagggctatgggaagccagtggactggtgggccatgggcattatcctgtatgagttcctggtgggctgcgtccctttttttggagatactccggaggagctctttgggcaggtgatcagtgatgagattgtgtggcctgagggtgatgaggcactgcccccagacgcccaggacctcacctccaaactgctccaccagaaccctctggagagacttggcacaggcagtgcctatgaggtgaagcagcacccattctttactggtctggactggacaggacttctccgccagaaggctgaatttattcctcagttggagtcagaggatgatactagctattttgacacccgctcagagcgataccaccacatggactcggaggatgaggaagaagtgagtgaggatggctgccttgagatccgccagttctcttcctgctctccaaggttcaacaaggtgtacagcagcatggagcggctctcactgctcgaggagcgccggacaccacccccgaccaagcgcagcctgagtgaggagaaggaggaccattcagatggcctggcagggctcaaaggccgagaccggagctgggtgattggctcccctgagatattacggaagcggctgtcggtgtctgagtcgtcccacacagagagtgactcaagccctccaatgacagtgcgacgccgctgctcaggcctcctggatgcgcctcggttcccggagggccctgaggaggccagcagcaccctcaggaggcaaccacaggagggtatatgggtcctgacacccccatctggagagggggtatctgggcctgtcactgaacactcaggggagcagcggccaaagctggatgaggaagctgttggccggagcagtggttccagtccagctatggagacccgaggccgtgggacctcacagctggctgagggagccacagccaaggccatcagtgacctggctgtgcgtagggcccgccaccggctgctctctggggactcaacagagaagcgcactgctcgccctgtcaacaaagtgatcaagtccgcctcagccacagccctctcactcctcattccttcggaacaccacacctgctccccgttggccagccccatgtccccacattctcagtcgtccaacccatcatcccgggactcttctccaagcagggacttcttgccagcccttggcagcatgaggcctcccatcatcatccaccgagctggcaagaagtatggcttcaccctgcgggccattcgcgtctacatgggtgactccgatgtctacaccgtgcaccatatggtgtggcacgtggaggatggaggtccggccagtgaggcagggcttcgtcaaggtgacctcatcacccatgtcaatggggaacctgtgcatggcctggtgcacacggaggtggtggagctgatcctgaagagtggaaacaaggtggccatttcaacaactcccctggagaacacatccattaaagtggggccagctcggaagggcagctacaaggccaagatggcccgaaggagcaagaggagccgcggcaaggatgggcaagaaagcagaaaaaggagctccctgttccgcaagatcaccaagcaagcatccctgctccacaccagccgcagcctttcttcccttaaccgctccttgtcatcaggggagagtgggccaggctctcccacacacagccacagcctttccccccgatctcccactcaaggctaccgggtgacccccgatgctgtgcattcagtgggagggaattcatcacagagcagctcccccagctccagcatgcccagttccccagccggctctgggcacacacggcccagctccctccacggtctggcacccaagctccaacgccagtaccgctctccacggcgcaagtcagcaggcagcatcccactgtcaccactggcccacaccccttctcccccacccccaacagcttcacctcagcggtccccatcgcccctgtctggccatgtagcccaggcctttcccacaaagcttcacttgtcacctcccctgggcaggcaactctcacggcccaagagtgcggagccaccccgttcaccactactcaagagggtgcagtcggctgagaaactggcagcagcacttgccgcctctgagaagaagctagccacttctcgcaagcacagccttgacctgccccactctgaactaaagaaggaactgccgcccagggaagtgagccctctggaggtagttggagccaggagtgtgctgtctggcaagggggccctgccagggaagggggtgctgcagcctgctccctcacgggccctaggcaccctccggcaggaccgagccgaacgacgggagtcgctgcagaagcaagaagccattcgtgaggtggactcctcagaggacgacaccgaggaagggcctgagaacagccagggtgcacaggagctgagcttggcacctcacccagaagtgagccagagtgtggcccctaaaggagcaggagagagtggggaagaggatcctttcccgtccagagaccctaggagcctgggcccaatggtcccaagcctattgacagggatcacactggggcctcccagaatggaaagtcccagtggtccccacaggaggctcgggagcccacaagccattgaggaggctgccagctcctcctcagcaggccccaacctaggtcagtctggagccacagaccccatccctcctgaaggttgctggaaggcccagcacctccacacccaggcactaacagcactttctcccagcacttcgggactcacccccaccagcagttgctctcctcccagctccacctctgggaagctgagcatgtggtcctggaaatcccttattgagggcccagacagggcatccccaagcagaaaggcaaccatggcaggtgggctagccaacctccaggatttggaaaacacaactccagcccagcctaagaacctgtctcccagggagcaggggaagacacagccacctagtgcccccagactggcccatccatcttatgaggatcccagccagggctggctatgggagtctgagtgtgcacaagcagtgaaagaggatccagccctgagcatcacccaagtgcctgatgcctcaggtgacagaaggcaggacgttccatgccgaggctgccccctcacccagaagtctgagcccagcctcaggaggggccaagaaccagggggccatcaaaagcatcgggatttggcattggttccagatgagcttttaaagcaaacatagcagttgtttgccatttcttgcactcagacctgtgtaatatatgctcctggaaaccatc

SEQ ID NO: 26519 - DNA, 2606 bp, Homo sapiens
  Clone ID: LIB4219-095-F2_FLI
gtggtttcccgccctgacggccacagagagcgacgggacgccactcatggagcagtacgtgccctgcccggtctgcgagacagcctgggcccagcacacggaccccagtgagaaatcagaggatgtgcagtacttcgacatggaagactgtgtcctgacggccatcgagcgggacttcatctcctgccccagacacccggacctccccgtgccgctgcaggagctggtccctgaactgttcatgaccgacttcccggccaggctcttcctggagaacagcaagctggagcacagcgaggacgagggcagcgtcctgggccagggcggcagtggcaccgtcatctaccgggcccggtaccagggccagcctgtggccgtcaagcgcttccacatcaaaaaattcaagaactttgctaacgtaccggcagacaccatgctgaggcacctgcgggccaccgatgccatgaagaacttctccgagttccggcaggaggccagcatgctgcacgcgctgcagcacccctgcatcgtggcgctcatcggcatcagcatccacccgctctgcttcgccctggagctcgcgccgctcagcagcctcaacaccgtgctgtccgagaacgccagagattcttcctttatacccctgggacacatgctcacccaaaaaatagcctaccagatcgcctcgggcctggcctacctgcacaagaaaaacatcatcttctgtgacctgaagtcggacaacattctggtgtggtcccttgacgtcaaggagcacatcaacatcaagctatctgactacgggatttcgaggcagtcattccatgagggcgccctaggcgtggagggcactcctggctaccaggccccagagatcaggcctcgcattgtatatgatgagaaggtagatatgttctcctatggaatggtgctctacgagttgctgtcaggacagcgccctgcactgggccaccaccagctccagattgccaagaagctgtccaagggcatccgcccggttctggggcagccggaggaagtgcagttccggcgactgcaggcgctcatgatggagtgctgggacactaagccagagaagcgaccactggccctgtcggtggtgagccagatgaaggacccgacttttgccaccttcatgtatgaactgtgctgtgggaagcagacagccttcttctcatcccagggccaggagtacactgtggtgttttgggatggaaaagaggagtccaggaactacacggtggtgaacacagagaagggcctcatggaggtgcagaggatgtgctgccctgggatgaaggtgagctgccagctccaggtccagagatccctgtggacagccaccgaggaccagaaaatctacatctacaccctcaagggcatgtgccccttaaacacaccccaacaggccttggatactccagctgtcgtcacctgcttcttggccgtgcctgttattaaaaaggtgaggtcggggcaaaggcaggtatgcaggtctctgatgcacttccacgcctaggaggcgtctcctagctatgtcagggtggcgcctgcagagccacacctaggaccacctggcctaggacgtagacttagagacggtgggaggaaagatatcagacctggtccgtcattagtgccttccggtttgcaaaaacctaagtcaagtccccagccagactgcaggccgaatgaaaaaccccctttcacatgcaaatgccctgactcaggtggaaggactgttggtacaaatggcacggtgagcagtcatgcgtgtgcccttcccctatccggagcctcttccccacctgcccaggccagagccacctcacagccacttgatcaccaggtcctggaggtcctgatctccctccctccatctctgcctcccgccaagtactcgccgtcttacaccagacgcagtttctctttgtgcagcatagccctgcagactcagctctttaacctcctagccctggcctttctaaatgagaccccaaggggcactctccccattaaaggcccagccagctgtgctgcaccttgggattagccccagcctctatgaggctggcctccagtccctgctgggcccggcaccctccccacaaagcaccccactctgtgctgggcccttgacatcccagcctcctccaggaacagcccctccacgcacctcttcccagacggcctccgattcagttctcaagacccggggccttgtcccctcctttgagaagctgcccctcagtggggggcagctccctggcttttccgggctcctccgcccacaggattcaggcacggctcagccagctctggtttcatccaccctgaggggcctgtctgtgcataggcgccctcactaaatgcacaagaagcctttactggtgttgctttgttaaaatgtgactgtcatcatccaattccagtttgcccatctacaaaacaggtataagaagagacagaaggcctagcatacccaaaggtctaggccggtgtgcttggtaaatgagtattattattacttctggatggtcgcaaaatacatgaactcttctcttcacccttcttcagtttcattt

SEQ ID NO: 26520 - DNA, 5756 bp, Homo sapiens
  Clone ID: LIB4219-109-D6_FLI
gcggggccggccgaaggctggctgtaggcaggcggctgagccggcggcgggtggcctgcccaacgtgtgctgggtgggagaaggcgaggcggcagcgatgctgtctcttccgtgaggagcgcagaggaggtcgcggcgccggaggccccagaaggctcgaaggcgccgcgggctggggtcggtggcttagggagcccgtccggccatggtggccgcgggtggtggttggcgcggctgcgctgcggcccggggcagtgcggagccgggacagtcgcggcgctgacgcccgcgggccccagctgcagatatgaagcggagccgctgccgcgaccgaccgcagccgccgccgcccgaccgccgggaggatggagttcagcgggcagcggagctgtctcagtctttgccgccgcgccggcgagcgccgcccgggaggcagcggctggaggagcggacgggccccgcggggcccgagggcaaggagcaggatgtagtaactggagttagtcccctgctcttcaggaaactcagtaatcctgacatattttcatccactggaaaagttaaacttcagcgacaactgagtcaggatgattgtaagttatggagaggaaacctggccagctctctatcgggtaagcagctgctccctttgtccagcagtgtacatagcagtgtgggacaggtgacttggcagtcgtcaggagaagcatcaaacctggttcgaatgagaaaccagtcccttggacagtctgcaccttctcttactgctggcctgaaggagttgagccttccaagaagaggcagcttttgtcggacaagtaaccgcaagagcttgattgtgacctctagcacatcacctacactaccacggccacactcaccactccatggccacacaggtaacagtcctttggacagcccccggaatttctctccaaatgcacctgctcacttttcttttgttcctgcccgtaggactgatgggcggcgctggtctttggcctctttgccctcttcaggatatggaactaacactcctagctccactgtctcatcatcatgctcctcacaggaaaagctgcatcagttgcctttccagcctacagctgatgagctgcactttttgacgaagcatttcagcacagagagcgtaccagatgaggaaggacggcagtccccagccatgcggcctcgctcccggagcctcagtcccggacgatccccagtatcctttgacagtgaaataataatgatgaatcatgtttacaaagaaagattcccaaaggccaccgcacaaatggaagagcgactagcagagtttatttcctccaacactccagacagcgtgctgcccttggcagatggagccctgagctttattcatcatcaggtgattgagatggcccgagactgcctggataaatctcggagtggcctcattacatcacaatacttctacgaacttcaagagaatttggagaaacttttacaagatgctcatgagcgctcagagagctcagaagtggcttttgtgatgcagctggtgaaaaagctgatgattatcattgcccgcccagcacgtctcctggaatgcctggagtttgaccctgaagagttctaccaccttttagaagcagctgagggccacgccaaagagggacaagggattaaatgtgacattccccgctacatcgttagccagctgggcctcacccgggatcccctagaagaaatggcccagttgagcagctgtgacagtcctgacactccagagacagatgattctattgagggccatggggcatctctgccatctaaaaagacaccctctgaagaggacttcgagaccattaagctcatcagcaatggcgcctatggggctgtatttctggtgcggcacaagtccacccggcagcgctttgccatgaagaagatcaacaagcagaacctgatcctacggaaccagatccagcaggccttcgtggagcgtgacatactgactttcgctgagaacccctttgtggtcagcatgttctgctcctttgataccaagcgccacttgtgcatggtgatggagtacgttgaagggggagactgtgccactctgctgaagaatattggggccctgcctgtggacatggtgcgtctatactttgcggaaactgtgctggccctggagtacttacacaactatggcatcgtgcaccgtgacctcaagcctgacaacctcctaattacatccatggggcacatcaagctcacggactttggactgtccaaaatgggcctcatgagtctgacaacgaacttgtatgagggtcatattgaaaaggatgcccgggaattcctggacaagcaggtatgcgggaccccagaatacattgcgcctgaggtgatcctgcgccagggctatgggaagccagtggactggtgggccatgggcattatcctgtatgagttcctggtgggctgcgtccctttttttggagatactccggaggagctctttgggcaggtgatcagtgatgagattgtgtggcctgagggtgatgaggcactgcccccagacgcccaggacctcacctccaaactgctccaccagaaccctctggagagacttggcacaggcagtgcctatgaggtgaagcagcacccattctttactggtctggactggacaggacttctccgccagaaggctgaatttattcctcagttggagtcagaggatgatactagctattttgacacccgctcagagcgataccaccacatggactcggaggatgaggaagaagtgagtgaggatggctgccttgagatccgccagttctcttcctgctctccaaggttcaacaaggtgtacagcagcatggagcggctctcactgctcgaggagcgccggacaccacccccgaccaagcgcagcctgagtgaggagaaggaggaccattcagatggcctggcagggctcaaaggccgagaccggagctgggtgattggctcccctgagatattacggaagcggctgtcggtgtctgagtcgtcccacacagagagtgactcaagccctccaatgacagtgcgacgccgctgctcaggcctcctggatgcgcctcggttcccggagggccctgaggaggccagcagcaccctcaggaggcaaccacaggagggtatatgggtcctgacacccccatctggagagggggtatctgggcctgtcactgaacactcaggggagcagcggccaaagctggatgaggaagctgttggccggagcagtggttccagtccagctatggagacccgaggccgtgggacctcacagctggctgagggagccacagccaaggccatcagtgacctggctgtgcgtagggcccgccaccggctgctctctggggactcaacagagaagcgcactgctcgccctgtcaacaaagtgatcaagtccgcctcagccacagccctctcactcctcattccttcggaacaccacacctgctccccgttggccagccccatgtccccacattctcagtcgtccaacccatcatcccgggactcttctccaagcagggacttcttgccagcccttggcagcatgaggcctcccatcatcatccaccgagctggcaagaagtatggcttcaccctgcgggccattcgcgtctacatgggtgactccgatgtctacaccgtgcaccatatggtgtggcacgtggaggatggaggtccggccagtgaggcagggcttcgtcaaggtgacctcatcacccatgtcaatggggaacctgtgcatggcctggtgcacacggaggtggtggagctgatcctgaagagtggaaacaaggtggccatttcaacaactcccctggagaacacatccattaaagtggggccagctcggaagggcagctacaaggccaagatggcccgaaggagcaagaggagccgcggcaaggatgggcaagaaagaaaaaggagctccctgttccgcaagatcaccaagcaagcatccctgctccacaccagccgcagcctttcttcccttaaccgctccttgtcatcaggggagagtgggccaggctctcccacacacagccacagcctttccccccgatctcccactcaaggctaccgggtgacccccgatgctgtgcattcagtgggagggaattcatcacagagcagctcccccagctccagcgtgcccagttccccagccggctctgggcacacacggcccagctccctccacggtctggcacccaagctccaacgccagtaccgctctccacggcgcaagtcagcaggcagcatcccactgtcaccactggcccacaccccttctcccccacccccaacagcttcacctcagcggtccccatcgcccctgtctggccatgtagcccaggcctttcccacaaagcttcacttgtcacctcccctgggcaggcaactctcacggcccaagagtgcggagccaccccgttcaccactactcaagagggtgcagtcggctgagaaactggcagcagcacttgccgcctctgagaagaagctagccacttctcgcaagcacagccttgacctgccccactctgaactaaagaaggaactgccgcccagggaagtgagccctctggaggtagttggagccaggagtgtgctgtctggcaagggggccctgccagggaagggggtgctgcagcctgctccctcacgggccctaggcaccctccggcaggaccgagccgaacgacgggagtcgctgcagaagcaagaagccattcgtgaggtggactcctcagaggacgacaccgaggaagggcctgagaacagccagggtgcacaggagctgagcttggcacctcacccagaagtgagccagagtgtggcccctaaaggagcaggagagagtggggaagaggatcctttcccgtccagagaccctaggagcctgggcccaatggtcccaagcctattgacagggatcacactggggcctcccagaatggaaagtcccagtggtccccacaggaggctcgggagcccacaagccattgaggaggctgccagctcctcctcagcaggccccaacctaggtcagtctggagccacagaccccatccctcctgaaggttgctggaaggcccagcacctccacacccaggcactaacagcactttctcccagcacttcgggactcacccccaccagcagttgctctcctcccagctccacctctgggaagctgagcatgtggtcctggaaatcccttattgagggcccagacagggcatccccaagcagaaaggcaaccatggcaggtgggctagccaacctccaggatttggaaaacacaactccagcccagcctaagaacctgtctcccagggagcaggggaagacacagccacctagtgcccccagactggcccatccatcttatgaggatcccagccagggctggctatgggagtctgagtgtgcacaagcagtgaaagaggatccagccctgagcatcacccaagtgcctgatgcctcaggtgacagaaggcaggacgttccatgccgaggctgccccctcacccagaagtctgagcccagcctcaggaggggccaagaaccagggggccatcaaaagcatcgggatttggcattggttccagatgagcttttaaagcaaacatagcagttgtttgccatttcttgcactcagacctgtgtaatatatgctcctggaaacc

SEQ ID NO: 26521 - DNA, 1684 bp, Glycine max
  Clone ID: LIB4280-029-F1_FLI
cccaattggggggagtgcagcgccctcgctaaagttgctgtgaatttgtctgaatggactgatcttggtgccgggcttgattgtggagcgcagccttgcgctttgggtgataatctgcctcacccgtatggacacttttatgtgatttctggattttatgttgtgtataggtttttcaacttgacttctgaggccacgcttgatgatgtgctggcaaagggtaagggtttttgtgagaagaggtgggatgttgcaaagagaagtgttgctccgcagccctttattgagcagtactgcttcagggcaccctatattgcctctctgctgagggagggtttgcacattaatgataaccagataactgttggctctggaaatatcacttggacgcttggtgttgccttgttggaagctggaaaggcgttttccactagatttgggcttcgtgacttggagtttttccagatgaagataaatcctcttgttcttgtgcccattttgttgctttcttttattctacttctttgtgctttatcatgtgttggcaattggatgccaaggtttttccggaggcaatatcttcccatttccaggcataacagtgttactggtgcttctgttcttaacataccatctccttttcggttccagcgatggagtccaatgtactctggggatggaagactaaagatgcctctgagcccaaaaattgcaagttcacaacaaagccaatttggtctagggcatagtcttgatgacaacagtggtggcatcgagcttatggagtcttcattgtacccatcagctaataatgtctctcatagttattcctcaaacaatttagggcagatgcagtttgacagtggcaacatgggtgctttctggtccccacatagaagtcagatgcgtctgcagagtaggagatcacagtctcgagaagacctgaattcctcattggctgaagttcatctgatgaagccgtgaaggttttcatgattggttgtgagttgttggccaataaaattgcagtgcccaagatgaattttttcatggcattgagtctaaacatcttgccattgtactgtcatcagtaatgatgcttctactagctaaaggggtatctcagtctttctaatgtttttttgtccaccctcaaactgaaacttctgaaagatatatatctgtcctagcatttcagatatttttgtcatggagatactgtagctaaaggtgaagccagatcaattgattccaaatgaatttgcatctcctggagatcacttctaaactggattgctccaccagttgcatagcacaaacaagcactcttaatcttggtatcggctcatctgaattactctccatagtgtcttcttgatgtctccatgttctgcctcagcggtttagtttttctggtgccactaagccttcagaagttaagtcgagcatcaaagactaacaagcacaacaaaggatttgcttcataacattgagactgttcttataccattctttagaaaagatgcttcattaactacattactacagagaatgccttattgtttcataggtgactcatgatgagttggaaaatcaattagaaaagatgaacatcacggagaagttgtaacatagcacaatccctcaccctcttatacgttaaaaaagctactgaattgacttc

SEQ ID NO: 26522 - DNA, 169 bp, Zea mays
  Clone ID: LIB4300-011-C10_FLI
gcagggatcgcacatattattgagaccaactagcaacatagaaagcacaatagtgtaccaacaatggcagctaaaatattttgcctccttatgctccttggtctttctgcaagtgctgctacggcgaccattttcccacaatgctcacaagctcctatagcttcccttc

SEQ ID NO: 26523 - DNA, 937 bp, Zea mays
  Clone ID: LIB4300-015-D9_FLI
gcggggatcgcacatattattgagaccaactagcagcatagaaagcacaatagtgtaccaacaatggcagccaaaatattttgcctccttatgctccttggtctttctgcaagtgctgctacggcgaccattttcccgcaatacccgcaagctcctatagcttcccttcttcccccgtacctctcaccagcggtgtcttcggtatgtgaaaacccaattcttcaaccctacaggatccaacaggcaatcgcagctggcaccttacctttatcacccttgttcctccaacaatcatcagccctattacaacagttacctttggtgcatttattggcacaaaacatcagggcacaacaactacaacaacttgtgctagcaaaccttgctgcctactctcagcaacagcagtttcttccattcaaccaactaggttcattgaactctgcttcttatttgcaacaacaacaactaccattcagccagctacctgctgcctacccccagcaatttcttccattcaaccaactagcagcattgaactctcctgcttatttacagcagcaacaactactaccattcagccagctacctgctgcctacccccagcaatttcttccattcaaccaactggcagcattgaactctcctgcttatttacagcagcaacaactactaccattcagccagctagctggtgtgagccctgctaccttcttgatacaaccacagttgttgccgttctaccagcacgctgcgcctaacgctggcaccctcttacaactgcaacaattgctgccattcaaccaacttgctttgacaaacccagcagcgttctaccaacaacccatcattggtggtgccctcttttagatttcttatgagttatagttcaataataaagttttttgtctgatgtttgtggcttcccagaaataag

SEQ ID NO: 26524 - DNA, 651 bp, Zea mays
  Clone ID: LIB4301-013-H2_FLI
gcggggatcgcacatattattgagaccaactagcaacatagaaagcacaatagtgtaccaataatggcagccaaaatattttgcctcattatgctccttggtctttctgcaagtgctgctacggcgagcattttcccgcaatgctcacaagctcctatagcttcccttcttcccccatacctctcaccagcgatgtcttcagtatgtgaaaatccaattcttctaccctacaggatccaacaggcaatcgcagcaggcatcttacctttatcacccttgttcctccaacaatcatcagccctattacagcagttacctttggtgcatttaccggcacaaaacatcagggcacaacaactacaacaactcgtgctagcaaaccttgctgcctactctcagcaacagcagttacctttggtgcatttgttggcacaaaacatcagggcacaacaactacaacaactcgtgctagcaaaccttgctgcctactctcagcaacaacagtttctgccattcaaccaactagctgcattgaactctgctgcttatttgcagcaacaacaactactaccattcagccagctagctgctgcctacccccggcaatttcttccattcaaccaactggcagcattgaactctcatgcttat

SEQ ID NO: 26525 - DNA, 326 bp, Zea mays
  Clone ID: LIB4302-002-C6_FLI
gcgggaccacaccaccttcctctcctcgctctccctattctggacggccgactcgcttctgtgagctaccggccttagatccagccatgagggagattctccacatccagggcggccagtgcggcaaccagatcggttcaaaattctgggaggtcgtctgcgacgagcatggtatcgatcccaccggacgctatgtcggcacctccgacctccagctcgagcgcgtcaatgtctactacaacgaggtctcatgcggccgcttcgtgccgcgcgctgtgctcatggacctcgagcctggcaccatggacagcgtccgcaccgggccg

SEQ ID NO: 26526 - DNA, 711 bp, Zea mays
  Clone ID: LIB4302-003-B4_FLI
tctggaactcctgctctgaagggagattttgttcggtacgggaagcgaactactcagggaattctaaacgatttgaggaatgcacttgctagatactacttgaataacttcgttgatgggactaagcaggatgccatggatcttcttcaaggacataacatgacatctgttagtcgagacatggcagtgccaagcaaatcaggacttctggagagttatgcgtccttccgccttgcttttgcattggttatgggagctctagtgttcatgatgatgccactaagacaagcccggaatgatgctcgccatttgatgctgtcatttctttgggccggtctttgtattggcatctcacattttgtcagagccaacggccgcacgttcactaaccgacctaggtttcacaagtcacgccattgatggatgcaagatgaccgtttgctcgtcaagcgacgtcatagattgtcatcattcatcgaacttgttgacacaaattggtttgcatgaagtgttgcattttttttggcatggtacttgccctttgtaataagttttcttccatttcgtaactagtttttgtttcttcctctcctatgtctggtccatactgttctggccttctatggtcttcggtagaattcattggtaaaaaccatatgaagtgtattatgattttttcgtattgcatactcagtcctcggcatttgcacc

SEQ ID NO: 26527 - DNA, 589 bp, Zea mays
  Clone ID: LIB4302-005-A4_FLI
tcgcctatctccgcgactcaaagcttcttccatttcctaccgccgccgctgcagctccaccccattccgtcgacaccatgagggagtgcatctcgatccacatcggccaagccggtatccaggtcggaaacgcgtgctgggagctttactacctcgagcatggcattcaggctgatggtcagatgcccggtgacaagaccattgggggaggtgatgatgctttcaacaccttcttcagtgagactggcgctgggaagcacgtcccccgtgctgtttttgttgaccttgagcccactgtcatcgatgaggtgaggactggcacctatcgccagctcttccatcctgagcagctcatcagtggcaaggaggatgcagccaacaacttcgctcgtggtcactacaccattggcaaggagattgttgacctgtgccttgaccgcatcaggaagcttgcagataattgcactggtctccagggcttcctcgtcttcaacgctgttggtggaggaacgggctctgggcttggttctctcctcctggagcgcctgtctgttgactatggcaagaagtccaagctcggtttcaccgt

SEQ ID NO: 26528 - DNA, 588 bp, Zea mays
  Clone ID: LIB4302-007-G6_FLI
tcgcctatctccgcgactcaaagcttcttccatttcctaccgccgccgcagctccaccccattccgtcgacaccatgagggagtgcatctcgatccacatcggccaagccggtatccaggtcggaaacgcgtgctgggagctttactgcctcgagcatggcattcaggctgatggtcagatgcccggtgacaagaccattgggggtggtgatgatgctttcaacaccttcttcagtgagactggtgctgggaagcacgtccctcgtgctgtttttgttgaccttgaaccaactgtcatcgatgaggtgaggactggcacctaccgccagctcttccaccctgagcagcttatcggtggcaaggaggatgcagccaacaacttcgcccgtggtcactacaccattggcaaggagattgttgacctgtgccttgatcgcatcaggaagcttgccgacaactgcactggtctccagggcttcctcgtcttcaacgctgttggtggaggaacaggctctggccttggttccctcctcctggagcgtctgtctgttgactacggcaagaagtctaagcttggtttcactgtgt

SEQ ID NO: 26529 - DNA, 404 bp, Zea mays
  Clone ID: LIB4302-011-C1_FLI
cgcccgggcaggtacgcggggagacaccagacgcagtcggctgccgcagactggtagtagccggcgcgccgtcaccgtatcctcagatcagcggcgagcagataccacaccactctactgacgcccgacgagcagtgtaacattttccttcagccatgggtaaggagaagactcacatcaacattgtggtcattggccatgtcgactctggcaagtcgaccaccactggccacctgatctacaagcttggaggtattgacaagcgagtgattgagaggttcgagaaagaggctgccgagatgaacaagcggtcattcaagtatgcgtgggtgcttgacaagctcaaggctgagcgtgagagaggtattacaattgatattgccctgtggaagttcgagaccacc

SEQ ID NO: 26530 - DNA, 589 bp, Zea mays
  Clone ID: LIB4302-014-G8_FLI
tcgcctatctccgcgactcaaagcttcttccatttcctaccgccgccgctgcagctccaccccattccgtcgacaccatgagggagtgcatctcgatccacatcggccaagccggtatccaggtcggaaacgcgtgctgggagctttactgcctcgagcatggcattcaggctgatggtcagatgcccggtgacaagaccattgggggtggtgatgatgctttcaacaccttcttcagtgagaccggtgctgggaagcacgtccctcgtgctgtttttgttgaccttgaaccaactgtcatcgatgaggtgaggactggcacctaccgccagctcttccaccctgagcagcttatcagtggcaaggaggatgcagccaacaacttcgcccgtggtcactacaccattggcaaggagattgttgacctgtgccttgatcgcatcaggaagcttgccgacaactgcactggtctccagggcttcctcgtcttcaacgctgttggtggaggaacaggctctggccttggttccctcctcctggagcgtctgtctgttgactacggcaagaagtctaagcttggtttcactgt

SEQ ID NO: 26531 - DNA, 273 bp, Zea mays
  Clone ID: LIB4302-016-D8_FLI
gacaccgtgcacggccaatggaagcacagcgacatcaccctcaaggactccaagacgcttctcttcggcgagaagccggtcaccgtctttggcatcaggaaccccgaggagatcccgtggggtgaggctggtgctgagtatgtcgtggagtccaccggtgtcttcactgacaaggacaaggctgctgcacatctgaagggtggtgccaagaaggttgttatctctgccccaagcaaagatgcacccatgtttgttgttggtgtcaatgaggac

SEQ ID NO: 26532 - DNA, 589 bp, Zea mays
  Clone ID: LIB4302-016-G3_FLI
tcgcctatctccgcgactcaaagcttcttccatttcctaccgccgccgctgcagctccaccccattccgtcgacaccatgagggagtgcatctcgatccacatcggccaagccggtatccaggtcggaaacgcgtgctgggagctttactgcctcgagcatggcattcaggctgatggtcagatgcccggtgacaagaccattgggggtggtgatgatgctttcaacaccttcttcagtgagactggtgctgggaaacacgtcccccatgctgtttttgttgaccttgagcccactgtcatcgatgaggtgaggactggcacctatcgccagctcttccatcctgagcagctcatcagtggcaaggaggatgcagccaacaacttcgctcgtggtcactacaccattggcaaggagattgttgacctgtgccttgaccgcatcaggaagcttgcagataattgcactggtctccagggcttcctcgtcttcaacgccgttggtggaggaacgggctctgggcttggttctctcctcctggagcgcctgtctgttgactatggcaagaagtccaagctcggtttcactgt

SEQ ID NO: 26533 - DNA, 1019 bp, Zea mays
  Clone ID: LIB4302-017-H12_FLI
gcgggggcactagcagagctaaaacccttgcggcggctacctttccctcaccccctttctcgcctcgcggcggctacctttccccccttctcgcctctcgcctcgcggccgccgcaggcgaccccttgtcgcctcgtgctgtccaccgccgaatcttccccaggttagggagggtatctgttgtttcagctcagttttaccgggggactggttgtgggcggagatgttggtgctctttgagacccccgcgggcttcgccctattcaaggtgctcgacgagggtaagctcgacaaggtcgaggatctatggaaggagttcacgacgtcggactcagcaagaaaggtggttgagctgaaggctttcaataagtttgagaacacatctgatgctctatccgcggcaacccttattattgatagcaagcctagcaagggtctgcgcaagttcttacagaaacattgtgagggtgaaacattagcggttgctgattctaggctaggaaatgctataaaagaaaagctgaaaattgactgccttcacaatagtgctgtgatggagctgatgagagggctgagaaatcagctcactgagcttataactgggttgggtgctcaagaccttggcccaatgagcttgggattgtcccacagcctgtctaggtataagctgaagttcagtcccgagaaggttgataccatgatcattcaagccattggattattggatgatcttgacaaggagcttaacacttatgccatgagagttcgtgaatggtatggctggcactttccagagctcaccaaaatagttacagataatatacagtatgccaaagttgtgaagatgatgggaaacagaaccaatgcagtcaatcttgacttctctgagatattatcagatgaagagctagaaacacagctaaaggaggcagcagtgatatctatgggaacagaagttagtgacctcgacttgtcaaatataagagagctatgcgatcaagtgctggcactttctgagt

SEQ ID NO: 26534 - DNA, 589 bp, Zea mays; identical to SEQ ID NO: 26532
  Clone ID: LIB4302-018-G6_FLI

SEQ ID NO: 26535 - DNA, 651 bp, Zea mays
  Clone ID: LIB4303-001-C10_FLI
gcggggacctcagcactagtctcctcttcgcacgagcgcaacaccatccacccaccagttcgaagcggaggcgaccggcaacctgcggcgcgaagcgtcaccggaaggtgctgcgcgacaacatccaggggatcacgaagccggcgatccggaggctggcgaggaggggtggcgtgaagcgcatctccgggctgatctacgaggagacccgcggcgtgctcaagatctttctcgagaatgtcatccgcgacgctgtgacctacacggagcacgcccgtcgcaaaaccgtcaccgctatggacgtcgtgtacgccctcaaacgccagggccgcactctctatggcttcggcggctaggttaggtgtgggtaattgcctgtccaggtgtctcggatctgtggtactagtttggctgccttcctgtgttcgtattgtagtagttgtggtagctggttgctttgtcgtcctgtagtcgtgcttctttgggtctgtgagaaccgctggttcgatgggattggattggacggtgaagtaggaatgttggcatgttagacttttctccaacgtagcgttgcctctaatttgatctctcaatttattttcaattggggtgcactgtaattcttcctgtctaattcaaatcccctttctg

SEQ ID NO: 26536 - DNA, 591 bp, Zea mays
  Clone ID: LIB4303-009-G8_FLI
actcgcctatctccgcgactcaaagcttcttccatttcctaccgccgccgctgcagctccaccccattccgtcgacaccatgagggagtgcatctcgatccacatcggccaagccggtatccaggtcggaaacgcgtgctgggagctttactgcctcgagcatggcattcaggctgatggtcagatgcccggtgacaagaccattgggggtggtgatgatgctttcaacaccttcttcagtgagactggtgctgggaagcacgtccctcgtgctgtttttgttgaccttgaaccaactgtcatcgatgaggtgaggactggcacctaccgccagctcttccaccctgagcagcttatcagtggcaaggaggatgcagccaacaacttcgcccgtggtcactacaccattggcaaggagattgtagacctgtgccttgatcgcatcaggaagcttgccgacaactgcactggtctccagggcttcctcgtcttcaacgctgtgggtggaggaacaggctctggccttggttccctcctcctggagcgtctgtctgttgactacggcaagaagtctaagcttggtttcactgt

SEQ ID NO: 26537 - DNA, 1170 bp, Oryza sativa
  Clone ID: LIB4309-004-E3_FLI
gcagctaattaagtgggtgggttcgcttgcttgctttgcttttgcttggagacgggagcgacgctggcttcagcgattggcgtggagaagctagattgttggtgcgactttccgaccgcgaaaatagtagggctggcaaaccggtggccggccggcgatccggccgaggggatggggagcatcgacggccactcgctgcagcagcatcaggggtactcccacggcggcggcgcgggagggagcaacgaggaggaggaggcgtcgccgccgcccggcggtggctcggctacggggtcggcgggccgccggccgagggggaggccgccgggctccaagaacaagccgaagccgcccgtcgtggtgacgcgggagagccccaacgcgatgcgttcccacgtgctggagatcgccagcggcgccgacatcgtcgaggccatcgcgggcttctcccgccgcaggcagcgcggcgtctccgtgctcagcgggagcggcgccgtcaccaacgtcacgctccggcagcccgcggggactggggccgccgccgtcgcgctgcgggggaggttcgagatattgtccatgtctggcgccttcctcccggcgccggcgccgccaggggccacggggctcgccgtgtacctcgccggcgggcaggggcaggtggtgggtgggagcgtcatgggggagctgatcgcgtcgggccccgtcatggtgatcgcggccacgttcggcaacgccacgtacgagaggctgccgctggaccaggaaggcgaggagggcgccgtgctgtccgggtcggagggcgccgccgcgcagatggagcagcagagcagcggaggcgccgtcgtgcccccgccgatgtacgccgccgtccagcagacgccgccgcacgacatgttcgggcagtgggggcatgcagcggtggctcggccgccgccgacatcgttctagcactggcaccggttaatcaatgtctctctacctagctagttagccttccacttctttccctagttgtttgagtaggttaattaatcatttaccatgttaattaatgtgctatgtaatgcataagtactcgtgtgatcttatcgttccattttcttcagagtttgaagaatgtaaaattactgtgcgtatcaagatcggcagtggttgctcacttgctccttc

SEQ ID NO: 26538 - DNA, 2138 bp, Oryza sativa
  Clone ID: LIB4309-009-E6_FLI
cgaggagccacgccgccgccgccgccgccgccatgccgaagcactaccggcctgcgggcaagaagaaggaggggaacgcggcgaagtacatcaccaggaccaaggcggtgaagtacctgcagattagcctcgcaaccttcaggaagctatgcattctcaagggcgtctttccccgggatccaaagaagaaggtggaagggaaccacaagacctactaccacatgaaggatattgccttcctggcccatgatcccttgattgagaagtttagagaaatcaaggtccacaggaagaaggtcaaaaaggcgtttgctaagaaaaataaagatcttgcagacagattattgaaccgaccaccaacttacaaacttgacaggcttattcttgaaagatatccaacttttgttgatgctcttcgtgacttggatgattgcctaacaatggtgcatctttttgctgcgttgcctgctgttgaaggtgaacgtgtgcaagttcagcggattcataattgccgcaggttgagccatgaatggcaagcatatatatctcgaactcattccctgcgaaagacatttatatccgtcaagggcatatattatcaagctgaagttcaaggtcaaaagatcacctggctaactccacatgctcttcagcaagttttaactgatgacgttgacttcaatgtgatgcttacctttttggaattctatgagacacttctgggatttataaacttcaagctttaccattcgataaatgtaaattatcctcctgttctggatcctcgtttggaagctttagcttctgagctctatgcgttgtgccggtacatgtcttctggaagagtacctggaaattcagaacctgctggactaattgaagacaaagagggtgaagacaataaagagagctcaaaaacagatgagtctgaactcagattggcacaacttcaacaccagctcccaactaatgaacctggagcgctgatgcatcttgtacaagaatctactgctgctgatgcagacgacgctgatgccaaagaatgcaggagtttattcaaaaacctgaagttctacctaagtcgtgaggtgcctagggaatctctcttatttatcattccagcatttggtggtaccgtttcatgggaaggagaaggagctccttttgatgagacagatgaagacatcactcatcagattgttgatagaccgacccaaagccacgttttcctctctagggagtatgttcaaccacagtggatatatgattgcgtgaatgctcgcatcatattgccgacagaaggttatattgtcgggagggtgcctccaccacatttatctccctttgtggacaatgatgcagagggttacattcctgagtatgcagagaccattaagaggctgcaagctgctgctcaaagccaggtgttgcctctgccaagtttaggggacgaagatatggaaaattcactggtagaggcaattattgatcgatcagagtctaatgaaattgctgacaagaagaggaagttggagatgctagagaagcagtaccacgatgagctgaggatggaatacgaaggaaagaccttctcaaataggacggcagataaccaaccagatgttgtggacaaaagtgatactaaagaagctgacgatcatatggaggactctcataaacaagccgagaaggatgctgctgacatttccaagacccttatgtctcgcaagcagagaggccttcttcaagcaattgagattaaccaggaaaggaaaaaggacaaggtgaacttgctgaagaaaaggaaaaagaatgctgattccagtgcttcggccaaaggtcgctgaggctcgaacttcatttgctccatgctgtatctgttttgacaaattgttcatcggtcgctgcttctgtggagttgctgccatgatctgcacacctacgtattcttatgcatgataagcagctccattttgatgtttaggtgttttacatgggctttaagaatatgcccagatacctcagtagaaaattttgagctatttacctagtgtccaaagtgtgttccctgatgattagtagctattactcttccaaattttgacgcggttgctgctcaagtgctcatctagctacat

SEQ ID NO: 26539 - DNA, 1461 bp, Oryza sativa
  Clone ID: LIB4309-011-G12_FLI
catgtcttcctcctctccgttctccgtgtctccccgccccatccgccgctagccccgcctaccctcgcctcgcctcctccgccgcctccgcctccgcccccgcccgcctccgctcccgcattaccctccccggtggcagatctcccgtccccccaatggacccggccgcctccgccgcggagtcgtcgtcgctgtcgtcgcgcgacgtcgccgcgatgccggactcgccgccgcggcgggcggcgaggcaccggcgcgcgcagtcggagatcctcctcggggcggcgctcccggacgacatcgccttcgacgccgacctcggcgtggtcggggaggtcggcggcggcggcggggacgactacgaggaggaggaggaggatgacgaggaggaggagatggagggggcgggcggcagccggatgttcgagatgttcctcgaggccgggggcaagctcgagaccccggagcccgcggcgccgctgccgccgccgcccgctcggccgcgtcaccagcacagcatgtcgatggacgggtccacgtccctggcgtcgtccgccgcgggtgtggcggggaggatgggcgcggacgctaagaaggccatctctgacgccaagctcgcggagctcgccctcgttgaccccaagcgcgccaagaggatcttggcaaaccgccagtcagctgctaggtcaaaagaaagaaagatgcgctacattgcagagcttgagagaaaagtacagactctccagacagaagcaactacactatcagcacagttgtccatgttacagagagataccactggtttaacaagtgaaaatagtgatttgaaaatacgggtgcaaacaatggagcaacaagtcaggctgcaggatgcactaaatgacaggctaagagatgagattcagcagctaaaggttgcaacaggtcaggttaatgccaactgcggcaaagtgggaaactttggcctctcctcatttggaggcgccaatccacaaggttaccagcgcagtcacatacaatctcttctggcagcccagcagctgcagcagctacagatccactcccagcaccagcagcaacagatgcatctgcagcagcatcatcatcttagcacggtccaacagcagcttctgcaggaggggttgcccttgccaggggatctgaagatgaaaggaattgtggcggcatcccatgcacagaacgccggcgcatctgaaagccacgctctgaggagtgagccgtgagttggcataggctcatggcggttgtcagtaataataacatgttgtatctgagtgactcatgcataggctagcgcagtatctaggtaaaatttcagactatctatgaagcacttagatgcctgcagcctgtagaatgtagatcccattcagttgtaagttgtagaactgatgaggcaaaactgagtaattcaccggtgccatggagtatgttcacgtc

SEQ ID NO: 26540 - DNA, 1461 bp, Oryza sativa; identical to SEQ ID NO: 26539
  Clone ID: LIB4309-011-H12_FLI

SEQ ID NO: 26541 - DNA, 1821 bp, Oryza sativa
  Clone ID: LIB4309-016-D5_FLI
ctccttcattggaggttagcccaagggtcagtgttgcttgagaggtactcaccctgtgcaggtgccagtggactcaggccatttagctagctagccaaagccaattgccatgtggagtgctctcttctcccatctgagagaggttcacaagagaagcggagttaaggaggagaagttgataatgaagtcgccaccagcagcaggtgaggccggctgccacaagccacaggcgactgccaccaacaagatgacggtgctgcagtccccgctggggctcaggaccatcctcacctccctcgtcgccttcttcatcgtcgtcagctccgtctccctcctcttcgaccgcggccaggatgctcaggcgcaactcgccgtcgagcagcatcagcaccaagaagttctgctcaagcagaagccggcatcagcagcagtgggcgagcagaaatcagtggtagtagatcagtcgtcgttgaggagccaggaggcgcaggtgcagtggacatctgagctgcaggacgtggccacggacagcggcgacggcggcttcgacggcgaggaggactgcaactggtcgttgggacggtgggtgtacgacaacgcgtcgcggccactctactccggcttgaagtgctccttcatcttcgacgaggtggcctgcgacaagtatggaaggaatgacaccaagtaccagcactggagatggcagcctcacggttgcaaccttccaagattcaatgccacaaagtttcttgaaaagcttaggaacaagagactggtttttgtgggcgattcagtaaacagaaatcaatgggtgtcgatggtgtgcatggtggagcacttcatccctgatggccgcaagatgcgcgtttacaacggctcccttatctccttcaaagcatttgagtacaatgcgacgatagatttctactggtcaccactgctattggaatcaaacagcgacaaccccataattcacagagtggagtaccggatcataagggcagacaggattgagaaacacgccaatgtctggaaggacgctgatttcatcgtcttcaactcctacctttggtggaggaagcagagggatggtatgatgatgaaagtcatgtatggttcatttgaggacggggatgcaaagttagatgaggtgcaaatggttgatggttatgagatagctctcaagaaactaactgaatatcttggagccaatatcaacaagaacaagactagaatcttctttgcaggctcatcacctgcccattcctgggctagcaactggggaggagatgacaacaacaagtgtctaaacgaaacagaaccaattcagatagaagattataggagtgcaaccacagactacggcatgatggacaaggcgaaggagatatttggaacactggaaccaaagggcatacatgttcagatactgaacatcacccagctttctgagtaccgcaaggacgcccatccaacgatattcaggagacagtacgttcctctgacgaaagagcagattgcaaacccgagcatctacgcagactgcacgcattggtgcctccctggagttcctgatgtttggaacgagttcttgtatgcatacattatgcacaaatgatatatgtataataatgtaatcttaatttggccaaatttcttctttgttaacttgtgggtgtctaagtaggtataagtgcacagtacttggcccccatcaatttttttttcttttttgacatttacatcattacattacatgtaaagagaaagggaagaacataagcgcagaaatgaaaaggaagaagataagttaatttgcct

SEQ ID NO: 26542 - DNA, 2413 bp, Oryza sativa
  Clone ID: LIB4309-017-F7_FLI
cgaacgcctctcgcgcgcgtgcttactggtgactggtccaagcagcaacgcaagcaatggcgtcgcacgcgaacgcctccggcggcggcggcgacgaggagatggtggaggcgagcacgctccgccaccggcacggcgccggcaaggatgccaacggcgtcggaactgagcggcagctggcggcggcggcggcggaaggggaggaggaggggccgtcgtcggtggagcgcgcgttcgtggacagggcggtgccgtcgtggcgggagcagctgacggtgcgcgcgttcgtggtgagcttcttcctctccatcatgttcagcatcatcgtgatgaagctgaacctcaccaccgggatcatcccgtcgctcaacgtctccgccggcctcctcggcttcttcttcgtccgcctgtggacggcggccatcgagcgggtggggctcctccggcagccgttcacgcgccaggagaacacggtcatccagacctgcgtcgtcgccgcctacggcatcgccttcagcggtgggtttggcacatacttgtttggtatgagtgaaacaattgctaagcaagcaacagaggctaataatgctcagaatgtcaagaaccctcacatcgggtggatgattggattcctcttcctcgtcagttttattgggctacttgctcttgtgcctctgagaaaaattatgattgtcgactacaaactgacctatccaagtggcacggcaacagcttatcttatcaatggcttccacaccccagagggtgcaaagcttgctaagaagcaagtaaaggaactggggaaattctttttgttcagcttcgtttggggcttctttcagtggttctatactgccggagatggttgtggattccagagcttccctacattaggccttcaagcctataaaaacaggttttactttgatttctcccctacctatgttggagtagggatgatttgcccccacattgtgaacgtatctgttctattgggaggcatcctctcatggggaatcatgtggcccctgataagaaacaagaaagggagttggtatgctgcctctctctcagaaactagtcttcatggactgcaaggctacagggtgttcatatccattgccttgattcttggagacggcctgtacaacttcgtgaaggtgctcatccgcacaaccgctggcttcgtcgtgatgatgaagaagaacagcacgcttccggtctccaacaatggcagcccgatggtggccactgaagccatctccttcgacgacgagcgccgcaccgagctcttcctcaaggaccagatccccaagacggtcgcgttcggggggtacgtcgccgtcgccgccgtatcgatcggcacgctcccgcagatcttcccgcagctcaagtggtactacatcctggtcgcctacgtcttcgcgcccgtgctggccttctgcaacgcctacggcgccgggctgacggactggtcgctcgcgtccacgtacggcaagctcgccatcttcatcttcggcgcgtgggccggcgcgtcgaacggcggcgtgctggtcgggctcgccgcctgcggggtgatgatgagcatcgtgtcgacggcgtccgacctgatgcaggacttcaagacggggtacctgacgctggcgtcgccgaggtccatgttcgtcagccaggtgatcggcacggcgatggggtgcgtcatcgcgccgtgcgtcttctggctcttctacaaggccttcgccgacatcggcgtgagcggcaccgagtacccggcgccgtacgccatcgtgtaccggaacatggccatcctcggcgtcgacggcttctcctcgctgcccaagcactgcctcacgctgtgctacatcttcttcgccgcggcgatcgccatcaacctggcaagggacctggcgccaagcaaggtggcgaggttcatcccgctgcccatggcgatggcgatcccgttctacatcggctcctacttcgccatcgacatgttcatcggcaccgtcatcctcttcgtgtgggagatggtgaacaaggccaaggcggaagcgttcgcgccggcggtcgcctccggcttgatctgcggcgacggcatctggacattgccgcagtccatccttgccctcgccaaggtgaagccgccgatctgcatgaagtttctgtcgcgatcggtgaatgcgcaagtggatggtttcctgggtaactagatgtgatcagcctgaaatcatcgccaatgtgaacaaccactctgtatcatctgtgtcatcatcctgcaatctcggtttcaaaaaaaaaaaatcatcctgcaatcaggatatcgtatgttctgttagggattgtactataatctgtctctgaacacctgtatatgttagtggagtgtgacaatcatccttgaatccttgattcc

SEQ ID NO: 26543 - DNA, 777 bp, Oryza sativa
  Clone ID: LIB4309-023-G4_FLI
cagcagcagcttgcacactcgagcttagcttagcttttgcaagagagatcgagctagagatggagaagtcgagcaagatgatggcggtggcggcggtgctggtgctcgcggtggtcggcgcggcggaggcgaggaacatcaaggcggcggcggcggcggcggcggagagcaaggacacggtggtgcagccgacgacgttcccgccgttcgaccgcttcgggagcgcggtgccggcgttcggcggcatgcccggcagcagcatcccggggttcagcctccccggcagcagcggctccacccccggcggcctcggcggcttcggcagcatgcccatgttcggcggcctcggcggcggctcacctggcctcggcggcggcatgcccggctcccccgccgccgccgacaagcaggccaagaagccatgagagacctcgccgtcgccggcggcgtcgccgctgctgcgcgggtaatgtgctctatgtagcgcacggcgttgcatgcaatatggatggctatatgacgcgcgcgcgttatatcttcatatgtgcagttagcttgcactgtgtctagctagcgttctattatgagtagtgtctcttctatctcttttctttacatgcatttggaggaggattattctatctgtttgttggttggttgtgtttgtttgttttaattaggtcccttcttatattttgtgttttaattaagttcgtgatcatgtagtagtactaccactgtttcgagctcgaggcatgaataatgctaaatgtgatc

SEQ ID NO: 26544 - DNA, 1270 bp, Oryza sativa
  Clone ID: LIB4309-027-A10_FLI
acccttccccgaatcactccaccgaaagcggcgctgctgaggaaggccgacgcggccacggccacgctctccgccgccgccaccgccaccgccaccgtctcgtcgctgcatagttcgccggcctcccgtctctctcgaatctagagacgcacgccgagctcagagacccgatcctgctaaggtttggttggtagctcgagcagccgacggcgacgacgcacacccagttcccggcgatgtcggcggctgccaccgctgggacctactctccggcttctgccgcgggggaaaagcgtcgggagaggaaggaggagctgcggcgccacctcgccgaggacgccgactggccccgcgccgacggccgctccttccacgactgccgtcctgcatttatgcaaacaggaccaacaaccgctgcatcaggatctgcttatgcagaatttgggaagacaaaggtcattgtgtcagtgtttggaccgagagaaagcaagaaagcaatgttgtacagtgatactggtagactcaattgcaatgtgagctacacaacatttgccactcctatacgtgggcagggaacagataacaaggagtactccgcaatgcttcataaagctctggaaggcgcagtgatgttgcacacttttccaaagaccactgttgatgtttttgccttggttcttgagtctggtggcagtgatcttcccatcattatttcttgtgctagtcttgcgttggctgatgctggaatcatgatgtatgaccttgttacatcagtatctgtgtcctgttttgggaagaacataatcattgatccaacctctgacgaggaagcatggcaagacggcagccttatggtggcgtacatgccagcccgcaaagagatcacgcagctaactcttactggagagtggtctgatggcaaaatcacgaacgcggtggagctctgcatggatgcctgcagtaagctctgtgacatacttcgggagcgcttgaaagatgcttccagcttggctgagtgaataaagttttagcagcaggatgttgcaagctcaaacagatatccttagctgtacaaattttgtaggcaagggaggctgatgcctgatgtttgcgggactacatgattatatgctgattgtttcctttgcaaaacagctaattgttcagagagaaagtagcattgtctgtatgttgttttgtactactcctgattgtaatactttatagatgaagccataaaagaatgcaaaattagcttattgtgggatct

SEQ ID NO: 26545 - DNA, 1681 bp, Oryza sativa
  Clone ID: LIB4309-030-D2_FLI
gaggttcacaagagaagcggagttaaggaggagaagttgataatgaagtcgccaccagcagcaggtgaggccggctgccacaagccacaggcgactgccaccaacaagatgacggtgctgcagtccccgctggggctcaggaccatcctcacctccctcgtcgccttcttcatcgtcgtcagctccgtctccctcctcttcgaccgcggccaggatgctcaggcgcaactcgccgtcgagcagcatcagcaccaagaagttctgctcaagcagaagccggcatcagcagcagtgggcgagcagaaatcagtggtagtagatcagtcgtcgttgaggagccaggaggcgcaggtgcagtggacatctgagctgcaggacgtggccacggacagcggcgacggcggcttcgacggcgaggaggactgcaactggtcgttgggacggtgggtgtacgacaacgcgtcgcggccactctactccggcttgaagtgctccttcatcttcgacgaggtggcctgcgacaagtatggaaggaatgacaccaagtaccagcactggagatggcagcctcacggttgcaaccttccaagattcaatgccacaaagtttcttgaaaagcttaggaacaagagactggtttttgtgggcgattcagtaaacagaaatcaatgggtgtcgatggtgtgcatggtggagcacttcatccctgatggccgcaagatgcgcgtttacaacggctcccttatctccttcaaagcatttgagtacaatgcgacgatagatttctactggtcaccactgctattggaatcaaacagcgacaaccccataattcacagagtggagtaccggatcataagggcagacaggattgagaaacacgccaatgtctggaaggacgctgatttcatcgtcttcaactcctacctttggtggaggaagcagagggatggtatgatgatgaaagtcatgtatggttcatttgaggacggggatgcaaagttagatgaggtgcaaatggttgatggttatgagatagctctcaagaaactaactgaatatcttggagccaatatcaacaagaacaagactagaatcttctttgcaggctcatcacctgcccattcctgggctagcaactggggaggagatgacaacaacaagtgtctaaacgaaacagaaccaattcagatagaagattataggagtgcaaccacagactacggcatgatggacaaggcgaaggagatatttggaacactggaaccaaagggcatacatgttcagatactgaacatcacccagctttctgagtaccgcaaggacgcccatccaacgatattcaggagacagtacgttcctctgacgaaagagcagattgcaaacccgagcatctacgcagactgcacgcattggtgcctccctggagttcctgatgtttggaacgagttcttgtatgcatacattatgcacaaatgatatatgtataataatgtaatcttaatttggccaaatttcttctttgttaacttgtgggtgtctaagtaggtataagtgcacagtacttggcccccatcaatttttttttcttttttgacatttacatcattacattacatgtaaagagaaagggaagaacataagcgcagaaatgaaaaggaagaagataagttaatttgcc

SEQ ID NO: 26546 - DNA, 1228 bp, Oryza sativa
  Clone ID: LIB4309-032-H9_FLI
ggaggatctcaatatctcatcctgctgccactgctcgactcctcctaccctcccccaaatccgcgagcctctagggttcgtgggatcccccggaaatggatccgaaccctagacttctcatcctactcgtcctcctcgcgttctccgccaccgtggcggtcgccgaggacggcgaatcgacggggggatcgaaggtctcgctggggcgccgtgcaggggggttcttgcacgggctgaagaaggaagcagtggtggagggagaccatggggtggccctcgatgaggtcggccccgggctgttcgatgcgctcttcgcgagtctctcgatgatcttagtcagcgagattggagatgaaacctttattattgcggcgctaatggcaatgcggcaccccaagtcaatcgttctgtctggtgcgctatcggcgctctacgtgatgacggtactatcaactggacttggtaggatagtccccaacttgatatcaaggaagcacactaacagtgctgctacagttttgtacttgttctttggactacgtttgttatacattgcttggaagtctgacccaaagggatctcagaagaaggaaatggaagaagtggaagagaagcttgagtcaggtcaaggaaaatcaacccttcgccggttctttggaagattttgtacaccgatctttttggaggcttttatcttaaccttcttagctgaatggggcgaccgaagccaaatagcaactattgcgcttgcaacccacaagaatgcaatcggagtagcagttggagcatcattgggccacactgtctgcacatcacttgcagtcataggtgggagcatgttggcatccaagatttcacaacggacagttgcaacaatcggaggtgttctcttcttggggttctccgtgtcatcgtacttctatcccccactatgattaacagcattaacagctccttactctttcttgataccctttggtcaccctgctccctgtgttgagcaaatgagtagaggaattaaattgattctttgggcacctctacgctacgattcgcaattcatgtatagcccttgcaaatgaaattgttcctgaccatgctacttcacttcagtctatagcagaagccgtctcgatgatgaaatcatgtctgattttttgcttggttgtacctgacatctaacttatacaatatatatacactatgttgttcaaggttccttgcgtat

SEQ ID NO: 26547 - DNA, 2066 bp, Oryza sativa
  Clone ID: LIB4309-033-F10_FLI
ctttcccccgctccccttccccgaggagccacgccgccgccgccgccgccgccatgccgaagcactaccggcctgcgggcaagaagaaggaggggaacgcggcgaagtacatcaccaggaccaaggcggtgaagtacctgcagattagcctcgcaaccttcaggaagctatgcattctcaagggcgtctttccccgggatccaaagaagaaggtggaagggaaccacaagacctactaccacatgaaggatattgccttcctggcccatgatcccttgattgagaagtttagagaaatcaaggtccacaggaagaaggtcaaaaaggcgtttgctaagaaaaataaagatcttgcagacagattattgaaccgaccaccaacttacaaacttgacaggcttattcttgaaagatatccaacttttgttgatgctcttcgtgacttggatgattgcctaacaatggtgcatctttttgctgcgttgcctgctgttgaaggtgaacgtgtgcaagttcagcggattcataattgccgcaggttgagccatgaatggcaagcatatatatctcgaactcattccctgcgaaagacatttatatccgtcaagggcatatattatcaagctgaagttcaaggtcaaaagatcacctggctaactccacatgctcttcagcaagttttaactgatgacgttgacttcaatgtgatgcttacctttttggaattctatgagacacttctgggatttataaacttcaagctttaccattcgataaatgtaaattatcctcctgttctggatcctcgtttggaagctttagcttctgagctctatgcgttgtgccggtacatgtcttctggaagagtacctggaaattcagaacctgctggactaattgaagataaagagggtgaagacaataaagagagctcaaaaacagatgagtctgaactcagattggcacaacttcaacaccagctcccaactaatgaacctggagcgctgatgcatcttgtacaagaatctactgctgctgatgcagacgacgctgatgccaaagaatgcaggagtttattcaaaaacctgaagttctacctaagtcgtgaggtgcctagggaatctctcttatttatcattccagcatttggtggtaccgtttcatgggaaggagaaggagctccttttgatgagacagatgaagacatcactcatcagattgttgatagaccgacccaaagccacgttttcctctctagggagtatgttcaaccacagtggatatatgattgcgtgaatgctcgcatcatattgccgacagaaggttatattgtcgggagggtgcctccaccacatttatctccctttgtggacaatgatgcagagggttacattcctgagtatgcagagaccattaagaggctgcaagctgctgctcaaagccaggtgttgcctctgccaagtttaggggacgaagatatggaaaattcactggtagaggcaattattgatcgatcagagtctaatgaaattgctgacaagaagaggaagttggagatgctagagaagcagtaccacgatgagctgaggatggaatacgaaggaaagaccttctcaaataggacggcagataaccaaccagatgttgtggacaaaagtgatactaaagaagctgacgatcatatggaggactctcataaacaagccgagaaggatgctgctgacatttccaagacccttatgtctcgcaagcagagaggccttcttcaagcaattgagattaaccaggaaaggaaaaaggacaaggtgaacttgctgaagaaaaggaaaaagaatgctgattccagtgcttcggccaaaggtcgctgaggctcgaacttcatttgctccatgctgtatctgttttgacaaattgttcatcggtcgctgcttctgtggagttgctgccatgatctgcacacctacgtattcttatgcatgataagcagctccattttgatgtttaggtgttttacatgggctttaagaatatgcccagatacctcagtagaaaattttgagctattt

SEQ ID NO: 26548 - DNA, 1048 bp, Oryza sativa
  Clone ID: LIB4309-036-A6_FLI
ttcactgaaacgaagagaaattgagacctctaggctccagccgtacatggccatggcgactaccagctctaaaaacgagaggtggagcctcgccggcgccaccgcgctcgtcaccggcggcagcaaaggcatcggccgcgccatcgtcgaggagctcgccagcttgggcgcgacggtgcacacctgcgcccggaccgaggcgccgctgaacagatgccgggaggagttgacggccaagggccttgccgtcaccgtctccgtctgtgacgtctcgttgcgtgccgacagggaggcgctcgccggcacggtgcgcgagctcttcggcggcaagctcagcatcctggtgaactgcgccgggatgtcgttcctgaagccggcggtggagctgacgccggacgattgctcgcaggtgatggggatgaacttcgagtcgtgcttccacttgagccagctggcgtaccctctcctcaaggcctctcagagaggttgtatcatcaacatctcgtccattgcttcggtggtcgcgttctgctctcttcccaacgccgtctactcagctgctaaaggagcaatgaaccaagtcacaaggaacctggctgctgagtgggcgaacgatgggatcagagttaactgtgttgcgccaggcttcattcgtactccgctcctatctgaattcgtggagggtaacgagttggggcgagcagagttcagccgtgttcccatgggccgtctcggtgaaccagaggacatcgcatcgctggtggcgtttctgtcaatgccagcgtcctcctatataaccggtcaggtcatatgcgccgacggcggtcgctgcctttcttgaagtggatggtcctgattcctgaaagatatactaattacctgctacgttgagagatatggaagaattaatggaatttgtctaccacgtgccaaccaggctaggattaatttatctgggaagagaacagattgctgggtgtgtcaaaatgatagaagttaccacatatattttaaataagtctgggaaattaggtagaatagtttgtcg

SEQ ID NO: 26549 - DNA, 1361 bp, Oryza sativa
  Clone ID: LIB4309-038-G9_FLI
gctggttcctccccgctccgcctctcctcctcctcctcgcgcggcggccggcgagcttggccgctccggcacgcacggttcgggcagcctccactccttcccgactcccgcccttcctcccgcgcgcgcgcgcgcgcgccgcgggccggtgtgaacaggttttgggaggggggcggcgcggcgcggccggcctcgctcgttccgccgccgccgttggcggttcggcaccggaggactgaagggagtatgaggaggtgagcattgtagctggagtgattcggttgccggaaatggtgctggtggtgaagcagcaccggtgcatgcactcggcgagctgcgtttgcatcaagggacacctcagcgaggacgcgctgttcctggtctttcgtcacatgaactggaaccccaggctgatcgccgtgctctcgtgcgtgtgcaagtggttcgacgaggtcgcgaagcaggtgctctggaaggagttctgccacgccagggcgccgaagatgatgctggatttgcattcgggtggcagtcacattgtcgacgggaactggaaggcgctcgggaagcttctcatctactgcaatggctgcacaaaagggggcctctttaacaacattcatgtccctgggcactttgtgttcaggacacgcttttcgaggaccgcgggcaagagtttcctgccccagcagtgtaggaatgatgtcttatatgtctcagatccatgcgagcatcttgatcaaggggatgaaggtgacttgggtttcttccgtggtatcttcatgtcgttcgccacctcaaaggttaagaagatgttgattgagaagcgggcaaggttccatccaagcgagtcatgtccctactgtaaggctaagctgtggagcatgttggaagcaaatatgtcgccggggagttcttctgccaggcttggtgcttacgaggattctgtggagtattttgtatgcctgaacggacatgtcattggaattggtacccttctacctctgtctgattctgaggaagtaccagaggagtagtaatcaggaacttgaatcaggtttgcaagactgaaaccctggattcgtgcatgctgttcgttgctgaatctttggttgcgactaacagtgggagaatgcatgcgcaaggcgacctgcaggtctgcaggatgacaagaatggctttgcatcgcagtgttgttcttcctgaaactttgcatcagatggggaaaaaaagctatttttatactgttctctcctttatcattgatgcctcatccctgcttcccctaattgtaaccgagacaccaatctcctgtcatgtcctatatgttcacagcacgtaatgtggtgtttatttagctt

SEQ ID NO: 26550 - DNA, 1875 bp, Oryza sativa
  Clone ID: LIB4309-039-E8_FLI
cggaaaaaaaaaggggtcgcgtctcctcgtctcgtcgcctcttcctccttccaattcatctcgtcctctctctcgtaactcgtaaagagatctcgtctcgcctcgggaatccaaccattgccggcgaagtagagatcgggagggcggcgccatgaacaggggcggcggcgtcggcgtcggcgatgagagcggaagcgactacgagagcggcggcggcatgcggaagccgctgctgatgcacacggggagctggtacaggatggggtcgcggcaggggagcctcaccggcgcggggacctcgtccatggccatcctacgcgagtcccacgtctccgccttcctctgcacgctcatcgtcgcgctcggccccatccagttcggattcacggggggcttctcctccccgacgcaggacgccatcatccgagacctcgacctcaccctctccgagttctcggtgttcggatcgctgtccaacgtcggcgccatggttggggcgattgccagtggtcagatggccgagtacattgggcgcaaagggtcattgatgattgctgcaattccaacatcattggttggcttgccatctcctttgcaaaagactcatcgtttctttatatgggacgattgctcgaggggtttggtgttggtgtcatctcttatacggtgccagtttacatagcagaaatatcacctcaaaacatgagaggtgctcttggctcagtgaatcagttatctgtaaccgttggtatattgttggcatatttgctcggcatgtttgttccttggaggcttcttgctgtaataggaatcttgccttgcactgtgttgatacctggcctattcttcattccagaatccccaagatggttggcaaagatgaacatgatggatgattttgagacttctttacaagttctgaggggatttgagactgacatcagcgcggaagtgaatgatataaagagagcagtagcgtcagcaaacaaaaggacaacgatccgttttcaagaattaaaccagaagaaataccgcacacccctaatactaggaattggcctacttgtactgcaacagctaagtggaatcaatggaatattgttttatgcaggtagcatcttcaaagcagcaggtctcacaaacagtgacttggctacatgtgcacttggtgctatccaggttcttgctacaggagttacaacctggttattagacagagctggccgacggatcctccttatcatctcttctgctgggatgactctaagcctccttgcagttgctgttgtatttttcctcaaggatagcatttcacaagattctcacatgtactacaccttaagtatgatctccttggttgctcttgtggcttttgtaatcgccttctccttcggtatgggtgccattccatggatcataatgtcagagatcctcccggttagtatcaagagtctcgcaggaagctttgcgacgctcgccaactggcttacatcctttggaataacaatgacagcaaacttgatgcttagctggagtgctggagggacctttgtgtcctacatggtcgtgagtgctttcaccctcgtgttcgtcatcctttgggtgccagagacaaaaggaagaactctcgaagagatacaatggtccttccgctgagccttgtggtcttcgaaaatatggccattttttcaagtacaaagggaaggattgatttgcgcatttgcaaatcttgtgtattctatgttccgagtcaagtatactggacaaaaagcaaagtattctttctgttcatatattcttgtacaacattgtttcacgtattccagatcgacttgcaaaggcttttgtgcagtgacacactcgtgatctcatcct

SEQ ID NO: 26551 - DNA, 976 bp, Triticum aestivum
  Clone ID: LIB4312-010-C11_FLI
ctgtctccactctccagcgcccatttccttcacttctcatggcggcggcgcggcccgcgctcccctcctccccgacctcgctgctgctcgcgcgctccacctccgcccccgacctcgccgcccggaggccgaggcggtggctcgtcgccgcggccggcgtcccggccgtggcgggggcgctggcggcctcggcctcgacgccggcggcgtccatgctgctgcgggacggcggcgccacgctgctcgtcaccgccggggcatactccctcgtgcgcgccttcgacgcgctcaccgagcgccgcctcgtccaacagagcttgagcaggaaggttgtgcatgtgctatccggggtctttttcatggcttcatggccactcttcagcaattctaccagtgcacggttcttcgcagcggtagttccgttcctgaactgcgtaaggcttctcacctacgggctcggcttctactccgacgaagctctagtaaaatcggtgacccgtgaaggaaaacgagaggaattgctgcgaggccctctgtactatgtcatcgtgctactgatcattgttctagtcttttggcgggactccccgatcgggatcgtttccttgtcgatgatgagcggtggtgacggctttgctgacattgtcgggagaaggttcggctcgctcaagctgccattcaacaagaagaagagctgggtcgggagtgccgcgatgttcatctctgggttcctgctatctgcactgatgctgtcctatttctcgtggcttggttacatccatgtcagctgggatcaggcgcttggtaaactggttctcgttgcgctggcagccactgtggtggagtgtattcctgtaactgatgttgtagatgacaatatctctgttcccttggccaccatgttggtagcctttctgttgtttggcaacactgcaaattgaatatatgaacaaatgttttgagctcctcctgtaac

SEQ ID NO: 26552 - DNA, 1044 bp, Triticum aestivum
  Clone ID: LIB4312-017-E2_FLI
gctttgcgaatctgtctgcgagttgcgtggggctagcgttggtggatccatgtggccggagagcccgcctctccgggacgccggcgctgccgtgctcaccggatgcgtcgccatggcggtgctccgcttctgggaggaggtcggcaaccgcgccctcttggaccaaaaactctgcaggaagctggtgcacatcagtgttgggctggtatatttcctgatgtggcctttgttcagtgcagatgatgtctatgctccatttcttgcttcaattgtcattgcgctcaatatcataaaggtaatcttgattggatctggtgtagttaaagatgacggcgtggttaactcgatgacaagaaatggagactacagagagcttctcaaaggcccactctattacgcgtgtactataaccctcactaccgtaatcttttggaggacgtctcccatttcgattgctgtgatttgcaacttgtgcgcgggggacggtgtggctgacatagccgggaggcggttcgggcatgtgaagctccctcacaaccccgacaaatcctatgccggaagcatcgcaatgttcttcgccggcttcgtcgcatcgatccttttcatgtgctacttccaccttttcggattcgtggagcagagctggaccatggtcgctgcctttggcgtcacgtcgcttgcagcggcgattgtcgagtcactcccggtcagcacgctcttggacgataacctgacgactccaatcgcgtcggcgctcgtcggcagcctggttttctactatgttggtggtggtggcggtgccggaagcggcgacgggaccagcatctcggcgactgctgcgatggtctttgcaggcagtagctattacagtgagggctaaggagaagttgcagtgaattggaaggctttggtggtgtgatgatactgcaatgagttgcagtagttgagatggtttttgcaggctgttactgggtgttggttaatccggtctgtgtctctgttaaatttggtttgacagtgtcattgtgtgagcagcattgttcg

SEQ ID NO: 26553 - DNA, 605 bp, Homo sapiens
  Clone ID: LIB43-126-B5_FLI
gtcgacccacgcgttcgccagcactgtcccggtgagcgctgctggctcggctaatgaaactcccgaaataccggacaacgtgggagattggcttcggggcgtctaccgctttgccactgataggaatgacttccggaggaacttgatactaaatttgggactctttgctgcgggagtttggctggccaggaacttgagtgacattgacctcatggcacctcagccaggggtgtagccaagtagttctaatgccacctgtcgtcttatcatctgattgcagacaaatggaatcctgtgctgaacccgaatcttccaaaaaacagcctacaatctgtgaccaccacaagatgtgccctgatggcagctgaagtttgattcagatgggcacttttcttccccttccctgcctagtttccttttgttccttgagtccacgcagaattccattctctggtcagcagacaggcttaagctaaagtattgcctctattctgtaaagttctgtacatagttcccaagcttctgcagggggtgatttttgctcttgtcctgagaaataacagtgctgttttaaaaaacatttgaaataaataccgcacacaaag

SEQ ID NO: 26554 - DNA, 2490 bp, Homo sapiens
  Clone ID: LIB43-130-E7_FLI
gatgtgaggaaaaaatcgcttcccttgcctgaaaagccacacaaagaagaaaattcagaaatcgtggtttggagagaatttgacaagtcgaagctgtacacggtggacctggagtcagggctacactacctcctgcgggtggagctggcagcccacaagtccctggccggagcagagctgaagacgctcaaggactttgtgactgtcttggccaagctgttccctggacggccgccagtcaagaagctgttggagatgctgcagagtggctggccagccttcccctggacaggatcccctacaacgccgtgcttgacctggtcaacaacaagatgcggatttctggaatattccttactaatcacataaagtgggttggatgtcaaggaagccgatctgagttgaggggttacccgtgttctctctggaaactgttccacactttgactgttgaagcctcgacccacccagatgcactggttggcacaggctttgaagacgacccccaggctgtgctgcagacaatgaggaggtacgttcacaccttctttgggtgtaaggaatgtggtgagcactttgaggaaatggctaaagaatccatggactcggtgaaaaccccagaccaagccatcctctggctgtggaagaagcataatatggtgaacggccgcctggcaggccatctgagtgaggatccccggtttccaaagcttcagtggcccactccggacctctgcccagcctgccatgaggaaattaagggcctggccagctgggatgaaggccacgtgctcacattcttgaagcagcactatggccgcgacaacctcttagacacgtattccgcagaccagggggattccagtgaaggaggaaccctggccaggggtgaggaagaggagaaaagactcactcccccagaggtgtcccatggagaccgagacacccagagcgtccgtccacctggtgcactgggccccaggcctgcccttccagagagcttgcatcacagcttggacgggaaactccagagtctggatgggcccggggcccacaaggaggtgggcggggccgcacccttcctcggggttgacttctccagcctggacatgagtctctgtgtcgtgctgtacgtggcttcatccctgttcctcatggtgatgtacttcttcttccgggtgaggtccaggcggtggaaggtcaagcaccaccacccggccgtgtgagtgcccgggtgctgccagccacggcggaagctcccttggaggcagccctgccccgtgccacctgcagctttaatatttatgatcagggattttataaacatgcgggcctggtttcacatcggatggcaccttttggcttcaaagtcctggttttacaaacgctcttctaacaagggaagaacacggggtaattttgtggggatatttgcattcctggcgtactcaagtctgttcatgctccttttgcaggtcttacagcaaaaagacttctgtatttttactcttctagatgtgaaaagagggtgcagagtccaggccagatagtcttccccacacactttcatctcgtttcctccactccgccccatcctgcagggccttgtttttgtatttggagaacctcgcccatcccccccgcggctcctggctcccccccccccccaccttggccctcctgcaccttccactcccctcgctccccctccccccgctccccccacgccccttgtccaggctgccaagtgttttcctttagccgggcggggacagacagagccggaagcgcagtcggcctctgcagcccctccaagcaagtgctccagggactatcctgtgtttgtagctgcttccctagggcaggttcctgagggctctccttgttcctccgggtgttcgacaccagacgtggggatttcaacaggggaggagccaaggaattctgtggctgtgctgcgtttcagaaaataacccccagaggccttgggctgtggacctgggggttggaaggatgggggctcatttaaccctcagaggcagcgcctttgtctgtctatctggtgacaagagagagacaagtaaatgggggccgttgggacggcgggtgcctggagggcagctctgggctcagcgggcagtgcttagagcacaggcccctctgttgggggatggggaggagagcagtctgcccttgggagcgtaggccccagggagacttctaaagccccccctgtcgtctgctcttcacccagcaccacagaggcacctgctgcacacacaagcatctcactcggcccacggagggggccaggcttcctttgcctgaagctgttttgggaagggtctccacacaggcactgatctcccaagcttttgtcatgatgtcttttaccatttgataattttaaacattgtttttaaacccaaaacatttagtggtccgttgcctctgaagatgtaaacaaacaaatacactatttctgggaac

SEQ ID NO: 26555 - DNA, 1231 bp, Homo sapiens
  Clone ID: LIB43-139-C3_FLI
cattccctcactcccttccttctttcctcctcttctactcacttttcccactccaagcccagcccatggagattgacctggatggggcaggccacctggctctcacctctaggtccccatactcctatgatctgagtcagagccatgtcttctccctggaatgagttgaggccactgtgttccttccgcttggagctattttccaggcttctgctgggggcctgggacaactgctcccacctcctgacacccttctcccactctcctaggcattctggacctctgggttgggatcaggggtaggaatggaaaggatggagcatcaacagcagggtgggcttgtggggcctgggaggggcaatcctcaaatgcggggtgggggcagcacaggagggcggcctccttctgagctcctgtcccctgctacacctattatcccagctgctagattcagggaaagtgggacagcttgtaggggaggggctcctttccataaatccttgatgattgacaacacccatttttccttttgccgaccccaagagttttgggagttgtagttaatcatcaagagaatttggggcttccaagttgttcgggccaaggacctgagacctgaagggttgactttacccatttgggtgggagtgttgagcatctgtccccctttagatctctgaagccacaaataggatgcttgggaagactcctagctgtcctttttcctctccacacagtgctcaaggccagcttatagtcatatatatcacccagacataaaggaaaagacacattttttaggaaatgtttttaataaaagaaaattacaaaaaaaaattttaaagacccctaaccctttgtgtgctctccattctgctccttccccatcgttgcccccatttctgaggtgcactgggaggctccccttctatttggggcttgatgactttctttttgtagctggggctttgatgttccttccagtgtcatttctcatccacataccctgacctggccccctcagtgttgtcaccagatctgatttgtaacccactgagaggacagagagaaataagtgccctctcccaccctcttcctactggtctctctatgcctctctacagtctcgtctcttttaccctggcccctctcccttgggctctgatgaaaaattgctgactgtagctttggaagtttagctctgagaaccgtagatgatttcagttctagg

SEQ ID NO: 26556 - DNA, 411 bp, Homo sapiens
  Clone ID: LIB43-145-H6_FLI
tttatgttgtatttctttattctgataaatagagaaaaaacttataaactacacagcatatgaaatatgattctgtagataacaactgccaacagttaaaagatctttaatatttgaaaaaactatgtacatattgtcttatcaaagaaaggccaaaatttgtcaattgaaagcattaatgaaatattttggttggtccctaatcccaatttcacattttttaccatctagattatacactgatttaaaatcaaacatatgaaggtaaactctaaaatcttcataggtcaacaaagaaaatttatccttcacacttatttctagaaagcagcagggcttatttcctagattgcttacaatgaagctagaatatctgcgataactgtagagtttcaaaaaggatccctaggg

SEQ ID NO: 26557 - DNA, 1594 bp, Homo sapiens
  Clone ID: LIB43-147-E3_FLI
gatctttggaacatctggggtgtgttctttctttcaagtcacgggtttaaacggaaaagataaaaattcctagaccagcaggagggaggtgtctgttgcccggcagtgtccaggcatcctgttcaggggccaagctgagcacccggtgggccagtgggaaggtcccacaccctccagccgttcccatcctcctgcccttcttcaggatgtgaaggtcttccgggccctgatcctgggggagctggagaaggggcagagtcagttccaggccctctgctttgtcacccagctgcagcacaatgagatcatccccagtgaggccatggccaagctccggcagaaaaatccccgggcagtgcggcaggcggaggaggttcggggtctggagcatctgcacatggatgtcgctgtcaacttcagccagggggccctgctgagcccccatctccacaacgtgtgtgccgaggccgtggatgccatctacacccgccaggaggatgtccggttctggctggagcaaggtgtggacagttctgtgttcgaggctctgcccaaggcctcagagcaggcggagctgcctcgctgcaggcaggtgggggaccgcgggaagccctgcgtctgccactatggcctgagcctggcctggtacccctgcatgctcaagtactgccacagccgcgaccggcccacgccctacaagtgtggcatccgcagctgccagaagagctacagcttcgacttctacgtgccccagaggcagctgtgtctctgggatgaggatccctacccaggctagggtgggagcaacctggcgggtggctgctctgggcccactgctcttcaccagccactagagggggtggcaacccccacctgaggccttatttccctccctccccactcccctggccctagagcctgggcccctctggccccatctcacatgactgtgaagggggtgtggcatggcagggggtctcatgaaggcacccccattcccaccctgtgccttccttgcgggcagagagggagagaagggctccccagatctacacccctccctcctgcatctcccctggagtgttcacttgcaagctgccaaaacatgatggcctctggttgttctgttgaactccttgaacgtttagaccctaaaaggagtctatacctggacacccacctccccagacacaactcccttccccatgcacacatctggaaggagctggcccctcagtcccttcctactccccaacaaggggctcactatccccaaagaaggagctgttggggacccacgacgcagcccctgtactggattacagcatattctcatctctggccccgaggctgcctgtggggcgagtggagacctcccatcactgagacagatcacagaccacgagtgcctttcccggacctggacgttgcctccagagcaggcaccagctctttccctctctagacagaaatatttttgtaaggttctggggcagggagggagcatgaagtacgaggaaaacttgaattccagatttttaatgcaaagtatttatcatttctaccagaaataaacgttttaagtttttacttg

SEQ ID NO: 26558 - DNA, 745 bp, Zea mays
  Clone ID: LIB4315-004-B5_FLI
ccgctctcgcctcgccgccgccttcctccttcccctgcgattacaaaaccctaggaccattctccaccaattcctctaatccctcgtcgctaggtagttcctgcgtctccatcccgatccccttgtcgattcagtcgtaatcaggatgcagcccggatcggccccggcggccggcggcaccggcatgttcgtgccggcggcgacggctggcacggtgctctgctgcatgtgcggcgtgtccatgcagcccaacccggccaacatgtgcgcgcgatgcctgcgcgcgcgcgtcgacatcaccgagggcgtcccgcgccacgccgccgtggtctactgccccgactgctcctcctacctccagccgccgcggtcctggctccgcgccgcacccgagtcgcccgagctcatgcagatcctgctccgccgaatcaaccgcccgctcgcgcggctccgcgtctccctctccggcgccgagttcgtcttctccgagccccactccaagcgcctccgcctcaagctccgcctccgccgcgaggtgctccacggcatcgtcctcgagcagacgcacccagtggagttcgtcgtccacgaccggttgtgcgactcctgctcccgcgcgcaggccaaccccgaccagtgggttgccgtcgtccagctgcgccagcacgtgccccaccgccgcactttcctctacctcgagcagctcctcctcaagcacggccaggcttccctcgcgatccgagtc

SEQ ID NO: 26559 - DNA, 948 bp, Zea mays
  Clone ID: LIB4315-005-C7_FLI
acagacattgcgactttgcgagagacaaaacctcccagataacgcccgcgcgctccccgatggcgtcgtcgtgccagaacgtggagattcccggcaagccgacggagacggggacggcgctgctggagacggcgacgggcaccatccaggggttcgcgccgctgagccagatccaccagcacctgtgcgcgttccacttctacgcggacgacatggggcggcaggtggaggcgcaccacttctgcgcgcacctgaacgaggacgtgcggcagtgcctcatcttcgacgggcccggcgccggcgcgcgcctcatcggcgtggagtacatcgtctccgagacggtgttcctgacgctgcccgacgccgagaagccgctgtggcacacgcacgagttcgaggtgaagggcggggtgctgttcatgccgggggtgcccggcgtggtggagcgccgggacctggagaaggtgtgcaagacctacggcaagaccatccacttctggcaggtggaccgcggcgacgcgctcccgctcggcctcccgcagatcatgatggtgctcacccgcgagggccagcttcggcaggacctcgctgactgtgtggagaagaagttcggtgtctccttccagaaggagagggagaaccgggcgtacatgagcggaccggagcatggtatccacccgctagcgaacgctaccggcaagggcctgaggaccgagatccgtgaggtcgatttgccggcgagtactaccgccggcgccgggagggtcttcacttgatcgccgtatcgtgtgttgccgcggcgggtctgcgtaatgtagactatatagacggtgcttggtttggtctgtagttcgtgagtacgtgctcaatcgtttgtgttctcttaagacacgaactactgttcatatgaactttgaattttcgcataataagagatggcgctctact

SEQ ID NO: 26560 - DNA, 1035 bp, Zea mays
  Clone ID: LIB4315-008-E8_FLI
gctgaaactgaaacagcccgtcatctaccattcgcccgccgcaacgctccctgctcggaacagcctgcgttgctcgcccacacgacgccacgcatgcaggaggagccagggcgtcgtcccgtgccgccgttcgcgggcgtggacctccgccgccccaagggctaccccgtggcggttgccaaggaggaggagaggccggcgccgggcggcgacccgtgcccgcggtgcgggtcgcgggacaccaagttctgctactacaacaactacaacacgtcgcagccgcgccacttgtgcaagtcgtgccgccgctactggaccaagggcgggtccctccgcaacgtccccgtcgggggcggcacgcgcaagagcagcagcagcagcagctcctcatcatcctcggcgacgacgacgtcaacctcgcccggcgccgcgcccaaggccacgaagcggtcgaagaactccaagcgccgccgcgtcgcgcctgccccggaccccgccgcgcccggcacggacgcctccaccgccgacgtcgcgagcacggcaccgtccgcagcgacggtgactgcctcggagaagccgagcgcgacggagcacgcagcggcggctgtcgccacggagaagccgccggccgcgcttccggtgtccgtcggcgctttcgcggacacgtccccggcgccagatgctgggagcggcggcgttagggagctgctgccgcacccgagccgcttcgagtggccgtcgggctgcgacctggggccgccctactggggctggggcaccagcgtgttcgccgacaccgacccggcgctgttcctcaatctgccgtgagtgacccgtgacaacgccatggcgcccatggttaactaatcaaccatgatcacacggtcgacgagatgagaggaacagagcacgcagtgcgtcgggctcttgaagctaggcgctgtagtagtctcctaagcttactgttgtctagaccgatagtctcgcgtacttgtgtagttgtgttgatggtttttaatcgccgctttgtactgc

SEQ ID NO: 26561 - DNA, 1248 bp, Zea mays
  Clone ID: LIB4315-012-E11_FLI
ggcgaactcgaattgggggaagagagcgagagacgaatcgcatcgagccggagaggatcgtcagagacagggaggagggcggcggaatcggcgccggcgggaggcaggcatggaggacttgagcgtggaggagctcgcctccaacctctccacctacaaagagcagctacgcgaggtcaagaagcttatcaaggagaagaaggatgatgctggaatttctgaatatattgatatggagaaagagcttcaagaggagccatgcccagcaaggtcataacgttaaccgaagagattttggcaactgcaaagcaaactgagagtgcccagaatgttgcaggtctatcaccgccaagctattcagctggagtgcagtctgagggactggatgacctttcacattcccataagtttgccgttggtactagagttcaagctgtgtggagtgaagatggagaatggtgactttctctttgatatacctatcattgtttgtgtctagatgatcttacctttaatatttttcacatcatttcattacaacatgtttgattagctgaattgccaggtataatgcaaccgttgaagctttgacaccaaatggatactatgtagcctacgatggctggggaaacagtgaagaggtggacccagataatgtgaggctgcttgaggaagaagcagctgatgccttgggacaagctgaaaaggaagctgaagctacaaaaatggcaataaagaggaaaattgaacaagcagcaacatctgattttcaggcgcgtagcttgccggccaaacttcgtatcgaaccaagtgaccctgaggatgttaaagctgcaaagcgtaagaaaatacatgctttcaaatcaaaatcccgctttgagcagcttgaatttgcccaaaacaaaaggcagaatgcatggcagcagtttcaaaccaaagggaaagccaaaaaggtggggttcttctccggtcgcaagaaggagagcatcttcaagtcaccggacgaccacagaggtaaggtgggtgtcactgggagtggcaaaggcctgaccgacttccagaggagggagaagcatctgcaccttaaaggtgggtccggggatgcagcggatgatgacgaggagtaaactgaagaaccgagcttctgtttgtatctcgccgaacagacatttccatacctgttctttagcgccgacatggcctcgaggggactcttgacttaaaccagaaaatttcaatgtttgtccc

SEQ ID NO: 26562 - DNA, 565 bp, Zea mays
  Clone ID: LIB4315-023-B9_FLI
caaatccccaaagcctccgacccccttcctctctccctccgccgccgctgcgcacgcagggaacaagcgacatgggcgtctacacctttgtgtgccgcaacaacggcggcgagtggaccgccaagcagcactccggcgagatcgaggcttccgccgctaccccatacgagctgcagcgccgcctcgtcgctgccgcctccgcggccgactctgcctacggcgtccagtcgtccttctccatggtcacccccagctccgccgtgttccaggtgatcgtcggtgctgtcggtggtggtgcaatgatggtgagcggaggtggcggcggcggtgctgctgcatctggtggtgctgctgccgaggctcccaaggaggagaagaaggaagaggagaaggaagagagcgacgacgacatgggattctccctgttcgactagagttgtgtgtgtcatctggatctcagaagtggtggtttggtcctgttgccgtagttaattttgctgtcctgtctgtgaacctgaagaactcttggtaattgttacaagcgacctgttccagtttatgtgag

SEQ ID NO: 26563 - DNA, 593 bp, Zea mays
  Clone ID: LIB4315-023-C1_FLI
agaagcagaacagaagaggcacgcaagcgtgagaaagaagcgagagacatggcggaggaggggaaggtgatcgcgatccacagccaggagcagtggagcaccaagatcgaggaggctggcagcagcacgaatctggtggtgatcgacttcactgcaacatggtgcggaccatgccgcttcatttctccaatcttagatgagattgccaagaagcttccaaatgttatgttcctgaaggtggatgttgatgaaatgaagtcaattgccgaggagttcagtgttgaggctatgccgacgtttgtgctcatgaaggaaggaaaggtggtggacaaggttgtgggagctgccaaggaggagctgagcgggaagattgccaagcacagtgcaactgcatgcgctaaataaaatggtccttcaactctaaattcgagaataagatgtgtgtcagccgctgcttgctactaccgctcaactcatggataagctggcaccggtgcagatagagtacgtaatgtaatgttaaaccctgttaatcgcgcggcgcacacgtactggcgacaaactgtatgtgatgataacatcggtccacgaat

SEQ ID NO: 26564 - DNA, 607 bp, Zea mays
  Clone ID: LIB4315-023-E10_FLI
tcctcccatctcccaagacctcctcagacccgagaagcgcagctgcggccatggacgccaccggcactggagctggagggaaggcgaagaagggagcggccggtcgcaaggccggcgggccgaggaagaagtcggtgacgaggtccgtgaaggccgggctccagttccccgtcggccgcatcgggcgctacctcaagaagggccgctacgcgcagcgcgtcggcagcggtgcccccgtctacctcgcggccgtcctggagtacctcgccgctgaggtcctggagctcgccggcaacgctgccaaggacaacaagaagacgcgcatcgtcccgcgccacgtgctgctggcgatccgcaacgacgaggagctcgggaagctgctgaccggcgtgaccatcgcccacggcggcgtgttgcccaacatcaacccggtcctgctgcccaagaagacggcggagaaggcgtccagcggcgggagcaaggaggccaagtcgcccaagaaggccgccaagtcccccaagaaggcatagggtttggaggcggatccgatgttgtcatgtgtaggttgtaagcgggcaatgtgattggctgtgtatctgcttcgctc

SEQ ID NO: 26565 - DNA, 1280 bp, Zea mays
  Clone ID: LIB4315-024-C10_FLI
ctagcccttcaagaaacaaaccatcatacgagacagacgccggccgcgacacaagcggacgatccccggagtgcggatcgatggcgccggtgagcaacgagacgttcctcccgacggcggcgtggggggaggccacgctgcgcccgtccttcgtgcgggacgaggacgagcggcccaaggtggcgcacgaccgcttcagcgatgcggtgccggtgatctcgctcgacggcatcgacggcgcgcgccgggccgagatccgggaccgcgtggcggcggcctgcgagggatggggcatcttccaggtggtcgaccacggcgtcgacgccgacctcatcgccgacatgacacgcctctctcgcgagttcttcgcgctgcccgccgaggacaagctccggtacgacatgtccgggggcaagaagggcggcttcatcgtctccagccacctgcagggtgaggcggtgcaggactggagggagatagtgacctacttctcgtacccggtgaaggcgagggactacgggcggtggccggagaagccggcggggtggcgcgcggtggtggagcgatacagcgagcgactcatgggactgtcgtgcaagctgctgggcgtgctgtcggaggcgatgggcctggaatcggaggcgctcgccaaggcgtgcgttgacatggaccagaaggtggtggtcaacttctacccgcgctgcccccagccggacctcaccctgggcctcaagcgccacaccgaccccggcaccatcaccctcctcctgcaggacctcgtcggcggccttcaggccacccgcgacggcggcaagacctggattaccgtccagcccatctccggcgccttcgtcgtcaacctcggcgaccacggccacttcatgagcaacgggaggttcaagaacgcggaccaccaggcggtggtgaacggggagagcagccggctgtcgatcgcgacgttccagaacccggcgccggacgcgagggtgtggccgctggcggtgagggagggggaggagcccatactggaagaacccatcaccttcgccgagatgtaccgccgcaagatggagcgcgacctcgacctcgccaagcgcaagaagcaggccaaggaccagctgatgcagcagcagctccagctccagcagcagcaggcggtcgccgccgcgcccatgccggcggccaccaagtctctcaacgaaattcttgcctgaccattccggcggcgcgcgattaaatattttaaattgattgatgcgtgggatttgattctcctaagt

SEQ ID NO: 26566 - DNA, 425 bp, Zea mays
  Clone ID: LIB4315-026-H2_FLI
cttcttcctcctcctcctccaagcagcacggagcgattagctgctgctgctgccgctgcagcgggcagagatggcaggagcagaggttgccaacggcgtgcacgacggcgccctggatttggaggaaggcagaggaggcggagtcgatggagcggggtgtgagagctcggagcaggacggagccggtcgccgccccatgttctccgtgccgttcgtgcagaagatcctggcggaggcgttggggacctacttcctgatcttcgccgggtgcgcggcggtggcggtgaacctgcggacgggcggcacggtgacgttcccgggcatctgcgccgtgtggggcctggccgtgatggtgatggtgtactccgtgggccacatctccggcgcgcacctcaacccggccgtctccctcgccttcgccacct

SEQ ID NO: 26567 - DNA, 464 bp, Zea mays
  Clone ID: LIB4315-030-E12_FLI
tggcgagccggcaacagtacgagttgtccgggcgcgcgtatgtgctcgccgggctgagctcgcacgcccaccagcgcgccacgtcgcggcaggtgatgtccggtggcgtggcagaagcgactcggggcggcgaatcggcgcaggtgcgcagtggggcgttggagacgtcgggcatcacgatgtcgtacatgacgccggcgatgctggacatgctgggccggtcgcggaggtcgcgtgagctgctgcagcaacgccaacaacagacggagctgagaagaacgttttgaccgtgtgattatgtggcgtaggaggtactaggcagtcctcccgaaaaaccgttcgtgtgatcaagtgtatggttatccattgatattttgactaaacggtagttcaatttggttcattcttcttattcaaactgtactttaccctcaaaccaaatataatgtagtattagattaccc

SEQ ID NO: 26568 - DNA, 710 bp, Zea mays
  Clone ID: LIB4315-038-E12_FLI
gccgcgccaaggccaagctcctcgaggaggacctgcccaagctgcagagcctcgcgctcaagaaggacgaggtggtgaacccgctgttcgagaagaggccgaagcagttcggcatcagtggcgccctgccgcccaagaaggacctccaccggtttgtcaattggcccaaggtcatgcgcatccagcgccagtgccgcatcctcaagcagcgcctcaaggtgccccaggcactccaccagttcacccgcaccctcgacaagaacatcggtcattttgtgaaggccgccaagggaaggagtgggggatttggcacaaggccggtgatcgagtctatgctctctcctccatggaaagacctaaattcagcttgacagagagcacatgaatggtttcagcttgacaacaaatgtatgaaacttcttagctgtggacgacaactacttccttaagaaggaccagcatcacgcatcaagtatgccattgagggtgacggccgaaggcatgatgatagttctattgctgttctagtgtagcgaaggtggcctagtcgactatggtcgcctagtgagtcgtgcatacggtttcatctgactgtaaacttgatgtaaactgctctaattgtggagcttgttatctgtttgtaaacttgatgctgatcacatttgtatgtgtgttatatgatgtagcactttgatggttgataatatttg

SEQ ID NO: 26569 - DNA, 1010 bp, Zea mays
  Clone ID: LIB4315-040-B12_FLI
gttcgtcgatctcctgctaggtgctaagcttagctcgctcgctggcaacaacaatgaaagccgcaactggctcatcatcagtctctcgcgctcttgcgttgctcttggcggcgtgccttctctggaaggaagccgcgtgcttctcggcgtccgggctaaacaaggcgttcgccaccttctatggcggtagcgacgcttcaggaacgatgggtggggcttgtgggtacggcaacctgtactcgacggggtacggcacggacacggcggcgctgagcacggcgctcttcaacgacggcgcctcgtgcgggcagtgctaccggatctcctgcgactaccaggcggacccgcggttctgcatccgcggcacgtcggtgaccatcaccgccaccaacctgtgccctcccaactacgcgctgcccaacgacgacggcggctggtgcaacccgccgcggcagcacttcgacatggccgagccggcctggctcaagatcggcatctaccgcggcggcatcgtgcccgtcaactaccaaagggtgccgtgtgtgaagaaaggcggggtgaggttcagcatcaacgggcgcgactacttcgagctggtgctcatctccaatgtcggcggctgcgggtccatccagtcggcgtccatcaaggggtcgcgcaccgggtggatggccatgtcccggaactggggcgtcaactggcagtccaacgcgtacctcaatggccagagcctgtcgttccaggtcaccagcagcgacggccagaccaaaaccttccccgacgtcgcgcccgccagctgggggttcggtcagacgtttgcgacctcgcagcagttctcttagtatagacacatctttgttttctgcctcgttcgcttgtcgtttatatatatgcctcactcggctcggccctcgatcaatgccttgtaaagtttaccggcctttgttcaaatgccccaccacctgccgcgatgcaggagatatatgatatatatgctttgacttgtgctt

SEQ ID NO: 26570 - DNA, 784 bp, Zea mays
  Clone ID: LIB4315-040-D4_FLI
cactgcctgctcattttcttcctgtgcgcgtacagagatactactagcgagcacgccatggagcaaaccgaggcggcggtgagcggcgcgcttggagcgggagtggaaggtggcgacaagacggcgaggaaggcgctgaaggtggtggcggccgtggacgcgagcgaggagagcctgcacgcgctgtcgtgggcgctggacaacgtcgtgcggtgccacccggacgcgacgctcgtcgtcgttcacgcccaacacgccgccgaccacttcgcctaccccgtcgccgcgcacggtatcgaaggcatcgtgtacgccccgtcctcggcggtggagtccgtgcgggcggcgcaggaggagagctcccgcagggtcgtagcgcgcgcgctggacatctgcaaggagaggcaggtggacgccacgggggccgtcgtggagggcgacgccaaggaggccatccgccaggccgtggagcgtatgcaggccgggcttctcgtcctcggcagccggggcctcggcgcgatcaaaagggcgttcctgggcagcgtgagcgactacctcatccatcacgcctgctgcccggtgctggtcgtcaggcccaggccgaccaagtgaactcgcctatcgttctcgagcagtactccagtaatgtacgcagtgccctgtgccgctgcgcggtcagtaataccagtatatgtatgctcatagaaaaaaaatgtagaaaactgaataaagaacctatgcatggttgtatctgcacaaattatcaacgcgcttccttgcctgc

SEQ ID NO: 26571 - DNA, 691 bp, Zea mays
  Clone ID: LIB4315-040-F12_FLI
gtgccaatccacggtcaaccacacaacaccttgtcgccttcaaagcacaaccagcgacaagatgcgaacctacgaggacaccttctccggcgcgagaatctaccctggcaagggtaagctctacgtccgtggcgacagcaagatcttccgattccagaacggcaagtcggagtctctcttcctgcaaaggaagaacccccgccgtatcgcatggaccgtcctctaccgccgacagcaccgcaagggtatctctgaggaggttgccaagaagcgaactcgccgcaccgtcaagtctcagcgaggcatcgttggtgcttctctcgacgtgatcaaggagaagcgcaacatccgacccgaggcccgttccgctgcccgagcccaggccatcaaggagagcaaggagaagaagcaggccgatgctgctgccaagaagtccgagaaggctaagctcgctgcccaggcctccaagggccaggctgtccgacaagtcagcaagcagggtgccaagggctctgctcctaaggttcaggccaagagccgttaagttaggattggactttgagggaggaagaaaatggaagagtggagtccgtggttcttgtgtctttatccggccggttcttctacaatctcgggtgcatggattgccaatagggtgcattgatagctgagcaatgcaaaatggtcaaac

SEQ ID NO: 26572 - DNA, 1904 bp, Zea mays
  Clone ID: LIB4315-042-A12_FLI
ctccactccagcactgaacacttgattgattcagtaggtagctagctagctgaatcacaatggatcctaccaaggtgagctcagtataatcttcttcttcctcctccgtcatatcgatctttgatttgagattcgtagctgagtatgatttcgtgttgtgttgtgttgattttgctttgcgttgcagttccgtccgtccagtagccacgacacgacggtgacgacgacgaacgctggcgctcctgtgtggaacgacaacgaggcgctgactgtggggcctcgcggtcccatcctgctggaggactaccacctgatcgagaaggtggcgcacttcgcgcgcgagcgcatcccggagcgcgtggtgcacgcgcgcggggcctccgccaagggcttcttcgagtgcacccacgacgtgacgtcgctgacgtgcgccgacttcctgcgcgcgcccggcgtgcggacgcccgtgatcgtgcgcttctcgacggtgatccacgagcgggggtccccggagacgatccgcgacccgcgcgggttcgccgtgaagttctacacccgcgagggcaactgggacctgctgggcaacaacttccccgtcttcttcatccgcgacggcatcaagttccccgacgtgatccacgcgttcaagcccaacccgcggtcccacgtgcaggagtactggcgcgtgttcgacttcctgtcgcacctccccgagagcctgcacaccttcttcttcctcttcgacgacgtgggcgtgccgtccgactaccgccacatggaagggttcggcgtgaacacgtacacgttcgtgagcgcggcggggaaggcgcagtacgtcaagttccactggaagccgacgtgcggcgtgcggtgcatcctgacggacgaggaggcggcgctggtcgggggacggaaccacagccacgcgacgcaggacctgtacgactccatcgcggcggggagcttcccggagtggacgctgtacgtgcaggtgatggagccggacacggaggagcagtacgacttcgacccgctggacgacaccaagacgtggccggaggacctgctgccgctccgccccgtggggaggctggtgctggacaggaacgtggacaacttcttcaacgagaacgagcagctggcgttcggcccggggctggtggtgccagggatctactactcggacgacaagatgctgcagtgccgggtgttcgcctacgccgacacgcagcgctacaggctgggaccaaactacctgatgctgcccgtcaacgcgccgcgctgcgcgcaccacaacaaccactacgacggcgccatgaacttcaagcagccaggggagaggtaccggtcctgggacgccgaccgacaggaccgattcgtgaggcgattcgccgactcgctcggacacccaaaggtcagccaggagctcaggtccatctggatagacctcctcgccaaggtacgtggatggcatggcatggcagtggcacacgtgttttcgttccatctagctactcatgcatgatatatatacgattgctttgcatatgcagtgcgacgcgtcgctggggatgaagattgccacccggctcaacatgaagccaaacatgtgatgcttctgctgaataataatgaagacacgcatgcatgtcgtcgtcatgaacaagagaaataatacaagaccagcacgcatgggcatactctatatatatgtatagcccgtgcccgtgtccgcatttgtaccaatacaagccaagcctagtcaagtggatgtgtattattgttgcgctatcacatacatgtacccctgctacctgaagatggatgtgtatcgagttatcaaattaaggcaccagcagcaaacgctatatatattgcataataatactcgtctcgatatggac

SEQ ID NO: 26573 - DNA, 717 bp, Zea mays; identical to SEQ ID NO: 24696
  Clone ID: LIB4315-042-H7_FLI

SEQ ID NO: 26574 - DNA, 1550 bp, Zea mays
  Clone ID: LIB4315-045-D9_FLI
gcgcgcgccccgtcctcgtcgccggcggaggcgtccgccaccgcccacagcagactatcgccggagaaggaacgccgcggggagcgtttccactgccatctcccgtctgacccctccgagatcggaagcggcggccatggccatcccgctcgtgctcgtcgtgctcccgctcggcctcctcttcctcctgtccggcctcatcgtcaacaccatccaggccatcctatttgtgacaataaggcccttttccaagagcttgtatcgccggatcaacaggttcttggccgagctgctgtggctccagcttgtctgggtggtggactggtgggcaggcgttaaggtacaactacatgcggatgaggaaacttaccgatcaatgggtaaagagcatgcactcgtcatatcaaatcatcgaagtgatattgattggcttattggatggatattggcccagcgctcagggtgccttggaagtacgctcgctgtcatgaagaagtcatccaagttccttccagtcattggctggtcaatgtggtttgcagagtacctctttttggagaggagctgggccaaggatgaaaagacactaaagtggggtctccaaaggttgaaagacttccctagaccattttggctagctctttttgttgagggtactcgctttactccagcaaagcttctcgcagctcaggagtatgcggcttcccagggcttaccagctcctagaaatgtacttattccacgtaccaagggatttgtatctgccgtaagtattatgcgagattttgttccagccatttacgatacaactgtaatagttcctaaagattcccctcaaccaacaatgctgcggattttgaaagggcaatcatcagtgatacatgtccgcatgaaacgtcatgcaatgagtgagatgccaaaatcagatgatgacgtttcaaaatggtgtaaagacatttttgtgacaaaggatgccttactggacaaacatttggcaacaggcactttcgatgaggagattagacctatcggccgcccagtgaaatcattgctggtgaccctgttttggtcgtgcctgctgttgtttggtgccatcgagttcttcaagtggacgcagctcctatcgacatggagaggagtggcattcactgccgcagggatggcgctcgtgacaggggtcatgcacgtcttcgtcatgttctcccaggctgagcgatcgagctcagccaaggcggcacggaaccgggtcaagaaggaatgaaaacggagggtggagatgtgattctgggctctatttatgggcagctttcaaaatgactcgattcatattaatgtatacagcaccaaattccagacattgatatgctctgaaacaggatgctctgctcctcttgtatttgtgtgcaggaaagaattttagggagttcatttttgcccccctcttttgggcagaggaactgtaggacatgaacttgatgttggtacatttgccctgtagacattctggaagcctttcagtagttcatttatttatcagtaaagcttgcatc

SEQ ID NO: 26575 - DNA, 439 bp, Zea mays
  Clone ID: LIB4315-046-H9_FLI
attggccacagctcccagtggctctggtactccgtgtacgcaaccaaacaaatcagctggcgcacgaggatgctggtggtatcagactggacacgccgattcatcttcggaagagactcgagttgcatatgatcaagagggaaaagattttgctgtgacatatattcagatgaacgaggccagtacagcctcttcccacttttttttagtctgatttcacataaatgttccccttttgttgttagggaagaatctgacttcccctgcactttgtatagtgcaccacgaagaaattcctttgtacctaccttttctttttgagagagttgcactgcacttttgcggtctgagtaagctcagaattcttttaatagctattttttctaccactaatatgtgatatggagaagggtcagtttggacctgattttgttgtgtg

SEQ ID NO: 26576 - DNA, 766 bp, Homo sapiens
  Clone ID: LIB43-151-G11_FLI
caggtaacacaagacattttcatttcctgcttggtgcacagtttacatgaaagctttggtcctgagagtccttttgcggggccatggagacagtcgtggacacacatgatgatggatgagacagagaatgatgagcagaacgtggaggatgtggaggtgctcgggatgagggctgggtctcactctgccctggcctcacactgctgcctcagctcagggtagccctgctgccctcccagaagaggcagacccggctcccatgtggatggagaagggggtgagcctcccatgtggccctccaccatcccatcccacagagagaagccttcactaggcttttcccaggttgactggtcctggcacccccaggcgtccctcttggtggctctccaccctagggctgaccatggggccaggctccctcagcccagtctccccacctgcacagtcagagaatacaaaacccaggagccctgagtcagaggagtggctgcgtggaaagacactctaataaggcaagtacaataatggccttagtctaagctgctacgtgtcgccagtgacactgaataatcaaactaaatgaaaaataaatgtcatgtattttgctacataatcaaatggtgaaaatatggcaaagtgtgcaaaacaaagcccttggcaatgcctggggccctgccctggcaggggaggctgtggcaggcccttccctaacactggtttcagagctgggctcctactgtaagggttcctcaggcgtctgacc

SEQ ID NO: 26577 - DNA, 1231 bp, Homo sapiens
  Clone ID: LIB43-152-A11_FLI
gggaactgagaagtgtatatggggcccaagctactggtgccagaacacagagacagcagcccagtgcaatgctgtcgagcattgcaaacgccatgtgtggaactaggaggaggaatattccatcttggcagaaaccacagcattggtttttttctacttgtgtgtctgggggaatgaacgcacagatctgtttgactttgttataaaaatagggctcccccacctcccccatttctgtgtcctttattgtagcattgctgtctgcaagggagcccctagcccctggcagacatagctgcttcagtgccccttttctctctgctagatggatgttgatgcactggaggtcttttagcctgcccttgcatggcgcctgctggaggaggagagagctctgctggcatgagccacagtttcttgactggaggccatcaaccctcttggttgaggccttgttctgagccctgacatgtgcttgggcactggtgggcctgggcttctgaggtggcctcctgccctgatcagggaccctccccgctttcctgggcctctcagttgaacaaagcagcaaaacaaaggcagttttatatgaaagattagaagcctggaataatcaggctttttaaatgatgtaattcccactgtaatagcatagggattttggaagcagctgctggtggcttgggacatcagtggggccaagggttctctgtccctggttcaactgtgatttggctttcccgtgtctttcctggtgatgccttgtttggggttctgtgggtttgggtgggaagagggccatctgcctgaatgtaacctgctagctctccgaaggccctgcgggcctggcttgtgtgagcgtgtggacagtggtggccgcgctgtgcctgctcgtgttgcctacatgtccctggctgttgaggcgctgcttcagcctgcacccctcccttgtctcatagatgctccttttgaccttttcaaataaatatggatggcgagctcctaggcctctggcttcctggtagagggcggcatgccgaagggtctgctgggtgtggattggatgctggggtgtgggggttggaagctgtctgtggcccacttgggcacccacgcttctgtccacttctggttgccaggagacagcaagcaaagccagcaggacatgaagttgctattaaatggacttcgtgatttttgttttgcactaaagtttctgtgatttaacaat

SEQ ID NO: 26578 - DNA, 4675 bp, Homo sapiens
  Clone ID: LIB43-171-E12_FLI
aagcttcatccatcccaaacggctgcagacccatgaggcccagtgccgacgaggggccagcacgcgggggtctacagggctgggagctgggggcgctggccctggtggtcctgcaggggtggacgcctcagccctgcctccaccagtgggcttccgagggggccccgagcacgtggtgaaggtggtgggcggccacgtgctgtatgtgtgcgcggcctgcgagcgttcctacgtgaccctgtccagtctgaagagacacagcaatgtacactcgtggcggaggaagtacccctgccgctattgtgagaaagtgtttgctctggcggagtaccgcacgaagcatgaagtgtggcacacgggggagcgcaggtaccagtgcatcttctgttgggagacctttgtcacttactataacctgaagacccaccagcgagccttccacggcattagcccgggcctccttgccagtgagaagacacccaatggaggctacaagcccaagctcaatacactcaagctctaccgcctgctccccatgcgggcagccaagcggccctacaagacctacagccagggagccccggaggctcccctttctccaaccctcaacacaccggcccctgtggcaatgccagccagcccgccgcctgggcctccacctgccccagagcctggccctccaccctctgtcatcacttttgcccacccagccccctctgtcattgtccatgggggcagtagcagtggtggaggggggagtgggacggccagcacaggagggtcccaagctgcctcggttatcacttacactgctcccccgaggccacccaagaaacgagaatacccacctcctccacctccactgtgtcagatcactgtgcgaataggggaggaggccatcgtcaagcgccgcatctcagagactgacctgcgtcctggggagctgagcggagaggagatggaggagagtgaggaggacgaagaggaggaggacgaagaggaggaggaggaggatgaggaggaatcaaaggctggtggggaggaccagctctggaggccctactactcctacaagcctaagcgcaaggctggagctgctggaggtgccagtgtggggggcagtgggctgccccgaggccgccggccaccacgttggaggcagaagctggaacggaggagctgggaggaaaccccagcggccgagagcccagcgggacgtgcccgcacagagcggaggcaccgatgcggggactgtgcccagaccttcaccaccctgagaaagctgcggaagcaccaagaggcccacggtgggggctcccacagctcccgggccggacggaggccctccacccgctttacctgcccccactgcgccaaggtgtgcaagaccgcagctgccctgagccgccacgggcagaggcatgctgctgagcggcccgggggcaccccaacccctgtcattgcctattccaagggcagcgctggcaccaggcccggggatgtcaaggaggaagccccccaagagatgcaagtctcctcatccagcggtgaggcaggtggcgggagcactgctgctgaggaagcttccgagaccgcctcactccaggaccctatcatttcagggggtgaggagcccccagtagtggcaagcgggggcagctatgtatacccacctgtgcaggaatttccactggccttgattgggggcggccgggaacctggcggtggcaggggaaaatctgggagtgaagggccagtgggggctggtgagggggaccggatggaggggataggggctgccaaagtcactttctaccctgagccctacccgctcgtctatggcccccagctccttgccgcctacccttacaacttcagtaacttggccgctctcccggttgctctcaacatggtcctacctgatgagaagggtgcgggggcccttcccttcctaccaggggtctttggctacgcagtgaatcctcaagcagcaccccctgccccaccaacaccacctcccccaactcttcctccaccaattccccctaagggagaaggggaaagggcaggggttgagagaacccagaagggcgatgtggggtgaaccctggggctcaatccccctttcaccagatgccaccctccctgaaccccccaccactaccagctccctggcctccctgccccttgggagccccttcacactcttgtgcagggacttgggggcccctggagctcaggggtcaggctgctttgtgtgagatgtagttttcccatctcctgggaagggatctttcgaggttcccctctcagtcttcctccagggaatggcctccatgaggggcagggccagcttccatcccttctccagcccttggggcaactgagcaatatacttaacctgaatctctactcacagcccccaccagctctgaatgtctaacctgctcccctgattcgtaaacctaggggaaaccatctctctcacctaatgacccgccttgttctgaagctttctctaagcccttcccagttgcttcctagcacattccattctttgtggcccagggcctggaccagaccattgtgatacctgaccccgcccacctgggagtgtggctttgggtttcatccttccccagcgtgggtctctacgtccctgtttcccttgtatcaagacaccttcctcagcttccatgcctttggatcttccatgttcctccccatattcctggacttcggagatggcctctcccaagccaggtcaaggaggtttgggggagggttgcccctctgcccctctgttctgtggctgagcactttcccagtccagggcagggaaatattggccctatcttgacccccaaatccagtgagctvcagattcttccaaggcaaaagaggtaagcagatcacacctctttctgcctctacatatggcctattctgggctagaccagatttgggggccaggagggaagaactccatatgggatggagaagggaatctactttctccctgttttttttcctgatggtttctcccagactagaccaaatagccagaaaaatgataggggtcggatgggtgggtaagcccaggatttgcacatgaccttccatccttacctgtattcccatctccccagtgtcactcccctcaccaatcactccagatggttttgggggaaccattctactcttctggtgggctttggggtatccccaccaactttcccttcaaaatagcaccttacaccccatctttgactcagttccccacacccaaagatcccagcctagggatggggtacagggactttaaatagtccctaatccctaatttgcactagttaaccctggtcagggtccctgtatttccttccagtgggggagataaatgtttgctcctaattctctttgaaaactgggcctccctgctctgtgattggataaatatttcccatcccacccacctccccccaaaaaatagctcacaaggggagagccagtatgggggagcaaatttgacaaatgggaattagaggagtgcagttttaaaaggaaaagttgctgtcatcaaaatggcagccttttccccagctactgtttttggggccaagatggctgccctagcagcaatcactgccaagggcaagatcatggcttttggagggaggtgagtttagggagggccaggaccatcctcctacccctcataccctcccagcatatacaaaaggggaggttttagacaggctccctgaatgttaaccacagaggagtcactccttcattcctcctctgtctctttgcacttttcttggtcttggccacagcctgagtgacgaatttcctactgaatgtaccaagttccaatttttaagggggggaaaggtttcaaatggggaaaaacacacaaaaaaaaaaatcactaaaaattcccacaaatcttgtttctggcactttagaaaaactgcaaaaaatacgtaataaagaatacatatatatatatctacacacaaattatatatctatctatctatacagcggaaccacaagagagactgaggaaggcctggaggcaggggcagaggtgacgacagtgcccctatatccttaacccatactcctctgaggcaaacaggcatgggaaaatggaagggttgaggatggaccggagaattggaacttcagaataggtcaaaattccaaaaccatggacatttttttttgggagaattgagattgtagacattttttttttcttaagtatgatcaaggaaaatagcttccagaatgtggtggttctgggcaacaaatgagattgtggcgacgtggagattaaaatatatgtatttgagctggggaatttgaatattgtgagtttcagatgttggaaatttgggattttgcagttttgtcttttgaaaatgatcaagtcttgtcagttcgtgccctctttccccatgttccctgggaagacgggtggtggcagagtgagaaggccactggttctgtgccgcagcacgcaaaatttagaattctacagactagctctatacgtagtgaggacccagatttagagaaactgaccaatatttatctccgcatttgtgtgtgtgtccaactctgtaggccaataaaccaacaagacaaatgaactgtgctcccc

SEQ ID NO: 26579 - DNA, 1831 bp, Homo sapiens
  Clone ID: LIB43-19-A1_FLI
catcattccatttgcccacgccatctggcacctgtttgtggccacggcagctgcagtgcattactacgccatttggaaatacctttaccgaagtcctacggactttatgcggcatttatgaccaatctgtactaattctccaaaccagtattatttcaattatggcacttgggagtggggtgagagctaaacattgcacagggaaagaaaaaaaataactgcactgactttatatcttttgaatataattactgtgaaagtataaaggctgtgttctggaattttctgcctcacagcaaataaataaggtagtgaattaattattcattccattccactatcatgaaggactctgaatagacttggccaactgatgtttacaaaccagacttttatattttaattttacagattttactacatgatttttctaaattactatgtcaggttgtaaaagtcagtgcaataacaaaccttcctttttaagaagaaaattgtttctattactttcccattcactaggtaaagaatcatggacagaacttacactactttttaccatgtttcatcttggcataacatggttcttttttaaatagaaactttagttttttgtaaatttttaaaaaaatatttcattgatatgcatctctgcaggtcctcattcatgttgtaaatttttgcagcaagcagtcaacattccacaaacgaacaaacattatacctcttctgatagttttattaagcatggagaaattgccaatttttaaaaactgcagttttccaaacttttctgccaacctcttactctgaattcagtgctgctttgggacatatacttgacctagcttggtttaccagtgatggaaaagtattttgatatcattaactttttcaaaagatccaactttttctctatgcctttgccacattctcttcagggtctctttccacagtggataaatgttttttctggattatgacagtattgttgtgatggccatctgctggaaactcctgaagagcattatgtattacagtgagcagttgtattgcctgtttggtgcccaatggttaagtcattgtcacttagctttatattgtcagtttgatatttattttaaattgtggaactagatgcataaattcacatttctgcctttcctttgcatcttctcatatattgtgttttttttttttttcctagaaaaaatatttaaagcattgtttgacaggtagaaactcatgtatctgtagtccatgagttatatcctggctcagtggagtgatatttatgtattatttttacttttctctcagtgtcttatattaagattaacatgttgttaatagttgctttgttgattaatctctcttgttggtgttttaataaatgaaataggcttgcctttagatcgggtgctgatattgcctgtttcctagtaatgggctgatcaaatgatcagtggaattcttggtttgatgataaccttattaattgaaattttttactgatgtggctttaaaaaaggtttattttgtatatgtttagaactctctgattttgatgaattatatgggaatgagaaacagaagaagtggtatttgctggcgagttaaataggcaaggtacccagtgataacaccaaccaaaccactcctatctgcatgattctgaacatctggatgcctgttgttttactgtgtatattttatttttaatatattaactttgtggattcatttaaggtctactcaaaagtaacactgtcaaaaccactaatatgtatgtaaaaattgtgctgtatactacaataaagttgttacttgg

SEQ ID NO: 26580 - DNA, 532 bp, Zea mays
  Clone ID: LIB4338-011-B6_FLI
acgcggggatcacccataatattttgagcattcagaaacacaccaagcgaggcgcactagcaacgacctaacaacaatggccaccaagatattagccctccttgcgcttcttgccctttttgtgagcgcaacaaatgcgttcattattccacaatgctcacttgctcctagtgccattattccacagttcctcccaccagttacttcaatgggcttcgaacacctagctgtgcaagccaacatgcaacaacaagcgcttgcggcgagcgtcttacaacaaccaattgcccaattgcaacaacaatccttgccacatctaacaatacaagccatcacaacgcaacagcaacaacagttcctaccagcactgagccacctagccatggtgaatcctgccgcctacttgcaagagcagctgcttgcatccaacccacttgctctggcgaacgtagttgcaaaccagcaacaacaacagttacaacagtttctgccaacgctcagtcaactagccatggtgaaccctgccgcctac

SEQ ID NO: 26581 - DNA, 162 bp, Zea mays
  Clone ID: LIB4338-011-C7_FLI
acccgtgttctgtgtcttgagcgcccgagagataaggattcttcctgtgcaagtttttggtgccctgttcattgaacactttgtttgattccagttaaggatttgaatgatgctgtgtaaaacaatgacttgtctgcaattagttatcaactactgctattt

SEQ ID NO: 26582 - DNA, 241 bp, Homo sapiens
  Clone ID: LIB43-47-B7_FLI
gtatgagtgaaaagatgtcaaaattattattaaacccaaataacaaatgataatgtgctgcatgaggctccactgctcctctggtataaagtatgtttcactcttgggtggcccctttctcagctactcagccccttgttggttctatccttactctctccacaagaaatacaagcagagaataaataaatcattttaaagcaggggtggaagcccttgcccttttcctttctaccttttt

SEQ ID NO: 26583 - DNA, 670 bp, Homo sapiens
  Clone ID: LIB43-49-A12_FLI
gagatactttttaggtcaatgacaggatttgattttttagcaaaattttattaatagctaaagcaatgtattgatttacactctgatgcaagtaatttatctcttcattgactggtagcaaccaattcatggaccagtaccatggaccacactttgagaaacacttctttggataataatagatatcctgggatagtgcatgttcaccatctattttgtcagataatggggccttttaaaaaataatactttgctttcatgatatattgtattttgtggaaagttaagtttagcaatatagactctaaaagcaaattaaatttttttaagccataagaaattatactatatcccagtatctgtatgtctgtataaagcagtgtattatcatgttttcatttctgtgattgtaagttaagagtcttaactgcagaggtattgtggaaagtagtagccttaagcataataaaatatggtctcttgggtactccctctggccattaccacattcttagattatatgtgtccatctttgcagctttctgagagtaattttatttgttgtcttctgaaatgtacatgtatacatgtacctactgagtgctatgtgatttttaaaaatgtattactgtagaatgcttctgcaaattcaataaagttgttaaatttg

SEQ ID NO: 26584 - DNA, 836 bp, Homo sapiens
  Clone ID: LIB43-66-A8_FLI
gcgcagcgagttttggccagtggtcgtgcagtccaaggggctggatggcatgctggacccaagctcagctcagcgtccggacccaataacagttttaccaagggagcagctttctatcctggccacactgagcccaccccaggacacctctgaagtaccttgctggagaaatgaggagccacagaattcctcccacactccacaccagctccaacccccaagagtattcgagcctttacaactgaagacagcagccagttaacatttagagtgaaggccaagcgtaaaacaagaaatgacccttggcccactctcagaatgtggcgaatgagatggaggaggaggaggctggatttccttggccacaagaatttcctctctcaccaactgttagtgaccctggttcacgtatcccatctctagcccaagaatcactcgtggctcttggcatggctgtctctaagacaggaattctctcactcccttctacaacacatctccccaggcatggttgccaagcctcccagtgccatcagccctcctaaccacaaatatttgggccagttgcttagctctgttcagcagctccatcacctattcaggtgaggccagaatctttgaagatcattcacctcgtgcgagaaatttatcctattattggagtgtgtgaaccattggaaatccacagaatgtatcgctggttcagaagagggcaagagggcagggcagcccatcagtggctggttgtaaaggcatcccaatgggctgccccactcttagtcatggatcttccattctaggtaggagtaggacaattaaagagcattctcatatta

SEQ ID NO: 26585 - DNA, 1844 bp, Oryza sativa
  Clone ID: LIB4370-006-F8_FLI
ctccactccactctcgcgttcttgtggagtcgtgctccactccgggaaggaaggagtgggtgggtaggtgagtggagttggtcgatggcgattggggcgttcgtggagagcggcggcggcggcggcgggggagggggaggagggtacggcgggcgggtgacggcgtacgtggtgctgacctgcgtcgtcgccggcagcggcgggatcctcttcggctacgacctcggcatctccggtggtgtgacctcaatggactcgtttctgaagagattcttcccggatgtgtaccagaagaagcaggacaccagagtgagccactactgcgcgttcgacagcgagctcctcaccgtgttcacctcgtcactctacatcgccggcctcgtcgcgaccctcttcgcgtcgtccgtcacaaggaggtatggccgccggacgtccatgctgatcggcggcaccgtcttcatcgccggctcggtgttcggcggcgccgccgtcaatgtgttcatgctgctcatcaaccggatcctactgggaataggtctcgggttcactaatcagtcaatcccactgtacctgtcagaaatggcgcctccacgataccgtggggcgatcaataacggcttcgagctctgcatcagcctcggcattctcttcgcaaatgttcttaactattgcgttgtgaaaatcacagctggatggggctggaggatatccctatccatggctgcagttcctgctgcattcctaaccatcggtgcggtcttcctcccagagacaccgagcttcataatcgaacgcgatggcgacactgacaaggcaaggatcctactccagagacttcgtggcaccacttcagtccagaaagagcttgatgacttagttgctgctagcaacctctccaggacagttcagtatccgttcaggaatatattcaagaggaaatacaggccacagcttgtcatagcactcctggtccctttcttcaaccagcttactggaatcaatgtgatgaacttctatgcaccggttatgttcaggacgattggtctgaaggagagcgcgtctctcctatcctcagtggtcaatcgactctgcgcaactttcgccaatatcatggcgatgatcgttgtcgacaggtttgggcgtagaaagctcttccttgtaggtggtattcagatgatcctttcccagcttgctgtgggtgcaatcctggctgcagagttcaaggactatggatccatggacagagagtatgcttaccttgtgttgatcaccatgtgtgtgtttgttgctggctttgcatggtcatgggggccattgacattcttggtcccaactgagatatgtccacttgagatcagatcagcagggcagagtattgttgttgcagtggtcttcctgatgacatttgtgattggacagacattccttgcagttctatgccgcatcaagtcagggacattcttcttctttgcaggatggatctgcttgatgacagtgtttgtttatttcttcctgccggagacaaagaagctgcccatggagcagatggagcaggtctggaggaagcattggttctggaagaagattgtaggggaggaggaggaaaaacaagcagagaaaacagctctccctagcatgtaaagccctatgaattggaatgtatttgaccatacaaaaaccatacaaagtgtagggttctaattagcaaatgtaagtttgtaattcttctgtctaaatgtagtgtgttgaggtggtcagttgccgtgactggctctttcagatggtaattacaaagaaatgtaacattaatgttgtaacaagggtgccattttgtttctgattcc

SEQ ID NO: 26586 - DNA, 1970 bp, Oryza sativa
  Clone ID: LIB4370-006-H11_FLI
tcgatctcgccttccgctttcccaaatccctagactgacctcctcctgctgctgcttgcgttgcgttgcgttgcgttgtctctttctccgatcagcgccgatgcggtggaagcttaagtcgtcggcgtacaagcgcgtgccgtccagggacgccgccatggatctcgacgtcgagacgccagcgaaaatggcggacggcggggccccgtcgtggcgcatgtcgctgccgcacgtgtgcgtcgccacgctcacctccttcctcttcggctaccactccggggtcgtgaacgagccgctcgagagcatctccaccgacctcggcttcgccgggaacaccctcgccgaaggccttgtggtgagcatctgcctgggtggtgcgtttgttgggtgcctgttcagtggatccatcgctgacggaatcggcaggcgtcgcgcgtttcagctcagtgcgctgcccatgatcatcggcgctgccgtaagcgctctcaccaatagtctggagggtatgcttcttggaagatttttggttggaacagggatgggattaggtccaccagtagcttcactgtacataacagaggtttctcctccttcagtgaggggcacatatgggagctttgttcagattgcaacctgccttggaatcgtagtatctctcctaattggtacacctgtgaaggatattgatagatggtggagggtgtgtttctgggttgcagctgttccagcaactttacaagctcttggaatggagttctgtgctgagagcccccagtggctgtataagtgtggaagaacgactgaagcagagatacaatttgaaaaacttctaggtcctcttcatgttaagtctgctatggcagaactctcccgatctgaaagaggcgatgatggagaaaatgtgaagtattcggaattgttttatggtcgcaactttaatgttgtttttattggcacaacgctctttgctttacaacagttatccggcataaattctgtgttctatttctcatcaactgtgttcagaagtgtgggtgtgccccctaaccttgcgaacatatgcatggggatagcaaatttatcaggctcaattgtagctatgcttctaatggacaaactaggaaggaaagtacttctttcagggagcttccttggcatggcctttgcaatgggacttcaggctgttggagcaaatcgtcaccaccttggttctgcaagcgtatatctttcagttggtggcatgctattgtttgtcttgacattttcgttaggagcaggtccagtgccaggacttcttttgcctgagattttcccaaacaaaatacgggccaaggctatggctctgtgcatgtccgtgcattgggtggtaaatttttttgtcagtttgttgttcttgcggcttctggagcaacttggtccacaagttctgtacacaatgttttcctcagcttgtgtggtagcagcaatatttgtgcggcgccatgtggttgaaacaaagggaaagactttgcaagagatagaagtttcgcttctacaaacacaataaagatttcatcagcgagtttgaggcaacaacaacctacatgattagcatctgacactatacttgttgctgaatacctgctgggaaagtctaccgtgaaagttgatcactgaaccaagccaacataccacggacaggcagcgccctacactggaccagggaagtacccagacatgcacctgtgaccagtaagggcgacctagctcgtgcataaaccatccatgtagtgaggttgcatctgtatagttggtcttctgctagatgtatctggtaatctgtgttgtcttcatcatttgtcatttgtacactgtcagtatggagaaaaaaagacgggaagtgtggttactgatggccatagtttgaaccgtggatacgttttttttactgtttaaagaggaataacagcactggctctgccagctacatg

SEQ ID NO: 26587 - DNA, 2222 bp, Oryza sativa
  Clone ID: LIB4370-017-D9_FLI
aacatttccttgtccctcgccttcctcgcctcgcctcggctctcacacgacgcctcttcctctcgctactactagctcaagctaagctagcaagagcattccttgggctttttttcttgttcggggttgagaggcaatggcggtgatgactgatgtgtcgaccaccgggacggcactccggaccccggcggcgggggcggtgaaggagggcgacgtcgagaagctccggttcatcgacgagatgaccaccaacgtcgacgccgtgcaggagcgcgtcctgggggagatcctcggccgcaacgccggcacggagtacctgaccaagtgcggcctcgacggcgccaccgaccgcgccgccttccgggccaaggttccggtggtgtcgtacgacgacctgcagccgtacatccagcgcattgcgaacggggaccgctcgccgatcctgtccacccaccccgtctccgagttcctcaccagctccggcacgtcggccggcgagcgcaagctgatgcccaccatcatggacgagctcgaccgccgtcagctgctctacagcctcctcatgccggtcatgaacttgtatgtgcctgggcttgacaaggggaaggggctctacttcctgttcgtcaagtcggagacgaagacgccgggaggcctgacggcgaggcccgtgctgacgagctactacaagagcgaccacttcaagaaccggccgtacgacccgtaccacaactacacgagcccgacggcggccatcctctgcgccgacgcgttccagagcatgtacgcgcagatggtgtgcggcctgtgccagcgcaacgacgtgctgcgcctcggcgccgtgttcgcctccggcctcctccgggccatccgcttcctccagctcaactgggagcagctcgccgacgacatcgagtccggcgagctcacccctcgcgtcaccgacccgtcggtgcgcgaggctgtcgccgccatcctcctcccggaccccgagctcgccaagctcatccgcgccgagtgctccaagggcgactgggccggcatcatcacccgcgtgtggccgaacaccaagtacctcgacgtcatcgtcaccggcgcgatggcgcagtacatcccgaccctggagttctacagcggcgggcttcccatggcgtgcaccatgtacgcgtcatccgagtgctacttcggcctcaacctccgccccatgtgcgacccctccgaggtgtcctacaccatcatgcctaacatgggctacttcgagttcctccccgtggacgagaccggcgcggcttcgggcgacgccacccagctcgtggacctcgcccgcgtggaggtggggcgcgagtacgagctggtgatcaccacctacgccgggctgaaccggtaccgcgtcggcgacgtcctccgcgtgacggggttccacaacgcggcgccgcagttcaggttcgtgcgccgcaagaacgtgctcctctccatcgagtccgacaagaccgacgaggccgagctgcagcgcgccgtggagcgcgcgtcggcgctgctccgcccgcacggcgcgtccgtggtggagtacaccagccaagcgtgcaccaagcgcatcccgggccactacgtcatctactgggagctcctgaccaagggcgccggcgccacggtggtggacgcggacacgctgggcaggtgctgcctcgagatggaggaggcgctgaacacggtgtacaggcagagccgcgtcgcggacggctcgattgggccgctcgagatccgggtcgtccgcccgggcacattcgaggagctcatggactacgccatctcccgcggcgcgtccatcaaccagtacaaggtgccacgctgcgtcacgttcccgcccatcgtcgagctgctcgactcgcgcgtcgtgtccagccacttcagcccggcgctcccacactggactccggcgcgacggtccgaatagtcggtcaaatccccacctcgtcgttggaccgtgtccaagaatctgaagtagtagaagccggatgcctccacctaaaaacacttatctgttatttttggaattaattttgatggttgctgtcaactctgtcagttagtggcaagagggtacctctgatgtgagggagagaactgcagaacgaacggaagaaagtgttgatgtaagaggttaccactagtagtactgtttgtctgtatcaggaatgtgattataatttaacctgtcctcc

SEQ ID NO: 26588 - DNA, 1479 bp, Oryza sativa
  Clone ID: LIB4370-019-F2_FLI
caaacaaagaaagaaaagcatcacaaatctcacgcactgtctctcgttcgcgcaaagcacgctgcttttctccgctttgcgagcaccatagcctagcccaccatgtgcggcggcgccatcctctccgacctcatcccgccgccgcggcgggtcaccgccggcgacctctggctggagaagaccaagaagcagcagcagcagaagaagaagaacaagggcgcgaggaggctgccactgcgccaagaggaggaggatgatttcgaggccgacttcgaggagttcgaggtggattccggcgagtgggaggtggagtccgacgccgacgaggccaagccgctcgccgcgccccggagcggcttcgctaaaggtggattgaaaaacactactgttgctggtgctgatgggcctgcagcaaggtctgctaaaaggaagagaaagaaccaattcaggggtatccgccagcggccatggggcaaatgggctgcggaaatcagagatcctcgcaaaggtgtccgcgtctggcttggcaccttcaactctcctgaggaagctgccagagcttatgatgctgaagcacgaaggattcgaggcaagaaggccaaggtcaatttcccagatggggctccagtggcttctcagaggagtcatgctgagccctcctccatgaacatgcctgctttcagcatcgaagagaagccggccgtcatgtcagcaggcaacaaaaccatgtacaacacaaatgcttatgcctaccctgctgttgagtacaccttacaggagccatttgtgcagattcagaatgtctcatttgttcctgcaatgaacgcgattgaggatactttcgtgaacctgtcctctgatcaagggagcaactcctttggttgctcggactttagccaggagaatgatatcaagacccctgacataacttccatgcttgcaccgaccatgacaggtgttgatgactccgcattcctccagaacaatgccagtgatgcaatggtacctcctgtgatggggaatgctagcattgatcttgctgacctggagccgtacatgaaatttctgatcgatggtggttcggatgagtcgattgacacccttctgagctctgatggatctcaggatgtggccagtagcatggacctttggagcttcgatgacatgcccgtgtcggccgagttctactgaggggtttggggtgtagcaactggtgcctgtatatataaggacaaatggaataaacattctggacatccaagaagcggcatgtgtctgtcgggcgcttctagttgcgctatatagctatgttagtatgttagtatgtgctgtgtctagcttagatgctgaagtctcaagtactatttggcagtgaaactatctatctgtaactgctatatgaggctggaacaagttacttagcttctaccttatctgtacttgctatagtggctgtgaaccttgtggatctgaactctg

SEQ ID NO: 26589 - DNA, 2231 bp, Oryza sativa
  Clone ID: LIB4370-026-E2_FLI
ctcggatctgtagcaaagagcgaagagcgaagctgcagcctgcagctacgcttgttcgcttgagacctagggtacgagcaacaataatagagagtgactgagtgagcgagcactgagtagcaagggcccggcacaaacaggacgcagccggcaacgtgtacgtcgaaccaaatagagaacagctagctaatcgatcggtcgccatgaccaaggacgacgccgtcccggtggccgtggcgccggcgaagcgcccgcccatcaacaagtacgccttcggctgcgctctcctcgcctccatgaactccgtcctcctcggctatgatatctcggtgatgagcggcgcgcagatattcatgaaggaggatttgaagatcaccgacacgcagatcgagatcctcgccggcgtcatcaacatctactcgctgttcggctcgctggcggcgggcatgacgtccgactggctgggccggcggtacaccatggtgctcgccgccgccatcttcttcacgggcgcgctcctcatgggcctcgccccgaactacgcgttcctcatggccggccgcttcgtggccggcatcggcgtcggctacgcgctcatgatcgcgcccgtgtacaccgccgaggtggcgccgacgtcggcgcgcggcttcctcacctcgttcccggaggtgttcaacaacagcggcatcctcctcggctacgtctccaacttcgccttcgcgcgcctccccgtccacctgagctagcgcgccatgttcctcgtcggcgccgtgccgcccatcttcctcggcatcgccgtcctcgccatgccggagtcgccccggtggctcgtcatgcggggccgcatcgaggacgcgcgccgcgtgctcctcaagacctccgactcgcccgacgaggccgaggaccggctcctcgacatcaagaaagccgtcggcatccccgaggacgcgtccgatggcgaggacgtggtcgccatcgtccgcgcgaacaaggcctcacagggagagggggtgtggaaggagctgctgctcaacccgacgaggcccgtccgccgcatgctcgtcgccgggctcggcctgatgttcatccagcaagccaccggcgtcgactgcgtcgtgatgtacagcccgcgggtgttcgagcgcgccggcattaagtcgaagacgaactcgctgggggcgtccatggcggtgggcgtttgcaagaccttcttcatcccgatcgcgacgctcctcctcgaccgcgtcggacggaggccgctcctcctcgccagcggcggcggcatggccatcttcctcttcaccctggccacgtccctgctcatgatggaccggcggccggagggcgaggcgaaggcgctaggcgccataagcatcgccgcgatgctgtcgttcgtggcgtcgttcgcctcggggctgggccccgtcgcgtgggtgtacacgtcggagatctacccggtgcggctgcgtgcgcaggcggcggccatcgggacggggctgaaccggctgatgagcggtgccaccaccatgtccttcctctcgctctccaacgccatcaccatcgccgggagcttctacctgtacgcgtccatcgccgccgcagggtgggtgttcatgtacttcttcctgccggagaccaagggcaagagcctggaggacaccgtgaagctcttcggcaaggacacagacgacgacgatgacgtcgacactagccgccatgagcgcaagaggtccactgagctgagcgctcagcactgaacagaacacgtccgtcccgagtccgagtgtggtcgaagcctattcgttctccgatagaaaaaagcttcgacatcgtgtgttgctttgtgaatcttcagattctggccacttaggttagattgctagacttttggatctcgtgcacatcagcttgttggccttagccaacatgtagggacattgagctgctttacgggggaaaagatcgtgtgatattccacactgcagggacgagtccacgtaaaaaggtcgcagtcaccgttgcggttacgcagcttggcacggatctgtgggtctttttcaccctgtacaacaattcaaccggccaatccttcgacgacagcattgagatccagggagccagggtctacctggctatgttttcttgttcagatattaccgtggcagtgtaattgtatacgagtctataatgtatatagctttttatgtatatgactcgatcacttttgtgtc

SEQ ID NO: 26590 - DNA, 1208 bp, Oryza sativa
  Clone ID: LIB4370-036-A6_FLI
gcaagccatggcagccctggcgcagctcgccggagcggcggtgcgggtggcgctcgccgccttgctggcgctgctcctcccggcctaccgcgtctacaggctcaccgcctccttcctcggcgccctcctcgccgccgccgccgacgacgacgtcgccggcaaggtcgtcctcatcaccggcgcctcctccggcatcggcgagcatctggcttacgagtacgcgaggaggggggcgtacctggcgctggtggcgaggagggaggagagcctccgggaggtcggcgacgcggcgctggcggccggctcgccgggcgtcctcgtcgtcgccggcgacgtctccagccccgacgactgccgcaagttcgtcgatgacaccatccgctacttcggtagattggatcacctggtgaacaacgcgtcgatctggcaggttggcaagttcgaagagctcaccgatgtcaaccacttcaggaaactgatggacatcaacttttggggccacgtgtatccgacccgccacgccatccctcacctgaagaagacgcgtggccggatcgtcggcgtcacctccaactcgtcctacatcttcatgccaagaaacaccttctacaatgccagcaaggcggcggcggccaacttgtacgagacgctgaggatggagctcgccggcgacggcatcgccattaccgaggtcatcccgggtgtggtcgagtcggagatcaccaaggggaagatgctcaccaaggagggcgacatgagagtagaccaagatgaacgagacgcgatcctaggggcggcgccggtggagcgcgccggcgagttcgcgagggcggcggtgcggggcgtgtgcggcggggagaggtacgtgttcgagccgcggtggtacagggcggcgtacacgctcagggtgtgcttcccggaggccctggagtggtgcgcccggctgctgacggtgtggcggctcggtccggcgacgacggacacggtgggccggtggctgctcctcggcgtccccggccagcgatggctctcccagccggcgtcgctccggtcgccggagatcaaggctcggtgaaggctggagttgtgtgctgcccggctttggctagctagctagcttcgtcgtattgagttttggtcttctctttctcaacagcagcctgcagtctgtatgtaataaacgtgttccagggtgattttcatttgtt

SEQ ID NO: 26591 - DNA, 1211 bp, Oryza sativa
  Clone ID: LIB4370-036-E3_FLI
caagttcacaacccaacacccaaaagcaaaagaaaagcagcaaccaaagatgtgcggcggagcgatccttgcggagctcataccgagcgcgccggcggcgaggcgcgtcacggcgggccacgtctggccgggcgacgccaacaaggccaagaagaagggcgcgcgcgccgacgacttcgaggccgcgttccgcgacttcgacaacgactccgatgacgaggagatgatggtggaggaggcggaggaggaggaggcgacctccgagcacaagccgttcgtcttccgcgccaagaaggcggcggcggcggcgtcgagcaggcgcaggaagccggcgcagtacaggggcgtgcggcgccggccgtgggggaagtgggcggcggagatccgcgaccccgtcaagggcatccgcgtctggctcggcaccttcaccaacgccgaggccgccgcgctcgcctacgacgacgccgcgcgcgccatccgcggggacagggccaagctcaacttcccttccgctaccacccctgacacccgcaagcgcggccgcgccaccgccgccgccgccccggccgtcaaggcgaccccggtcatcaacctcgtcgaggaggaggacgaggaggaggtcgccgccgccatggcgtccatcaagtacgagcccgagaccagcgagagctccgagtcgaacgccctcccggacttctcctggcagggcatgtcggcctccgacgagttcgccgtcgccgcggcggcgctgtcgctcgacagcgacgacgacctcgccaagaagcgtccgaggaccgagccggaggacaccaccgactccggctccggcgacgacaccgacgcgctgttcgacgcgctgctgttcgccgaccagtacaaccacttcaacggcggcgcctacgagtccctggacagcctgttcagcgccgacgccgtgcagaccaccgccgccgccgccgccgccgaccagggcatggggctctggagcttcgacgacggctgctgcctcgtcgacgtcgaggccagcttgtccttctaggctctagccgtcgtctccggcgaccctgtgactcgatcttgtaccatgtcatgtacatagaagagtggttttgccaagcaagcatgtgttcgtcctggttcctttcggtaatgaaaaattatgtgaggcttctcgttctcgtaaaagatctttttggctgtgcctttgatgc

SEQ ID NO: 26592 - DNA, 775 bp, Oryza sativa
  Clone ID: LIB4370-046-D11_FLI
tagctagtatatatctgacaaattcagagaaattcagagagtcaccgcgagagcttaagctagctagctagccggccatggcatcgcatgtggacccgctggtggtggggagggtgatcggcgacgtggtggacctgttcgtgccgacgacggccatgtcggtgcggttcgggaccaaggacctcaccaacggctgcgagatcaagccgtccgtcgccgccgcgccgcccgccgtgcagatcgccggcagggtcaacgagctcttcgctctggtcatgactgatccagatgctcctagccccagcgagccgactatgagagagtggcttcactggctggtggttaacataccaggtggaacagatccttctcaaggggatgtggtggtgccgtacatggggccacggccgccggtggggatccaccgctacgtgatggtgctgttccagcagaaggcgcgcgtggcggcgccgccgcccgacgaggacgccgcgcgcgccaggttcagcacgcgcgccttcgccgaccgccacgacctcggcctccccgtcgccgccctctacttcaacgcccagaaggagcccgccaaccgccgccgccgctactagcctccctcccctcgctcggcgtcgcccatccatccatccatggacggcgacggcgacctagctagctaataagccatcggtcggccatgctcgccgtccaaactatcatgcaccatatcatgtcgtcgtttatgtggttaattaattatttccggcgttttattaac

SEQ ID NO: 26593 - DNA, 1033 bp, Oryza sativa
  Clone ID: LIB4371-003-F9_FLI
cgcggcccgtcgacgtcgtccgccacttcccgtgctcctcctcggtcgccgcctcctcctccttgctgctgtcgcgctccaagtccaggctcgcgtctcctgcggcggcggcggcgagctccatgcggcgaaggcttgtgctcggcgtgggcgccgccgccgccccggccgtggcggcgctcgcggcctcggcgacgcccgcggcgctgcgggactgcgccgccacgctgctcatcaccgcgggcgcgtactccctggtgcgcgccttcgacgggctcacggcgcggcggctcatcgaacagaacctgagcagaaaaattgtgcatgtgctctccggagtcctgttcatgtcttcctggccactattcagtaattcgacagaagcacggttcttcgcggcaattgtcccgttgctgaactgcataaggcttctgacctacgggctccgcctttccactgatgaagctctagtaaaatcggtgacccgtgaaggaaaaccagaggaattgctgagaggtcctctgtactatgtcattgtgctgctggtcagtgttttggtcttctggcgccagtctcctattgggattgtttcgttgtcgatgatgagtggtggtgatggctttgctgacattgttgggagaaggtatggctccgcgaagctgccattcaatgagaacaagagctggataggaagcatctcaatgttcatttctggcttccttctatctgcactgatgctgttctacttctcttgccttggttacttcactgtctgctgggatctggcacttggtaaactggctcttgttgcattagcagctactgtagtggagtgtattcctgtcaatgatgttgtggatgacaatatctccgttcctttggccaccatgttggcagcctatctgttatttggctacagttcatgttgttgagactataaaatttctcccttttgcttttcatgtcctgaatttggtactgccaaacatcatagattggatctctttctgttgaatcaaaaggtattttgctc

SEQ ID NO: 26594 - DNA, 923 bp, Oryza sativa
  Clone ID: LIB4371-008-H6_FLI
gtcgccgcccctcgagctcgactacataggcctctcgcctccgccgccgccgccctcctcctcctccgccgccgccgcccgcgcggacgacgtcgacctgaagggcaccgagctccgcctcggcctccctggctccgagtcgccggaccgccgccctgcggctattgccgctgccgctgccactgccaccacccttgagctgctgcccgccaagggtgccaagcgcgtgttccccgacgaggccgcgctgacgccgcccactgccgccgccgggaagggcaaggcggcgagggagggggaggaggtgggggctgaggaggaggacaagaaggtcgccgcgccgccgcagccggctgcgaaggctcaggtggtgggatggccaccaatccgcagctaccgcaagaacacgatggcaaccaaccagataaagagcaacaaggaggatgttgatgctaagcagggtcagggtttcctgtacgtcaaggttagcatggatggtgcaccatatctgaggaaggtggacctcaaaacttacaagaactacaaggacatgtctttgggtctcgagaaaatgttcattggcttcagcaccggtaaggaaggtgctgagaaccagaaagatggtgaatatgtgttaacctacgaagacaaggatggtgactggatgctggttggtgatgttccatgggagatgttcaccgactcttgccggaggctcagaatcatgaaaggctcagatgcaattggacttgccccaagagcaggggaaaagtccaagaacaggaactagaatggttattgcccacagttgaaagcaaaacggagatattaattaactgcagggcagttcctcaaaaccataatttaatagttttacaggatcaccatatgatctgtattacatggtttgctattctgcaagt

SEQ ID NO: 26595 - DNA, 1444 bp, Oryza sativa
  Clone ID: LIB4371-010-G6_FLI
aaaaataaataaaaaaaaatcgcttggcttccccccgtctccttgcgcctccgccccctactccggcgagccgagccgccgtccgccgccgccgcatcgcgagtccttccctcgtcgggcagtcgcctgccccaggatatcaattcagccacacattccctacatcgttgctagttacacatgtagcacctctggttgaaagccaatactactactgctacctaatccaaagcaaggtgctgtaaattcaggtgatgagcaaatgcaatgtatcagccaaatcctatttccagcagtggtcagactcatggcaatcctactgctcatgagcaaatggagttagggaacaatgctattgtccctagtaacggagggaacaataaccctaatatggcggcaagacagcggttacgttggacaaatgagttgcatgaccgtttcgtggaggctgttactcagcttggtgggcctgatagagccactcctaagggagttctgagaattatgggtgtgccaggactgacaatataccatgtgaaaagtcacctacagaaataccggcttgcaaagtacattccagacccttcagctgatgacaacaaggatgaagataaagatccaaggaatctgctttctgcacttgaaggttcatctggaatgcagatatctgaagccctgaagctgcagatggaggtccagaagcggctacatgaacaattagaggtgcaaaggcagctacagctgcgaattgaggcgcaggggaagtatctccagaagatcatcgaagagcagcagcgtgtcattggtgcaggagcttccagagccacgtcaagcgaacaattgcctgactctgagaaaactaacccaccaactccagtaccaatttctgaatctccagttcagggtgcaccccatagcaagaacagtcaaagccaagttgagccgacgaagagcccttcgcatgatgatgctctcccgtgtggtgaacctttaacacctgactccagctgccggcctggttcaccgacgctcagcccaaagcatgagcgtgcagccaagagacagaggggcagtgatgcaggcgatgtcacagcattcgcagatggagaatttgtacttccaccaggcatctttgagtcaagcacaggatccgagttccaagaatgttcgatgccttattcaggccattagcctatggtgctctgatcatcagtccatcaccttgacaaagcttacatggtaagatttcatctgtagccgttggtagattttggccttgtcaacacaaatacctttagacagagagtctaggtttcaaaaggaaattgggcacatgacatgcagagtagctgtaattcttgcactgttgttagatgttcatggggactaatgtaactgatatttaattaaaaaatattattttagaatgacttatgttatgctt

SEQ ID NO: 26596 - DNA, 1797 bp, Oryza sativa
  Clone ID: LIB4371-017-F11_FLI
ttcatctcgtcctctctctcgtaactcgtaaagagatctcgtctcgcctcgggaatccaaccattgccggcgaagtagagatcgggagggcggcgccatgaacaggggcggcggcgtcggcgtcggcgatgagagcggaagcgactacgagagcggcggcggcatgcggaagccgctgctgatgcacacggggagctggtacaggatggggtcgcggcaggggagcctcaccggcgcggggacctcgtccatggccatcctacgcgagtcccacgtctccgccttcctctgcacgctcatcgtcgcgctcggccccatccagttcggattcacggggggcttctcctccccgacgcaggacgccatcatccgagacctcgacctcaccctctccgagttctcggtgttcggatcgctgtccaacgtcggcgccatggttggggcgattgccagtggtcagatggccgagtacattgggcgcaaagggtcattgatgattgctgcaattccaaacatcattggttggcttgccatctcctttgcaaaagactcatcgtttctttatatgggacgattgctcgaggggtttggtgttggtgtcatctcttatacggtgccagtttacatagcagaaatatcacctcaaaacatgagaggtgctcttggctcagtgaatcagttatctgtaaccgttggtatattgttggcatatttgctcggcatgtttgttccttggaggcttcttgctgtaataggaatcttgccttgcactgtgttgatacctggcctattcttcattccagaatccccaagatggttggcaaagatgaacatgatggatgattttgagacttctttacaagttctgaggggatttgagactgacatcagcgcggaagtgaatgatataaagagagcagtagcgtcagcaaacaaaaggacaacgatccgttttcaagaattaaaccagaagaaataccgcacacccctaatactaggaattggcctacttgtactgcaacagctaagtggaatcaatggaatattgttttatgcaggtagcatcttcaaagcagcaggtctcacaaacagtgacttggctacatgtgcacttggtgctatccaggttcttgctacaggagttacaacctggttattagacagagctggccgacggatcctccttatcatctcttctgctgggatgactctaagcctccttgcagttgctgttgtatttttcctcaaggatagcatttcacaagattctcacatgtactacaccttaagtatgatctccttggttgctcttgtggcttttgtaatcgccttctccttcggtatgggtgccattccatggatcataatgtcagagatcctcccggttagtatcaagagtctcgcaggaagctttgcgacgctcgccaactggcttacatcctttggaataacaatgacagcaaacttgatgcttagctggagtgctggagggacctttgtgtcctacatggtcgtgagtgctttcaccctcgtgttcgtcatcctttgggtgccagagacaaaaggaagaactctcgaagagatacaatggtccttccgctgagccttgtggtcttcgaaaatatggccattttttcaagtacaaagggaaggattgatttgcgcatttgcaaatcttgtgtattctatgttccgagtcaagtatactggacaaaaagcaaagtattctttctgttcatatattcttgtacaacattgtttcacgtattccagatcgacttgcaaaggcttttgtgc

SEQ ID NO: 26597 - DNA, 2012 bp, Oryza sativa
  Clone ID: LIB4371-021-H2_FLI
gctgtgaagaaaggaggacaaggctcgtaggacgtgttcaaaaggacaagatcttctttgcagtacacagtggatgaaactccaaggctgattcaatttgccagtgtgtgagaaacgagaaacaaccaagaggctcatcaggatcaagtggctgatcatcatcatctctctctaggatgtagagctagtggtgatcatggtgcaaggtgaggagagttcttggaggatggcagcaagcacccaccatgagagagcaatacctctcaaccaagcacttgcttatggagtccaagcccatgcttctccttctgttgctgctgcaccacctgccagcttcttggacttccagcctgctgccgcggcagctgcctacttcggcgagctggaggaggccctcatccatggcgccaacgccggcggcgtcgtcgatcccggcatgatcagagccgacgtgcacagcaagtcggcggcagcggcagcgacggcaggatatctcgcggccaggccccccacgctggagatcttcccttcatggccaatgaggcagcaacagcagctacacagtgggaattcgcagtcagtcgggagcaccactgactcgagctcagcccagaacacaatgccgcagatggagttggtgtccccagcgagtatcagggcctcctccgagcaccagcaccagcagcagcagccggggcaggaggtcatgatggtgaccactgatgattacagctacaagccaggcctcgctgctgcctccccaagctttcagcagcagcatcagctccagcaccaccagcagcagcagctgcacggaggaggagaccatgacaagaggaagcatggatccacaagaaaagatggcaagtcagtggatgccaagacagaacggagattagcgcaaaacagagaggctgcgaggaagagcaggctgagaaaaaaggcttatgtgcaaaacctagagaccagcagggtcaggcttcagcagatcgagcaagaactccaaagagcacggtcacagggcctgtttcttggggggtgcagagcagcaggcgacatgagttctgtaaaatcgtttgcaggcgcggccatgttcgacatggagtacgcgcgctggctggacgacgacagcaagcggctgaccgacctccgtggcggcctgcaggcgcacctgctggacaccaaccttggcctcatcgtggaggagtgcatgcagcactacgacgagctgttccagctcaaggcggcgctcgcgcgctccgacgtcttccacctcctcaccggcacgtgggctacccccgccgagcgctgcttcctctggatgggcggcttccgcccctccgaccttctcaagatactgatacagcagctggacccgctgacggagcagcagatgctggggatctacagcctgcagcagtcgtcggagcaggcggaggaggcgctcgcgcaggggctgcagcagctgcaccagtcgctcgccgacaccgtcgccgccggcacgctcaacgacggccccggcgtgcccaactacatgagcctcatggccatcgccctggacaagctcgccagcctcgaaagcttctaccagcaggctgacaatctgaggcaacaaacgttgcatcagctgcggcggattctaacaacccggcaggcggctcggtgtttcctctccattggggagtattaccgccgcctccgtgctctcagcaacctctggtcttcacgtcctcgcgagaacttcattggcaccgagagcgtcagtcccacaggaaccgagctgcaaccgatgcataatcagcctcagcagaatcagtactcaggattttgagagcttctcctggaggatgtaaactccggccaaaagtgatgttagaaagagagggtgggagagggagaggggttgtaatgttctattattaaagtattgagaaagcaacatcactaggaaaaggaagaggcaaaaatttgttgaggtgcaatgcaatgctggtcactggctcacttgttcc

SEQ ID NO: 26598 - DNA, 2736 bp, Oryza sativa
  Clone ID: LIB4371-029-F9_FLI
ttgagaactgcgagttttaatctgattctagagttgaagataacgaaaggagcaagggtgaactctgctgacttggtttttgtgtgcacagaccaactgcagctgaggatttagtagattgactgcaattggatcaattcaagtagaggtctaggaggaggtatgaggtactacttgcgtcaggtccagcgtttggttggagatatggaaggaggagtgcttttgtttgtggaagacctcaactctaactgacaaagcgaccaattgccaacacttctgttatatttcttctttttcttgaattgggaatggagattaattcctctggtgaggaagcggtggtaaaggtgaggaagccatacacaatcacaaagcagagggagcgttggactgaggcagagcacaacaggttccttgaagccttgaaactgtatgggagagcctggcagcgcatagaagagcatgttgggacaaagacagctgtgcagatcagaagtcatgctcaaaagttcttcaccaagttggaaaaggaagctatcaacaatggcacttctccaggacaagctcatgacatcgacatacctccaccacgaccaaaaagaaaacctaacagtccatatcctcgaaaaagttgtctcagctctgagacatccaccagggaagttcaaaatgataaggcaacaatatcaaatatgacgaacaatagcactgcacaaatggcaggtgatgcagctcttgagaaacttcaaagaaaggagatatctgaaaaaggaagttgctccgaagttcttaatctctttcgagaagtcccatcggcatcattttcttcagttaacaaaagctcttcaaatcatggtgcatccagggggctggaaccgactaaaacagaagtcaaagatgtggtcatcttggaaagggattctatttccaatggtgcagggaaggatgcaaaagatatcaatgatcaagaaatggaaaggctcaatgggatacacatcagctcgaagcctgatcattctcatgaaaactgtttggatacctcaagccaacaatttaagccaaaatcaaactctgtggagacaacatatgtggattggtctgctgcaaaagcttcacactaccaaatggacagaaatggggttactggctttcaagccactggaactgaaggaagccatcctgatcaaacaagtgatcaaatgggaggagccagcggaactatgaatcaatgcatccatccaacacttcctgtggatccaaaattcgacggcaatgccgcagcacagccctttcctcacaactatgcagcctttgcaccaatgatgcaatgccactgcaaccaagatgcctacagatcttttgccaatatgtcatccaccttctccagcatgcttgtctccacattgttgtcaaaccctgcaatccatgcagctgccaggcttgcagcatcgtactggcctacagtagacggcaatactcctgatccaaatcaagaaaatctttctgagagtgctcaaggaagccacgctggctctcctcccaacatggcatctattgtcacagctacagttgctgcagcatcagcatggtgggcaacacaaggtcttctccctctttttcctccacctatagcttttccatttgttccagctcctagtgctcccttttccacagcagatgttcagcgagctcaagagaaagatatagactgcccaatggataatgcacagaaggaattgcaagaaactcggaaacaagataattttgaagctatgaaggtcatagtgtcttcagagactgatgagagtggaaaaggagaagtgtcgctccacactgagttaaagatatctccagcagataaggccgacaccaaacctgccgcaggagctgaaacaagtgacgtttttggaaataagaaaaagcaggatcgctcttcatgtggttccaacacaccgtcaagtagtgatatagaagcagataatgctcctgagaatcaagaaaaggctaacgacaaggcaaagcaagcatcttgcagtaactcttcagccggtgacaataaccaccgtagatttaggagcagtgcaagcacaagtgattcatggaaggaagtttctgaagagggtcgtctggcttttgatgcactgttcagtagagaaaggcttccccaaagcttttctcctccgcaagtagaaggatcaaaggagattagcaaggaggaagaagatgaagtaaccacggtgacggttgacctcaacaagaatgccgctattattgatcaagaactcgacacagcggatgagccaagagcttcctttcctaatgaattgtcaaacctgaagctgaaatctcgcaggaccggtttcaaaccatacaagaggtgctcagtggaagcgaaggagaacagggtaccggctagcgatgaggttggtaccaagaggattcgtcttgagagcgaagcatcgacatgatttgctttccacctggttgctggcctctaccaagtcagaagttaaatttacatccgagctaccataggacttcagaccttccaatgcattacctcacaaactcaatttattgtgtgttgtatcttaatgcttgccaagcagctcctatagactgcttttaaaccgtatctcatagacttttgattagcatttaagcgactgctaaactttcttcataaaagggtattatccttattatgcattatagtctggggaaggtaataagtgg

SEQ ID NO: 26599 - DNA, 519 bp, Oryza sativa
  Clone ID: LIB4371-032-G2_FLI
caacacccaaaagcaaaagaaaagcagcaaccaaagatgtgcggcggagcgatccttgcggagctcataccgagcgcgccggcggcgaggcgcgtcacggcgggccacgtctggccgggcgacgccaacaaggccaagaagaagggcgcgcgcgccgacgacttcgaggccgcgttccgcgacttcgacaacgactccgatgacgaggagatgatggtggaggaggcggaggaggaggaggcgacctccgagcacaagccgttcgtcttccgcgccaagaaggcggcggcggcggcgtcgagcaggcgcaggaagccggcgcagtacaggggcgtgcggcgccggccgtgggggaagtgggcggcggagatccgcgaccccgtcaagggcatccgcgtctggctcggcaccttcaccaacgccgaggccgccgcgctcgcctacgacgacgccgcgcgcgccatccgcggggacagggccaagctcaacttcccttccgctaccacccctgacacccgc

SEQ ID NO: 26600 - DNA, 1355 bp, Oryza sativa
  Clone ID: LIB4371-035-C11_FLI
ctcaagctcaagcttaaaattagcttaagattaagccattaattagccaagctaactaagcaagcaagatcttgttgaggagatgatggcaagcgacggcagcgcgagcccggccagctgcggcggcgcggcgtgcggggtgtgcggcggcgcggcgacggtgtactgcgcggcggacgcggcggcgctctgcgtgccgtgcgacgccgcggtgcacgcggccaacccgctggcgtcgcgccacgaccgcgtgccgctcgcggtcgccatggcggcggcgagctccggggtgtacgaccacctgttcgcgcccgacgacgacgccgcctcgtcatgggctgccgccgcggcggcgggggcggcggtgcaggggcaggggcaggggagccccaacgacagctcgtcgagcttcaccaacgacagcgccggcggcggcggcggcggcggcgccgagaggagcctctttgacctgctctccgacgtcgacatcatgtcctgcggcggcggcggcctcgcgtcgtcgttcgacggcgccgccgcgccgccgctgtggctgcacccaggccagctcgccgcgttgacgccgtggtcaccggccgactccgtcgtcgtcccgacctcggcggccggcgcggtcgccgcggcggcggcggcgagggaggagagggtgaggcgctaccgggagaagcgcaagaaccgcaagttccagaagaccatccgctacgcctcacgcaaggcctacgccgaggcgcggccgaggatcaagggccgcttcgtcaagcgcgccaccaccgccgccgcctcctcgtcatcggacgacgacagcacggccgccgccggagtcagcggcgccggcggcgccggcgccgccgccacgaaggaggccaagttctggctctccttctccgacgacggccgcgccgacggcgtagggttctacatggacagcaccaccgctgccaccgcggcctacggcgtcgtgccaaccttctagaaagttccagaaacccctctcccaatgggcgccaacgcggcaacggcaatggcgtttgcccgtcttaagacaaacattaagaaaagggcaacatgtcataatctcgccgtcatgctaatggtggcgcatggtgttcatgtcgtcgtcttcttcgccgtcgctttctgattccgtggtggaaacccgcatcactatttttaactgctgatgcgggttttcggtgggtggaattccaaattccatcggttaaaattagggggattattattaatgcattgtgacttttgtaagataactcatgtagttaatttctatggttcagtgctgaaataataaaaaaaatccaatgtgatttttctct

SEQ ID NO: 26601 - DNA, 1532 bp, Homo sapiens
  Clone ID: LIB43-85-D7_FLI
gctgcgacatcgattttgacgactgccaagacaacaagtgtaaaaacggagcccactgcacagatgcagtgaacggctatacgtgcatatgccccgaaggttacagtggcttgttctgtgagttttctccacccatggtcctccctcgtaccagcccctgtgataattttgattgtcagaatggagctcagtgtatcgtcagaataaatgagccaatatgtcagtgtttgcctggctatcagggagaaaagtgtgaaaaattggttagtgtgaattttataaacaaagagtcttatcttcagattccttcagccaaggttcggcctcagacgaacataacacttcagattgccacagatgaagacagcggaatcctcctgtataagggtgacaaagaccatatcgcggtagaactctatcgggggcgtgttcgtgccagctatgacaccggctctcatccagcttctgccatttacagtgtggagacaatcaatgatggaaacttccacattgtggaactacttgccttggatcagagtctctctttgtccgtggatggtgggaaccccaaaatcatcactaacttgtcaaagcagtccactctgaattttgactctccactctatgtaggaggcatgccagggaagagtaacgtggcatctctgcgccaggcccctgggcagaacggaaccagcttccacggctgcatccggaacctttacatcaacagtgagctgcaggacttccagaaggtgccgatgcaaacaggcattttgcctggctgtgagccatgccacaagaaggtgtgtgcccatggcacatgccagcccagcagccaggcaggcttcactgcgagtgccaggaaggatggatggggcccctctgtgaccaacggaccaatgacccttgccttggaaataaatgcgtacatggcacctgcttgcccatcaatgcgttctcctacagctgtaagtgcttggagggccatggaggtgtcctctgtgatgaagaggaggatctgtttaacccatgccaggcgatcaagtgcaagcatgggaagtgcaggctttcaggtctggggcagccctactgtgaatgcagcagtggatacacgggggacagctgtgatcgagaaatctcttgtcgaggggaaaggataagagattattaccaaaagcagcagggctatgctgcttgccaaacaaccaagaaggtgtcccgattagagtgcagaggtgggtgtgcaggagggcagtgctgtggaccgctgaggagcaagcggcggaaatactctttcgaatgcactgacggctcctcctttgtggacgaggttgagaaagtggtgaagtgcggctgtacgaggtgtgtgtcctaaacacactcccggcagctctgtctttggaaaaggttgtatacttcttgaccatgtgggactaatgaatgcttcatagtggaaatatttgaaatatattgtaaaatacagaacagacttatttttattatgagaataaagactttttttctgcatttgg

SEQ ID NO: 26602 - DNA, 1589 bp, Glycine max
  Clone ID: LIB4391-021-A5_FLI
tggctggttcaactgaggtgatggctttgaatttgccttctcccgcccaagtgaagcccttatttttctcttcaaataactccacaaaacttccaggtagcttttctttgaagagaaaagatagtgacacaacagtagagagacgagtttattgctctgccgctgctcaatcaccaccaccagcatggccaggaacagctattcccgagccttctgatttcaagacatgggatgggcaaaaacctatttctgtcttaggatctacgggttcaattggaactcagacactgagtatagtggctgagttcccagaaagatttaaagttgtgagccttgctgctggctctaatattactcttcttgctgaccagattaaaacatttaagcctgaagttgttggtcttagaaatgagtctttaattgatgaactcaaagaggctttggctgatgtggatcacaaacccgaaatcatccctggagagcaaggagtcattgaggccgctcgtcaccctgatgccaccactgtagttataggcatagttggttgtgcaggattaaagccaacagttgcagcaattgaagcagggaaagacatagcattggccaacaaagagacaatgattgcgggagccccttttgttcttcctcttgctcacaaacataacataaaaattcttcccgctgattcggaacattctgcaatttttcagtctatccaggggttgccaaagggtgcacttaggaaaatccttttaactggatcaggaggtgctttcagagaatggcctgctgaaaagatgaaagatattaagcttgctgatgcattaaagcatcccatatggagtttggggagaaaaataactattgactctgctacccttttcaataagggtctagaagtaattgaagcacattacttgtttggagcaagctatgacgatattgagattgttattcatcctcaatctatcatacattccttggttgaaacgcaggattcatctgttattgcacagttggggatacctgacatgcgcttaccgctcctttatacattatcttggccagaaagaatctattgctctgaagtaacttggcctcgtcttgatcttagcaagtatggttctctaacattttatgcaccggatgacaagaagtttccatcggtgaatctttgctatgctgcgggacgtgctggaggcaccatgacaggagttcttagtgcagcaaatgagaaagctgtagaaatgtttgttgaagaaaagattagttatctggatatattcaaggttgtggaactaacttgtcaggaacatcaaaaggaattagtagcatctccgtcactcgaagaaattattcactatgaccaatgggctcgacaatatgctgctagtctgcaaaaagcttcaagtgtttgaatcccatatttctgacatattttagaagttggggctgtggtggattgttggcaactcctagcatattttgtaaatgtatttgttggttcatcaatcttgtaaaatgtaaaggggtagctatataaagtatatgtactcctaaaagggtttcaataaaagttctagcttcag

SEQ ID NO: 26603 - DNA, 1236 bp, Homo sapiens
  Clone ID: LIB43-95-B8_FLI
ccagaggagaaggccaccccgcctggaggcacaggccatgaggggctctcaggaggtgctgctgatgtggcttctggtgttggcagtgggcggcacagagcacgcctaccggcccggccgtagggtgtgtgctgtccgggctcacggggaccctgtctccgagtcgttcgtgcagcgtgtgtaccagcccttcctcaccacctgcgacgggcaccgggcctgcagcacctaccgaaccatctataggaccgcctaccgccgcagccctgggctggcccctgccaggcctcgctacgcgtgctgccccggctggaagaggaccagcgggcttcctggggcctgtggagcagcaatatgccagccgccatgccggaacggagggagctgtgtccagcctggccgctgccgctgccctgcaggatggcggggtgacacttgccagtcagatgtggatgaatgcagtgctaggaggggcggctgtccccagcgctgcgtcaacaccgccggcagttactggtgccagtgttgggaggggcacagcctgtctgcagacggtacactctgtgtgcccaagggagggccccccagggtggcccccaacccgacaggagtggacagtgcaatgaaggaagaagtgcagaggctgcagtccagggtggacctgctggaggagaagctgcagctggtgctggccccactgcacagcctggcctcgcaggcactggagcatgggctcccggaccccggcagcctcctggtgcactccttccagcagctcggccgcatcgactccctgagcgagcagatttccttcctggaggagcagctggggtcctgctcctgcaagaaagactcgtgactgcccagcgccccaggctggactgagcccctcacgccgccctgcagcccccatgcccctgcccaacatgctgggggtccagaagccacctcggggtgactgagcggaaggccaggcagggccttcctcctcttcctcctccccttcctcaggaggctccccagaccctggcatgggatgggctgggatcttctctgtgaatccacccctggctacccccaccctggctaccccaacggcatcccaaggccaggtgggccctcagctgagggaaggtacgagctccctgctggagcctgggacccatggcacaggccaggcagcccggaggctgggtggggcctcagtgggggctgctgcttgacccccagctcaat

SEQ ID NO: 26604 - DNA, 448 bp, Allium porrum
  Clone ID: LIB4502-004-G9_FLI
aggcgcgagtctccatagctgcatgacgccgcatggaccggatactaagagctatgaggcaatgatagctggtggtgaaaatgcagaaccctacagaataagggataccatggcttttatgttcgagtcatgcttgatacctcgtgtatgcccttgggctctggaatctccatatagagattctgactattatcaatgctggattggactcaaatcacacttctatgtggacaatgagaagtctgctaatgtgaatgatgctggagaagtccataatggagaaaatgttaaatagttgaaatgggcagagagctagttaggtcttgatcgactgtaataccctgcgctttaattaattaattaagttataaatattaaaatgagaaaatagatatgtttggaattgttgtgatttgaccattaaacttatatcgttgtgttcatgacc

SEQ ID NO: 26605 - DNA, 1348 bp, Allium porrum
  Clone ID: LIB4503-010-A12_FLI
atttcctcgtccttccctcaccgctatctccaatccagttagagatgtcgaaaactggagctttagatcttgcatctggattgggagggaaaattgcgaagaaggaagttcagtctgctgttgaacagtatgagaagtatcatgtgtatcatggtggggacgaggaaactagaaaatccaactacagtgacatggtaaacaaatactatgatcttgcaactagcttctatgaatttggctggggagaatctttccactttgctccaagatggataggagaatctttgcgtgaaagcattaaaagacatgaacactttcttgcattgcagcttgggttgaaaaagggaatgaaggtgttggatgtaggatgtggtattggcggtccattaagagagatagctaggttcagctcaacgtccattactggattgaacaacaacgactatcagataacaaggggtcaagaactgaacaaggcaacaggattgggtgaggattgcaattttgttaaggctgacttcatgaagatgccatttgaggagaattcatttgatgctatctacgcaatagaagcaacatgccatgctcctgatgcgcttggttgttacaaggagatatatagagtattaaagcccggtcaatgctttgctgcttatgaatggtgtataactgatcactataaccccaataatgaagagcatcaaaaaattaaggctgaaattgaacttggtaatggccttcctgatgtaaggtccactactcaatgccttgaggcattaaaacaagctggttttgaggtcatatgggataaggaccttgccgtagattctccagtatcttggtatttgccactggacacaagcagattctccattactagttttcgattgacagcgtttgggcgtttcattacaaaatccatggttaaaaccctagaatacatcggtctagcaccagcaggaagtgacagagtgtcttctttcctcgagaaagcagctgaaggacttgtcgaaggtggaaggaaggaaatatttacgccaatgtacttcttcctggttcgaaagcctatctcacaatagtagctgtagaatccataggaggtttctgtccttctggaagtttgtggtttagcgttgtttttacctactattcattcttgttactgaaatttaattcattgctgttttcggagattcgaggaattgggtttacttcgactttggctggcaaattctttagttttctgaaacagtggaacttgttatatatatttttagtactgtgttgtagaaaacataacgttttctgtgtcagactcgtgttatatcatttcatttctttttatgtt

SEQ ID NO: 26606 - DNA, 2246 bp, Oryza sativa
  Clone ID: LIB4506-006-F3_FLI
gcctcaaaggatacatatatatagtttccctacaatacaatggagcctgtcaatgatttccaggaaggcatttcaacagagcatgcctttgaggcagagcctgtgccatcattgtcggaaacaataacgccacgatcaatggtggtgagcttcatccttagtgtaactctcagcatcgtcgccatgaaggtcaccttgagctctggcttcattccgtcgttcagcatcccagccggcctcctcggtttttgtgtatcccgtgcgtcgatccgcattcttgactacttcgcagtggcacaactaccattcacacgccaagagaacaccatcatccagacctgtgtcgtcgcatgcacctcgatcacattcaccggtggctttgggacatatattcttgcaatgggaaagaaagcagctgtaggggatgtcaatgcccaaaataacgttgaggagccaagctttgccaggatgatcaccttcctcttccttatcagctttgctggcatgttcatcatcatgcccttcaggaaggtcatgatcattaggcaccggttgacattccccagcggcacagcaacggcgcacctcatcaatagcttccatacacctcaaggtgtcaagcaagcaaggaagcaagtgacattattgtttaaatcgtttggaggaaccatcgcatggtcgctcttccagtggttcttcgcctctgggccgggctgtggcttcaaattcttccccacatttggcctcgaggcatataaacacggattcttcttcgatttcaccatggccaatgtcggcattggcatgatgtgcccgtacatgatcgtgttctccgttttcattggcaccatcatctcgtgcggtgtaatttggccgtacatcgagtcaaaggagggcatctggtacccaagcaaccttgggcccaacagccttaacggcatcagaggttacaaggtgttcatcggcttgtccatgataatggctgactgcctcttcgtcttcctctgcatcatggtccggacaacatgtgccatgatcaagcggcgtcggcaggcaatgcaaggtggtggcggtaatgcgcagccattccagggtatcgacatcgccgatcagccggtgaagagcttcgatgatcgccgcagggcgcaggtgttcctccgggacgagataccggactcggtcaccattggctgctatgtcctcctgtcgatcatctccatcgccgccatccctcacctctacccacagatgaggtacagccatgttgcgctcatctacctcgccgcgcccgtcttcgccttctgcaacgcctacggcttcggcgtcaccgacatgaacctggctagcacctattgcaagatcgccatgttcgcgttcggctcgtgggtcggcatcaagagcggcggcgtggtcgccgccctggtcgccggcgggatcaccatgtcgatcctgggcaacgcggccgacgtcgcgcaggacctcaagacgggctacctgacgctgacgtcgccgcgcgccgtgttcatcagcgaggcgatcggcacggcgctgggatgcgtcgtcaaccccaccgtgttctgggtgttctacagggtgtacaagatgggcagcggcgacatgggcgacatgccctacgccaagctctaccgcggcttcgccatgctcagcgtcggcgacggcgagcaaggcctgcccaggcacagcatgctcctcttcaaggtcttcttcgtgctcgccctggcgctcagcgtgttccgggaggtggcgagccggaaggagtggcgcatccggcgctacatcccgagcaccatcggcatggccatcaccttcttcatgccgccgcgcgtgcccgtcggcatgtgcatcggcagcctggtggcgtacctgtgggagaagatggacgccggccgcgggcggatgctctcgccggcgctggcgtcggggctcatctgcggcgacggcgtcggctcgatcttgctgtccatgctgacactcatgggtgccagggcgcccatctgcatcaagttcttgtctcgaggtgacaatgtcaagttggacgccttcttggcaacactccatgacatgagatagctactagctagctatccatgtagggaaactagatcattttctcaggtgtcaaaacttttgtacatatgtatccacgtcataggggcttgagttaggagtcgtggcaaactgtataatcaagtttcagttcagtctataaacacagtttgatctcc

SEQ ID NO: 26607 - DNA, 1495 bp, Allium porrum
  Clone ID: LIB4521-010-E12_FLI
ttcaatctccacctcgttcataggccaaaggttcaggcttaactcgaaaacccacaataaaccccaaaaatgcatcaaaatccgagcttccaactcaagcccgaagctgtcgggccgaaacttgcgcgtggcggtggtcggaggcggtccggcgggaggagcggcagcagagacgctggctaagggagggatagagacggtgttgatagagaggaagctggataactgcaagccgtgtggcggggccattcctttgtgcatggttggcgaatttgatctgccattggatattattgacagaagagtaactaaaatgaagatgatttctccttctaatgtcgcggttgatattggcagaactttgaagccgcatgagtatattggcatggttagacgtgaggtgcttgatggctaccttcgggaacgtgcttctgatgcaggtgcaactgtcatcaatggcctcttcctcaaaatggacaaaccagaaccacgatccaacggtgggtacaaaatttactacaacgaatacgaaaacggatcgacgactggagtaaaaaaggaaatggaagtagatgcaataataggggcagatggtgcaaactcaagagtagcaaaatctataggggcaggagagtatgagtatgctatagccttccaagaaagagtcaagataccagatgacaagatggaatactacaaagatttggcagagatgtatgtaggtgatgatgtgtcacctgatttttatggttgggtgtttccaaagtgcgatcacgtggctgtggggacagggacagtgacacataagagtgacataaagcagttccaagcagcgacacggcttagggcaaaggataagattgaaggtgggaagattattagggtagaggcacatcctattcctgagcatccccgaccacgaagggtattagaccgtgtagctcttgtaggagatgcagcaggttatgtaacaaaatgctcaggtgaaggaatctactttgcagcgaagagtggaaggatgtgtgcagaagctattgtagagggttcagcaaatgggactcgcatgatcaacgagtccgacttgagagtatatttaaagaaatttgatcaaacttactggccaacatataaggttctcgacatactccagaaggtattttaccgttccaaccctgcaagagaggcattcgttgaaatgtgtgctgacgaatacgttcaaaagatgactttcgatagctacttgtacaagcgtgttgtgccaggaaaccctttagacgatattaagcttgccataaacaccattggaagcttggtcagggctaatgctctgaagagagagatgagcaagcttgcttaattatttctgatcatttatagtgttagacgtcaaacctgtttttcatgagtggagactggagagctgtgtttatgtacaacatttgcaactttattccatattatttataaaagtataaaggagtagtcctgtattttc

SEQ ID NO: 26608 - DNA, 1523 bp, Allium porrum
  Clone ID: LIB4539-001-A10_FLI
attcccgaataatttgcgagaataatgtcttcaatctccacctcgttcataggccaaaggttcaggcttaactcgaaaacccacaataaaccccaaaaatgcatcaaaatccgagcttccaactcaagcccgaagctgtctggccgaaacttgcgcgtggcggtggtcggaggcggtccggcgggaggagcggcggcagagacgctggctaagggaggaatagagacggtgttgatagagaggaagctggataactgcaagccatgtggtggggccattcctttgtgcatggtcggtgaatttgatttgccattggatattattgacagaagagtaactaaaatgaagatgatttctccttctaatgtcgccgttgatattggcagaactttgaagcctcatgaatatattggcatggttagacgtgaggtgcttgatggctaccttcgggaacgtgcttctgatgcaggtgcaactgtcatcaatggcctcttcctcaaaatggacaaaccagaaccacgatccaacggtgggtacaaaatttactacaacgaatacgaaaacggatcgacgactggagtaaaaaaggaaatggaagtagatgcaataataggggcagatggtgcaaactcaagagtagcaaaatctataggggcgggagagtatgagtatgctatagccttccaagaaagagtcaagataccagatgccaagatggaatactacaaagacttggcagagatgtatgtaggtgatgatgtgtcacctgatttttatggttgggtgtttccaaagtgcgatcacgtggctgtggggacagggacagtaacacataagagtgacataaagcagttccaagcagcaacacggcttagggcaaaggataagattgaaggtgggaagattattagggtagaggcacatcctattcctgagcatccccgaccacgaagggtattagaccgtgtagctcttgtaggagatgcagcaggttatgtaacaaaatgctcaggtgaaggaatctactttgcagcaaagagtggaaggatgtgtgcagaagctattgtagagggttcagcaaatgggactcgcatgatcaatgagtccgacttgcgagtatatttaaaaaaattcgatcaaacttactggccaacatataaggttctcgacatactccagaaggtattttaccgttccaaccctgcaagagaggctttcgttgaaatgtgtgctgacgaatatgttcaaaagatgactttcgatagctacttgtacaagcgtgttgtgcctggaaaccctttagacgatattaagcttgccataaacaccattggaagcttggtcagggctaatgctctaaagagagagatgagcaagcttgcttaatcatttctcatcattttatagtgttagacgtcaaacatgtttttcatgagtggagactggagagctgtgtttatgtacaacatttgcaacttaattccatatattataaaagtataaaggagtggtcctgtattttc

SEQ ID NO: 26609 - DNA, 1279 bp, Allium porrum
  Clone ID: LIB4539-005-B4_FLI
tgttctaacaaaaaaatgctaggaattgcaaggagaaggctcggatgtgggaatattacttcctcggtgaggtattatgctggcgctgcaaaagagatgacagttcgtgatgctttaaactctgccattgacgaggaaatggctgcagaccccaaagtttttttgatgggcgaagaggttggagaataccaaggtgcatataagatatctaaaggtttgcttgataagtatggtcctgatagagttcgggacaccccaatcactgaggctgggtttactggaattggggttggagcagcttattatggtctgcggcctgttgttgaattcatgacatttaacttctcgatgcaggctattgatcacatcattaattccgctgcaaagtcaaactacatgtcagctggtcaaattaatgttcctattgtttttagaggacctaatggtgctgcggctggtgttggtgctcagcactcacagtgctatgctggttggtttgcatcttgtcctgggttaaaagttctatgtccttattcatcagaagatgcccgtggtttactcaaagctgctattcgagacccagatcctgttgttttccttgaaaatgaacttctgtacggagagtctttccctgtcagcgaagaagttcttgattcaagtttttgtcttccaattggaaaggccaagatagaaagagaagggaaggatgtgacaattactgctttctcaaaaatggttggctctgctctccaggctgctgaaatactttcaaaagaaggaatcagcgctgaggttataaaccttcgctcaataagacctctcgatagagctgcaattaatgcttctgtgagaaaaaccaacagactgattactgttgaagaaggttttccacaacatggtgttggtgctgaaatatgtgctgcagtagttgaagagagttttgggtatcttgatgctcctgtggaaagaattgccggagctgatgttcccatgccttatgctgctaatctcgagaggatggctgttccacaggttgatgatattgtccgagctgcaaaaagagcatgttacaggtcagttccgatggctgcagcagcctgattttgcaccactcagattgcctaatacaaattctacctctttgatttcatcggagtcttattttattttctacgcttctacaaatttgttctgaaataaactaactgcacacatcatctctggcaagtgacaaactcagagtcaataaattttgttgctggtgttgttttttcctgtt

SEQ ID NO: 26610 - DNA, 1600 bp, Allium porrum
  Clone ID: LIB4539-007-E5_FLI
acagtcctcttctctttttcaccattttctccacagtaaatggctttgaagctgccaatctcaaaacaatttagcggagtttcattcttggattcaagcagaggagctttccaacaacataaagttgatttttgttctaaaagaaaggcaagagcaactaatagctattcaaaaagagcacagtgctcaattcaacaaggaccaccgtcagcttggccaggtcgagctgtactagaggaagatcgcaaaatatgggatggacctaagcctatatctgtattaggctccacgggttcaattggtacacagacattgggtatcgtggctgagattccggataaattcaaagttgtggcacttgcagcagggtctaatgtgactctgttagctgatcaaattaaaagattcaaccctcagttagttgcaattagaaacgagtcattggttgatgaactgaaagaagcgataagggatgttgaacataaacctgaaatcatccctggggaagaaggtgtcattgaggttgctcgccactcagatgctgtttctgtagtttctggaatagtaggctgtgctggtttgaagcctacagttgctgcaattgaagctggaaaggatatttgccttgcaaacaaagagactcttatcgcaggaggtccttttgttcttccacttgcacaaaaacacaatattaaaattcttccagctgattccgagcattctgccgtatttcagtgtcttcaaggcttgccagagggagcactaagacgtatcattttaacagcatctggtggtgctttcagggaatggccagttgaaaagctgaaagaagtgaaagttgccgacgcattaaagcatcctatctggactttgggaaagaaagttactattgattctgctactctttttaacaagggacttgaagtaattgaagcccattacttatttggggccgattacgataatattgatatcgtaattcatccacaatcaatcatacattctatgattgaaacacaggattcatcagttatagctcagcttgggtgggctgacatgcgcataccaattttgtacacaatgtcttggccagaacgaatctattgctccgaggtcacgtggcctagatttgatctttgcaagctgggtaaattgacatttgaagcacctgatagactgaaatttccatcaatggatcttgcgtatgctgcaggtagagccggaggcaccatgactggtgtactcagtgctgctaacgagaaggcggttgagttatttgtcgatgaaaagattagttatttggacattttcaaggttgtggagctcacatgcagtgcacatagagatgaattgaatacgagtccttctctcgaagaaatcatacactatgacttgtgggctcgtgattttgcagccagattacaaccaacattatgttagagtccagtccgtatgtagtataaagtggaaaatatgtttattatattaatataaatgtttatagttgaactaagtcaacttgagacgaagggaatcgacgttcagttgttactatagtatgaatgatgggaagttggaactggcttattatattcatagc

SEQ ID NO: 26611 - DNA, 821 bp, Zea mays
  Clone ID: LIB4569-001-D9_FLI
tcgaggccggccggcggctccttctccctgaaccccgccgcgcgccaggcaccacgcctccctccgcagtcacacgagcacgcggccgtcctctgccgcaccgcgccgcctccagacgcctcgctcgtcaggtctctccacctccgcctgcgaacgttcggcccagctccggcgagttcctccgcaattccggatctgctggagcgccagcaaggcggcctctccaactctccggagtccggaacagcaagggttctgatctcccatgccacagtttataacgttgaaggattcaaaaatctacagaactagatgatacttgcataatgcagtcctcagatatttggaaggcgcatgctggttcatcacagtcagagggttcgggtctggatatggagaggaacggatgcaatcataattattgtccatctcctctccaaccaattgcctcagctggtcagcactctgaaagcagcgctgcatacttttcttggcctacatctactctaatgcacgggtcagctgaaggccgtgctaattactttgggaacctacagaagggtgtactaccaggacatcttggtcgcttgccaaagggccagcaagctaccaccttacttgatttaatgattataagagcattccacagcaagatcctccggcgggttaatcttgggacagcaataggctttagaatcaggaaagggacattgactgaaacacctgccatccttggggttggtgcctccaaagggccacaggaagtgggtcaccgctacctcatgggcttccaactgcccctagagggaccttgggggagg

SEQ ID NO: 26612 - DNA, 1091 bp, Zea mays
  Clone ID: LIB4569-002-H1_FLI
atcgaggccggccgggactgggtggccatcatcatcagtaactaataattactttagattagaaagcaagaatcgagtcgagaagatggtgcagttcggcaagtggctgaggaggcagatcgagcggagcctcccggagtggcaggaccagttcctgcgctacaaggagctgaagcggtgcgtcaaggcccgctccggcggctgcccgccgttgcccgcggaggaggccgagttcgtggccgagatcgacgcggagaccgagaagatcaacgccttcttcctcgaccaggaggaggagttcatcatccgccaccgggagctgcagaaccacatcgagcgcgcgctgggccgcggcaggcccaggccggcgccggcgctgcacgaggccgaggtcgccgccatccgcagggagatcgtcaacttccacggcgtcatggtgctgctcctcaactacagcagcatcaactacataggcctggccaagatcctcaagaagtacgacaagcgcaccggcgcgatgctgcggcttgccgtgatggagtcggtgctgcagcagcccttcttcaagacggagacggtgtcgcatctggtgcgggagtgcgagtccttgatggaggccgtgttcccggaggcgcgcgatcggggccaggccgccgccgcggcgctcgccgtcgcggaggcggagcagggcatcttccgcaacaccgtggccgcgctcctcaccatgcaggacgtccgcgcggggagctccaccagaggaagccactcgctgccgccgctcaacctgccggactccgactggctccggtccttcgacccgccgtttccgatcccgacccgatgacatatgttggcttgttgctcgctcctagttggcttgcgccagcctcctcgatctcccttccttttcgtcttcttggcccggtacatgctgtgcttgccttggttttccatttttcccgctttctaagctctaattaactaatgtatgtagagtgcagtagtgagactacagtaaataaatgtaatttactggaatgacagccgagagaacgtacaagctcatactcaatttggttccaattttgtgg

SEQ ID NO: 26613 - DNA, 1762 bp, Zea mays
  Clone ID: LIB4569-003-C2_FLI
atgtttctctgaaacgaaccaaacagacaccgtagatccgagcgctcctccgtcctcccgggccacggcgatcatcaccgccgctgcgccacccatatccacagcagagccgctcgccctatagcttcacctcggccgcgcgtggggcggccatggaggactacccggaggagctgcggacgccgccggtgtcgctagtgtccatcgtggggtgcccagagcttcacccctcgatctcgacggcactcagctcccagcagcctcccatgaacacactggccctcccggacttcgccaaggcctctattctggcccgcagcgttaagccccgcgaccctctcgcaccgccgcaaccccctgcgggaatcctcaagaaggactggctacttaagcaccgcacccgcgtcccggccgccgtcgccgcgctgttccgtgccgaccaggtctccggcgaccccgcccagtggctccaggcctgctccgatctcgaaaacctcaagtctgcaattcaggggaaaaacactaaatcagtggtggtccttgtgcaggctcaagctaatgatgagctgagtgaggatgtaattgttgccctgagaaaacgtgctgaaatcgattccaagcacttggttgtgctagttgagcacgatgaagcagaatggaacagatctctgaacaaattgaagaatgtctttgtggagttatgtgcagcattctataaagaggaagggcgaaggataaaggctcgcattgagaaaaagaactttgcttctgttgagctgagcatccggtactgtttcaaggttgctatttatgcggagttcagaagggattggccagaagcattgaagttctatgaggaaggtgttcgtgttttgcgtgagatgattggaacttcgacaaggttgcctccaacccaacgcctggttgagataaaagcagttgccgagcaatttcactttaagatatcaaccttgctacttcatgccgggaaagtggtagaagcaatcacatggttccgtaagcatatcaaaagctatgaacgggttgttggaacaccagaagttgcttttcttcactgggaatggtttagcaggcagttccttgtctttggtgagctgatcgaaacaacatccacaactattccagatacactatctcctcgatttggcactgcagacaacacattgactgagtgggaatttcagccagcatactactatcagttagcggcaacttacttgagggagaagaggtatgccatcgaatgctcgtcatcaatggctaaccttacaacagaagttaatggagtacctgagtcagtaatgccttctgtgtatgttggccaatatgtgcgcttgtttgagcaaggagatacagttagtctactacccctttctgatactgaatacaccagctatgctttgtcagaagctgaaaggtttcaagattcttatgagataatagcattgttcagaaaagcttatgaatcatttcagagcctaggtgctacaagaatggcttctgcctgtagcagtggaatggccatagaatattacgcagctggtgattttagcaacgcaaaacagctttttgatagtgttgctggtctataccgtcaagagggttggaccagtttgctctgggagaacctaggatacttgagagagtgctcaatgaaacttaattctcccaaggattttatcagctattccctagagatggctgcattaccattattttctggtagtggagaggaaaatcg

SEQ ID NO: 26614 - DNA, 1660 bp, Zea mays
  Clone ID: LIB4569-004-B1_FLI
ggggcctcatcggccccctgcacggattactggtttcttattgccaccagatcgaaaagggggggaggaattaaattgtggagtcgggtggtgagatctgatttatagattatttgattagcccggttggtagtagcagtcggtggtggtggtagtggctcaaatctctgttcgggtttgtgaagcgcgggctctataaatacgactcagatctgagaggcctcctcggctcctcctcgtccgccccagtctaatccgattcaaaccgcccgtcccccgtgtccgtgccaagcaagccgagcccaacccccaagagccagctgcccggtgctccacgcgatggcgcagaaggagactaatggcagcaacggcgatcacatctccacccgcccgccgccgaccccctcgcccctccgcttctccaagttctttcaggctaacctgcggatcctggtcactggtggggcgggcttcatcggctcgcacctcgtagacaagctcatggagaacgagaagcacgaggtcattgttgctgataactttttcactggttcaaaagacaacctgaagaagtggattggccacccaagatttgagctcatccgtcatgatgtcaccgagccgcttcttgtggaagttgaccaaatctatcaccttgcttgccctgcttcaccaatcttctacaagcacaaccctgttaagaccatcaagacaaatgttattggtaccctgaacatgctaggacttgcaaagagagttggagctaggattttgttgacatcaacctctgaagtttatggtgatccacttgagcatcctcaaactgaggcctactggggcaatgttaacccgattggtgttaggagttgttatgatgagggtaagcgtgtagcagagacgctgatgttcgactatcacaggcagcatggcattgaaatccggattgccaggattttcaacacctatgggcctaggatgaacattgatgatggccgtgttgttagcaacttcattgctcaggctgtgcgcggtgagcccctgactgtccagaggccaggaacacagactaggagtttctgctatgttgccgatatggttgatggtcttattaagctgatgaatggaaacaagactggaccgattaacttggggaacccaggtgaattcaccatgctggaacttgctgagaatgtgaaggagttgatcaacccagatgtgacagtgacgatgaccgagaacactcctgatgatccccgccagaggaagccggacatcacaaaggcgaaggaagttctgggatgggagcccaagatcgtcctgcgggacggcttggtgctcatggaggatgatttccgggagcgcctgaccgtgcccaagaaaaccaaggcctgaattgccctgaagttggggaagaatatccacacgggggagcatactcatagtcgggctcgtcattatttgtggccacatttcattacggaatttgagttccaataaacttaatattcctttgtcgttcaccttgaaggattgtattgttagaattttcatacagggctggccgttcgagtctctgcctacgcagatcttgtggtacttgtgtttgtagccaatgtgtgagtaaaagtcgattatagcaatgttgatgccattttgggcg

SEQ ID NO: 26615 - DNA, 1495 bp, Zea mays
  Clone ID: LIB4569-004-B6_FLI
ctcgaggccggccgggctcgggctctcggccttttcttttcctcattacggcctcggtccaccacctcctcttctcgcctgtgccttttgcccctgtgctcgccacacgcggcgcaaccgcccacccacccagccaggagaagaagatctccgtcgcctgctcttcgcttcgcttcgaatcggaggtgtcgagtagccagtggtgtccctatggattcagcttttagaggagctctcaatgagcctatgtgcttggaagaaaccgtcgtccaacaaggaattgaaaggtgcccattcctgaggaacatcaatgagcctacaagtttttccttctcgtccgtcaacttccctattcccgcaagaggagccaagggaccgattttcgaagatgggcctaattttgacatggcatttcgagttttccatggtagagatggggttgttccactttcagaagggtcattggcccagattgagaagccactgccaaagcccaatcctgagttcaacccattggcagccaaagcagcaaccatcagtctatctgcatttggagggtttttcagctttggtgacttctcaaataagcgcaataagaaaaactccaacaagaagaaccccaacaacctcccccagaataaaggccagcctaacaataacaaccatgaagcactgagcaacgagtggctggagatgggccaatgtccacttgcgaaatcttatagggcattaagtggaattgtgccacttgtcgcaaagatgatgacacccccagctggtatgaaacttaagtgcccacctgccgtggttgctgcccgcgcagcactatcccgcacagcctttgctaaggggcttcgccctcagcccctgccaacaaaaatactggtgattgcattgcttggtatggcagcaaatgttcctctgggcatctggagggagcacacacagaagttttcattgcagtggtttgccgcagtacatgctgcagtgccgttcatagggatgctcaggaaatctgtgctgatgcctaagacagccatggcccttactatagccgcctcgatattgggtcagacaatcgggtcaagagctgaacgtatcagactgaagagggccgcggcagcaaaattagcaagagagagccatggtgacgctgctgactacatcaaagcaccaatgagtctgaaaacagggaaccacactgttcagttttgggatccgctttccctcagagctgaaagcacagtggctgcaggtaccacagcagttcttgtccctgccatttctgctttcaactgatgacaggaatggattcattacgattgtaccagcatcgctggttggtgtattcttttttttctcctattctaaataatctgattgttgtatccattactgtacttttgagcttaagaaagaaatacttcacggcaaactcttcatcctgttttggtggccacatgacagcgaataaattagagaacacgttgagctg

SEQ ID NO: 26616 - DNA, 1381 bp, Zea mays
  Clone ID: LIB4569-005-H10_FLI
ctcgaggccggccgggaaagggccccctttacagtttccctcccccaaaactactttcccacaaacccagaccagagcagcttgcgttgcgtctctcgtttcttttcttgttggccttctccttgccttgcttttgcttgctcgttgcttcttgagctcgaacccgccccttgtgcgcgccttgcccaagtctctgtgtgtgttttataggcttgagagcttggaatagcggggggtggaggaagcggaagaggagcttcgttttgtgttctagagggagtcatcagtcatgttccatggcggcaggcctctgtccctccgggggtctctcaaggcgcttgaagctgatatccaccatgccaacaccctggcgcatgtatacacagggcgtatgggggtgcctgcgtgcagatgaggctgtcctacagctccatggctccaatctttctcaacctcatccaatggatggactgcagctgctccctgtcatacacgctccctagctaccttggcctgctcgaggttctcgtctacaaggtttatgtcgatgaagatgcctccatatccaccatagaaaggagggcgagcctgaaggaattctacactatcatataccctttcttgcaacaactggaggacaacttgatggacaaggactgcaaggacaaagggtggtctgctgctgccggcggcggcggcggcggtcggaagcttgttgccgaagatgacagggaggatgagtgtggcatttgcctggagacctgcaccaagatggtccttccgaattgcaaccatgccatgtgcatcaactgttaccgagactggtacacaaggtcccagtcatgcccgttctgccgcgggagcctgaagagggtccggtccagagacctctgggtgctcaccggcgacgacgacgtgatcgacacggtgacgctggagaaggagaacgtgaagcacttcctcagcttcatcgacagcctgcccctgatcgtccccgacaacatgctgctggtctactacgactacctagtctagcaaggctcctccccccaccccccactctgaagctctggaagaggaagggggtctgggaagaagacgcggcgtacaagcgacaagggttacccgcagccgaccatcctctgcggatcgagttggcaaagcgaagccgttgccgaccaacagacgatactctcgtgggcatgccacgccgttgcgctggctttattgcatggtggcgttgctcgctgtaatggttgtaaataaagaaggaaaatgtctcgggttttatatataatatactagcttgacatttctcgtctggcgaattgccggactgttcagaatgaagaaatcagggggcctctacttctctgctctg

SEQ ID NO: 26617 - DNA, 1691 bp, Zea mays
  Clone ID: LIB4569-006-F10_FLI
atcgaggccggccgggaccttcctccccaactcgccgtcgtcttctgcggttctgccgtctacgcctccaatttggcctctctcccttgcaagtttaagcttcatcttcagccatgggtaaggagaagtcccacatcaacattgtggtcattggccacgtcgactctggcaagtcgaccaccaccggccacctgatctacaagcttggaggcattgacaagcgtgtaatagagaggtttgagaaggaggctgctgagatgaacaagcggtccttcaagtatgcttgggtgctcgacaagctcaaggctgagcgtgagaggggtatcaccattgatattgctctgtggaagtttgagaccaccaagtattactgcaccgtcattgatgcccctggacaccgtgacttcatcaagaacatgatcactggtacctcccaggctgactgtgctgtccttatcattgactccaccactggtggttttgaggctggtatctccaaggatggccagacccgtgagcatgctctccttgcgttcactcttggagtgaaacagatgatttgctgctgcaacaagatggatgcaacgactcccaaatactccaaggcgcgttatgatgagattgtgaaggaagtctcatcctacctcaagaaagttgggtacaaccctgataagattgcctttgtccccatctctggttttgagggcgacaacatgattgagaggtccaccaaccttgactggtacaaaggcccgaccctgcttgaggctcttgaccagatcaccgagcccaagagaccttcggacaagcccctgcgtctccccctgcaggatgtgtacaagattggtggtattggaactgtaccggttggtcgtgtggagactggtgtcatcaagcctggtatggttgtcaccttcggtccaactggcctgactactgaggtgaagtctgttgagatgcaccacgaggctcttcaggaggcccttcctggtgacaatgttggcttcaacgtgaagaacgttgctgtgaaggatctcaagcgtggttttgtggcctcaaactccaaggatgaccctgccaaggaggctgccagcttcacgtcccaggtcatcatcatgaaccaccctgggcagataggcaatggctatgccccagtgctggactgccacacctcccacattgctgtcaagtttgctgaactcattaccaagatcgacaggcggtctggcaaggagcttgagaaggagcccaagttcctgaagaacggtgatgctggtatggtgaagatgattcccaccaagcccatggtggtggagacattctcgcagtatcctccccttggtaggtttgctgtccgcgacatgaggcagacagttgctgttggagtcatcaagagtgtggagaagaaggacccgaccggcgccaaggttaccaaggcagctgccaaaaagaaatgatgcaacctgtcgttaatcctgtatctgcttttgcaatacctgacttgtcactccatcccgaagttttgtatgcggttgttactgttattgtgtactgttaagctctgctgcggcgtgccctgttgtttgggtagcgtcaacgtcgagcgccacttgcgggtgtgcctttgtctgctatcagtagcggcaaaaattgaaagctctcgagacttatgtcccttttgggcgccgttg

SEQ ID NO: 26618 - DNA, 1345 bp, Zea mays
  Clone ID: LIB4569-006-G5_FLI
tgcaacgggaataaccgcccgccccgcgcatagcctaacggggcagcttgcttggctctgatgctgccatgtcgcgcgcgcctcgtatcgtatcggtgctgttcctgttgcttggccccctccccgtctccttggtccacgtgaccgccgacgggcccgtgacggcgacggttcaccggcaggacggcaccgcgtggcgctcgttcaagcagctgctggacgcgcggcgaggcagccacgttgagggcctcggcgagctcaagcgctacctggcgaggttcgggtacatgcctggggcgggggcggagcacgagccgacgactgacgcgttcgacgcgcacatggaggccgccgtacggcggtaccagtccatgcttagcctgccggtcacggggcagctcgactccaccacgctggaccggatcatggccccgcgctgcggcgtcggcgacggcggccacgctgtgccggtatccctctcggggtcggcggcggcgagcccggacggcgccgtcagccggttcacgttcttcaagggtgagccgcggtggacgcagccggacccgctcgtgctcacgtacgccatctcgccgaccgccaccgtcgactacctgcctgccgggaccgtgcgcgcggtgttccggcgcgcgttcgcgcggtgggcgcgggtcatccccgtgggcttcgtcgagaccgaagactacgaggcggccgacatcagggtgggcttctacgtgggcagccacggtgatgggatccccctcgacggaccgctcggcgtgctcggccatgccttctccccgaagaacgggcgcctccacctcgacgccgcagagaggtgggcggttgacatggacacggaaacggtgcactcggccgtcgacttggagtccgtggccacgcacgagattgggcacgtcctcgggctggggcactcgtcgtcacccaaggcggtcatgtacccgagcctcagcccgcgggaaaagaaggcggagctcaccgtcgacgacatcgaaggcgtccagtggctgtatgggtccaacccgggattcagcctcagctcgctttaccagcaggactcctccatggcgtcgggagggagcagttggcttcctgcctcggctagattagtttgtgcagttctggtcatgctagtgacgcacttgtagatagacatgtctataatacacaaaaaggataagaacagaaacagaatgaaaaaacacaatgatcctgctacaggagagaatctcttgtgggattttatctttgtttttgcacacaaattgtgtgagacttgtgcctctccttttatagtttggtatttggacagtaaaattattac

SEQ ID NO: 26619 - DNA, 1171 bp, Zea mays
  Clone ID: LIB4569-006-G6_FLI
taccctcgaggccggccgggagggccgcgccgtcatggccaagaaccgccagcgaagactctacacgaacatcctcagggaaggctttgacgacggtttctaccgagacgtttggacgcatgtcccgttcgagcatcccaagacgttcgacaagctggccatggacccggcgaagaagaaggacatcatcgacgacctcaacatgttcaagcagagcaaggactactacgaccgcgtggggaagccgtggaagcgggggtatctcctgtacgggccgccgggcaccggcaagtccaccatggtcgccgcgatggccaaccacctcgggtacgacgtctacgacttcgagctcacgtcggtgaagaccaacaccgacctccggaagctgctcatagagaccaagagcaagtccatcatggtgttcgaggacatcgactgctcgctccaagtgaccggcaagcgcaaaagcaaggaggaggaggagggttcgaaagacgggaacggggacaacccttctgcggcgaaacagaaggaggaggaggaggacgccaagagcagcagcaaggtcactctgtccggcctgctcaacttcatcgacggcatctggtcggcgtgcggcgaggagcggctcgtcgtgttcaccaccaaccacgtcgacaagctggacccggcgctgatccggacggggcggatggacaagaagatcgagatgtcctactgcgacttcgagtccttcaagttcctggcccggatgcacctccgcgacgacgtcgtcgaggcacacggggagcaatgcgaccgtgttagggctttgctccaggaagtgaacatggtgcccgtcgacgtcggcgagcacctcacgcccaggagccccgacgaattcgaagacgctggaccatgcctcgcgaggctggtcaccgcgttggagaaggccaagaaggaggctgatatactaccgaggccacaggcccaaccggatgtcagcggcatcgttgtggacgctggtagtaaatagtaataactacggtccgctagggctactccgatgaccccaccaggccaccatgttggttccagcggtttacctttctacagtgcatatacacttgtaatctactactactttataagactgtaaagaaggcgtccaccaccacatatgtggtgtacc

SEQ ID NO: 26620 - DNA, 1408 bp, Zea mays
  Clone ID: LIB4569-007-B6_FLI
ctcattggaccctcgggctcgccgggctttctcgccttctcggcgcgctacgcctacgactgagctgaaagaagcggtagatcggcgttagcggcgagctagggttccggcgagtgcacccaatggcatcggaggcggcgcggcggcggcaggagatggcagaggaggggcaacggcacctggaggagactatcgcagcctcgttccagatcctcgtatccatgaacgacgagctctgcaacgccggcctttggtcctcctcatccgtctcggccaccgctgcggctggctaccagcaccatcactctgctactcttccgaccccacactctgtagattccgacgctgccgacgcagggggcgcgcccagccccggcgggtcgctcgacgaggcgaggcaccgctacaaggcgcctgccctcccctcctgcagcgcccgtcgcctccctttccccttccctccctccctctccccgcgggccgccagaggcaatttcgccctcgattcgaccccgattcgtccgcccgcgaccgggattccctccgccaagcgcggatctgaacgctgcgctccgtgtcgccgctcgaatccgccatgaagggggccaaatccaagggcgccgccaaggccgatgccaagctggcggtgaagagcaagggggcggagaagcccgccaagggcaggaaagggaaggccggcaaggaccccaacaagcctaagagggctcccagcgctttcttcgtgttcatggaggaatttcgcaaggagttcaaggagaagaaccctaagaacaagtctgtcgctgcggtggggaaagctgctggcgacaggtggaaatccctgagcgagtcggacaaggctccctatgtagccaaggctaacaagctcaagctcgagtacaacaaggccatcgctgcctacaacaagggcgagagcactgcagctaagaaggctcctgccaaggaggaagaggaggaagatgaagaggagtctgacaagtccaagtcggaggtcaatgacgaggatgatgaagagggtagtgaggaggatgaagatgatgacgagtgatggagctcctcgagacaatggaccgtgcttcatccaacaatggagcggctacacaaggccccgtggcgatcacaaaaaaggagcctatatccatgtactagaattattcagtttcactccacatcgtgatgttttatttttacttttgtcgtgctataacggatagcgctcctcgttggcgccactggcgggtggttctgcctctggtctggtgtgtttgtgtgtggtcacacttgccagccagcagaggcgcctgcttgtacctagattactgtttccattgtcgtcatcatcggctaacattgtcataatgtcagtttgggtaatgttagattaagt

SEQ ID NO: 26621 - DNA, 1983 bp, Zea mays
  Clone ID: LIB4569-007-D9_FLI
ggctcgccgggacggcgaaatcaccgttcgctacctagtactcgtcactcgtgtacacgtgtagcaagcacgaagcagcaaagtcgggatcggcagccatggcgatgatggacaagtggacaggcctgggctcggcgctggcaagcatgctcttcctctggtccatggtgcagaaccacctccccgccgccttcggctaccgcctcagcacctgggggaacaagctcgcctctctcttcagcccttacctggagatcaccatctccgagtacggcgccgagcgcttccgccgcagcgacttcttcctcgccgctgaggcctacctctccgacgcctgctcccgccgcgcgcgcaagctccgggccgacctcggcaaggacagcaagaacctccaggtctccgtcgacgacaacgacgaggtcaccgacgacttctccggggccaccatctggtggtacgcgtccaagcagctggccaggtcacaggtcatcagcttctacccgggcgaggacgagcgccgcttctaccgggtcgtcttccacaggcgccaccgcgacctcgtcgtcgacgagtacctgccccacgtcctcgaggaaggccgcgccgtgaccgtccgcaaccaccagcgccgcctcttcaccaacaaccccagcggcagctggaactcctaccgcggcaagagcgtctggagccacgtccccttcgagcacccggccacgttcgacacgctcgccatggacccggacgacaaggaggacatcctcgacgagctccgcgcgttccgggacgctaaggcctactacaccaaggtcggcaagccgtggaagcgagggtacctgctctacgggccccccggcaccggcaagtccaccatgatcgccgccatggccaacttcctcgactacgacgtctacgacctcgagctcacggcggtcaagaacaacaccgagctgcggaagctcttcatcgagaccaccggcaagtccatcatcgtcatcgaggacatcgactgctccgtcgacctcaccggcaagcgcaaggacgacaagaagcgggcgtcggccgaggcagacgacaagcccaaaactccaacggatcccgacaaggacgggggaagcaaggtgacgctctcagggcttctcaacttcatcgacgggctgtggtcggcgtgcggcggcgagcgcatcatcatcttcacaaccaaccacaaggacaagctggacccggcgctgatccggcggggcaggatggacaggcacatcgagatgtcctactgccgcttccggaccttcaaggtgctcgccaagaactacctggacgtcgaggagccgcacgagctgttcggccagatagaaaagctgctcgaggagacggacatgtcgccggcagacgtggccgagaacctgatgcccatgtccaagaagaagaagaggagggatgccaacgcgtgtctggagagccttgtggaggctctgaagcaggccaaggaggatgctgctgctgctgctgctgctaaggcactagctgacgctagggcggccaaggaggaagcggaggaggcgaaggagaaagaggccaaagagaaagacgaggcaacaaatagcaaaggagcagcagacccagcagggaaggacactaagatgagcaatggagatgttactgtcaataaggaaggtggtgacgagtgacaagtatagaatggatgagctcgcttgctactgaagtaatggagaaacatggctataaataatgacagtggcctatgtaaaatagtgtagtctctagtgaagattacagtcacacgtcgtcatcttccatgtttaaaagataaaaagatagacttgatttgcactagttaaaaatagaaagatgtaatgtaacaaccaaatcgagccttgtttgcctttcaacttgtaaaccaaggcgacagtgaatgttgcctcatatatactagtaactgtcgcgcgcctttgagcacgctac

SEQ ID NO: 26622 - DNA, 1840 bp, Zea mays
  Clone ID: LIB4569-007-F3_FLI
gcttatgggaccctccggccggccgggacacgctgcacggctggagtctgaagagaggtcgtcgtctcgtcggacagccgaacaacagccagcagtccacatcaaggttccaatcctgagtctgcagccatgggaaccatcgtccgcggcggccggagcggcatgatgaagcagctcaacgtggggggcaagctcttctcgctggaggcaagctccctttccctcatgtctatcggttccccttcccctaccccaacattcgtggaccgcgacccagccctcctattcgccgtcctcgctgccatccgctccccgtccaccgcagcgcccgacttccccgcgcgcgtcctcctcgacgaggccaacttctacggccttcaagcccagctcctcgctgcgctatctccgccgccgctccgcggcttctcagcctccctcgcctccaccctctgcccgtcctccgagcccttccccaccgcccttgcgccgcaccacgacgggtcactatgcctcgcccatggcgccgggctggtcacctattactccccagcgctggatcaccgcgccaccatccggacccacctccaccgcatcacctccctcctgcagctgccctccagtctcgccgtccttgggtctgactccgctcctgggcttcacgtgtacgactttctcgatggcaaacatgtcgcctccgttcagtggtcggatcccactgacactcgcaccagcaaggtgaaggtcgtcgccattgcggcccgtcctccagctgatgccgccgataagaattcaccgatcttggcaacgtttgagtgccctcatcgggaaaactgcatcatggctgttgaccctgtaactctgaagcctacacaggagattggccggcaaagtggtagtgcggctaagtcatcggcaccaggtcgagtggtgcacctgcaggcacttggtctggtgtttgcgtcattcgttagttccggggcatttggctactctggctatatgaggctatgggacattcggtctgggaatgtggtgtgggagacaagcgagccagggggagctggaagaagcagtaggtttggggatccatttgcagatgcagatgtggatgtgaagcagcaggcaatatacaaggtttgctcaaagtcaggagatttagcagtggcagacctgagatgccttggcgatgatccctgggtgtatatgtcatcaggaccacgagggagcgcaggaggctatggcagtgttctgtgttgtcaccgctctcaagtttttgtcagccgaaaggatggattggaggtttggtcccgactggaagagcaccgccacaacacaggcgaattgacagagcaatcaggagtaaaggaaagacccaaaaatgaaggaattgatggcagattttatgggagttgctatgtggacacagaaaaggatgctaggcgtgggatgatacagatgattgaagggggtgggaccgcttgtttgtgacaagagaagagatgcaaggtgtggaagtgtgggagacctcccaccttgctggttctacttctctctcgtagctttatcctcttgtgcacatggagtgaccattcagtaggtctaccaagagaattgaaagtgcatgatgccaatattgttcttggttaatggcttcatgcataatttgacattgaacaaatatgtgttttatgtagtcttggctctcaagatatatcatgtatcacatgtcttgcttctgcatatgcatgtcatggtaaatgctgagaatagaaagacacaatcttctttgatgtaaactattttcttaatatcttagcacgaagattttagcttttacagt

SEQ ID NO: 26623 - DNA, 1658 bp, Zea mays
  Clone ID: LIB4569-007-H5_FLI
ccgggaccttcctccccaactcgccgtcgtcttctgcggttctgccgtctacgcctccaatttggcctctctcccttgcaagtttaagcttcaccttcaaccatgggtaaggagaagtcccacatcaacattgtggtcattggccacgtcgactctggcaagtcgaccaccaccggccacctgatctacaagcttggaggcattgacaagcgtgtaatagagaggtttgagaaggaggctgctgagatgaacaagcggtccttcaagtatgcttgggtgctcgacaagctcaaggctgagcgtgagaggggtatcaccattgatattgctctgtggaagtttgagaccaccaagtattactgcaccgtcattgatgcccctggacaccgtgacttcatcaagaacatgatcactggtacctcccaggctgactgtgctgtccttatcattgactccaccactggtggttttgaggctggtatctccaaggatggccagacccgtgagcatgctctccttgcgttcactcttggagtgaagcagatgatttgctgctgcaacaagatggatgcaacgactcccaaatactccaaggcgcgttatgatgagattgtgaaggaagtctcatcctacctcaagaaagttgggtacaaccctgataagattgcctttgtccccatctctggttttgagggcgacaacatgattgagaggtccaccaaccttgactggtacaaaggcccgaccctgcttgaggctcttgaccagatcaccgagcccaagagaccttcggacaagcccctgcgtctccccctgcaggatgtgtacaagattggtggtattggaactgtaccggttggtcgtgtggagactggtgtcatcaagcctggtatggttgtcaccttcggtccaactggcctgactactgaggtgaagtctgttgagatgcaccacgaggctcttcaggaggcccttcctggtgacaatgttggcttcaacgtgaagaacgttgctgtgaaggatctcaagcgtggttttgtggcctcaaactccaaggatgaccctgccaaggaggctgccagcttcacgtcccaggtcatcatcatgaaccaccctggccagatcggtaacggctatgccccagtgctggactgccatacctcccatattgctgtcaagtttgctgagctgattaccaagatcgacaggcgttctggcaaggagcttgagaaagagcccaagttcttgaagaacggcgatgctggtatggtgaagatgattcccaccaagcccatggtggtggagacattctcgcagtatcctccccttggtaggtttgctgtccgcgacatgaggcaggcagttgctgttggagtcatcaagagtgtggagaagaaggacccgaccggcgccaaggttaccaaggcagctgccaaaaagaaatgatgcaacctgtcgttaatcctgtatctgcttttgcaatacctgacttgtcactccatcccgaagttttgtatgcggttgttactgttattgtgtactgttaagctctgctgcggcgtgccctgttgtttgggtagcgtcaacgtcgagcgccacttgcgggtgtgcctttgtctgctatcagtagcggcaaaaattgaaagctctcgagaccg

SEQ ID NO: 26624 - DNA, 1634 bp, Zea mays
  Clone ID: LIB4569-008-D12_FLI
ccgggaccttcctccccaactcgccgtcgtcttctgcggttctgccgtctacgcctccaatttggcctctctcccttgcaagtttaagcttcatcttcagccatgggtaaggagaagtcccacatcaacattgtggtcattggccacgtcgactctggcaagtcgaccaccactggccacctgatctacaagcttggaggcattgacaagcgtgtaatagagaggtttgagaaggaggctgctgagatgaacaagcggtccttcaagtatgcttgggtgctcgacaagctcaaggctgagcgtgagaggggtatcaccattgatattgctctgtggaagtttgagaccaccaagtattactgcaccgtcattgatgcccctggacaccgtgacttcatcaagaacatgatcactggtacctcccaggctgactgtgctgtccttatcattgactccaccactggtggttttgaggctggtatctccaaggatggccagacccgtgagcatgctctccttgcgttcactcttggagtgaaacagatgatttgctgctgcaacaagatggatgcaacgactcccaaatactccaaggcgcgttatgatgagattgtgaaggaagtctcattctacctcaagaaagttgggtacaaccctgataagattgcctttgtccccatctctggttttgagggcgacaacatgattgagaggtccaccaaccttgactggtacaaaggcccgaccctgcttgaggctcttgaccagatcaccgagcccaagagaccttcggacaagcccctgcgtctccccctgcaggatgtgtacaagattggtggtattggaactgtaccggttggtcgtgtggagactggtgtcatcaagcctggtatggttgtcaccttcggtccaactggcctgactactgaggtgaagtctgttgagatgcaccacgaggctcttcaggaggcccttcctggtgacaatgttggcttcaacgtgaagaacgttgctgtgaaggatctcaagcgtggttttgtggcctcaaactccaaggatgaccctgccaaggaggctgccagcttcacgtcccaggtcatcatcatgaaccaccctgggcagataggcaatggctatgccccagtgctggactgccacacctcccacattgctgtcaagtttgctgaactcattaccaagatcgacaggcggtctggcaaggagcttgagaaggagcccaagttcctgaagaacggtgatgctggtatggtgaagatgattcccaccaagcccatggtggtggagacattctcgcagtatcctccccttggtaggtttgctgtccgcgacatgaggcagacagttgctgttggagtcatcaagagtgtggagaagaaggacccgaccggcgccaaggttaccaaggcagctgccaaaaagaaatgatgcaacctgtcgttaatcctgtatctgcttttgcaatacctgacttgtcactccatcccgaagttttgtatgcggttgttactgttattgtgtactgttaagctctgctgcggcgtgccctgttgtttgggtagcgtcaacgtcgagcgccacttgcgggtgtgcctttgtctgctatcagtagcggc

SEQ ID NO: 26625 - DNA, 2270 bp, Zea mays
  Clone ID: LIB4569-008-D3_FLI
gctccacactcccggccggaatctgaaccgaatgaagtctagtgcagtggtggtggtggtagtgtagagagccctgcccttccgatccggtccggtccggctggattcctcactttagttttttttttcgcttcttctctgatcagatgcaatctcgccgttgccgtccgtagcaaccgcacgcttcctcgctcgccgcgaaccctagagagcaggtgtcggtgtcgcggctcgaccatggccttctggtggccgctgctggtgctcgccgccgcatacgcgctctgtcgcctgctcctcttcctcatcccgcccaccgtcccatccatcgacgtcgacgcctccgacgtgttggccaaggaggacagcttcatctacataccgagacggggtaaatcaactcagactgacaaggtccaatgctatgaaccagcgaccatgaaatacttggggtacttcccagtggtgactcctgatgaggtcaaggaacatgttgcacaatccaggaaagctcaaaggatatgggcaaaaagcagcttcaagcaaaggcgccagtttcttcgaatcgttctcaagtatatacttgaacatcaggatctcatatgcgaggtatcatctcgggacactggaaagactatggttgatgcttcattaggagagataatgaccacctgtgagaagattacctggcttttggatgagggcgagaagtggctgaaacctgaatacagatctactgggagatcaatgctgcataacagagcaaaagttgagttttaccctcttggagtgattggtgcgattgtatcttggaattatcccttccataatgtttttaatccagtgctagcagcagtattctccggtaatgcagcagttataaaggtctcagaacatgcgacttggtcgggctgcttttattttcgtattatacaagcagctctttcagctgttggtgcacctgagaatctggtgcacataataactggttttgcggaaacaggccaagctcttgtatcatcagtagacaaaataatatttgtgggatcaccaggtgttggaaaaatgatcatgaaaagggcgtcggagactctaatacctgtaactctggagcttggtggcaaagattcatttattgtgtgtgaagatgtagatttacccagtgttgttcaagttgctactagagctgctctgcaatctagtgggcagaattgcgctggtgctgaaagattttatgttcacgatgacatctattctgcctttgtttcacagatagtgaagacagtcaaatctataagtgttggccccccattatcaggcagatatgacatgggtgcaatctgtatgattgagcactctgagaaacttcagaatcttgttaatgatgctctagacagaggtgccgaaattgccgtcagagggagctttggcaatcttggtgaagatgcagttgatcaatttttcccaccaactgtcctggtgaatgttgatcacacaatgaaaattatgcaagaagagacatttggacctattataccaatcatgaaattcagttctgatgaagaggctatcaaacttgcaaacgactcaaaatatggtcttggctgtgctgttttttctggcaaccagaagcgtgccatcagaatagcgtcccagttacactgtggggtagcagcaatcaatgattttgcttcaagttacatgtgccagtctttgccattcggtggtgttaaagacagcggattcgggagatttgctggcgtagaaggcttgcgagcttgctgccttgtgaagtctgttgtagaagatagattgtggccatatattagaacagtgatcccgaagcctatccagtatcccgtctcagagcatggatttgagttccagcggttgcttgtggagactctgtatggctatagcgtgtgggacaggttgcggtcccttgtgaatcttataaagatggttaccgagcagaattctgccccggcttcaaatgcgaccacgaagaaaaggcgatgagacgaatgcccggggggttcattgaatctgtttatggtaagtctgatctctggacgctgtaaacctccccaagctgctgtaatcggccttgtttgctctctgaaacaatctcgagcctgggagcttgtgtattcaagcgctttagctttcatttcataaccttctttttttttctctctctccctctctccctttcttattaacacccacatgcgtgggcaatggaaatgaaattccactgtggatgtgcc

SEQ ID NO: 26626 - DNA, 1565 bp, Zea mays
  Clone ID: LIB4569-008-E6_FLI
ccgggacccgaagcacatcccgtcgcatcccatcccactaccacccatctcgtcgtccgccgattcgatccggttcttccaacccaggggctgtgatggcgacgaagaggagcgtgggcaccctcggcgaggcggatctgaaggggaagaaggtgttcgtgcgcgccgacctcaacgtccctctcgacgacgcccagaagatcaccgacgacacccgcatccgcgcctccgtccccaccatcaagttcctcctcgagaagggcgccaaggtcatcctcgccagccacctgggtcgtccaaaaggtgtcaccccaaagtacagcttgaagcctcttgttccacgcttgtctgagctccttggagttgaagtcgtgatggccaatgattgcattggtgaggaagttgagaagttggctgccgctttgccagaaggtggagttctgctcctagagaatgttagattctacaaggaggaagagaagaacgaacctgagtttgctaagaagctagcatctgttgctgacctttatgtcaatgatgcttttggcacggcacacagagctcatgcttcaaccgaaggagttaccaagtatttgaagcctgctgttgctggcttcctcatgcagaaggaacttgactaccttgttggagctgttgccaacccaaagaagccatttgccgctattgttggtggatccaaggtctcaagtaagattggtgtcattgagtcgttgctggcgaaggtcgatatcctcatccttggtggtggtatgatctacacattttacaaggcacaaggatattctgttggaaaatctctcgtggaagaggataaacttgagctcgcaacttctcttattgagaaggcgaaggcaaagggggtttctcttttgcttcccactgatattgtagtagcggacaagtttgcagccgatgctgagagcaagattgtccctgccactgctatccctgatgactggatgggtcttgatgttggtcctgatgccacgaaaaccttcaacgaagcattggacaccaccaagactgttatttggaacggccccatgggagtgtttgagttcgagaagtttgcagctggaactgaggcgattgccaagaagctagctgagcttacaaccacgaagggtgtcactaccatcatcggcggcggcgactctgtcgctgctgtcgagaaggctgggctggcggacaagatgagccacatttcgaccggcggcggtgcgagcttggaactcttggaaggcaagactctacctggtgtccttgccctcgatgacgcctagatccgctgctgctgctgctgctgctactcaggttctgccagctttgcgtgtcatcttgtttcggaccttggtgtaacgctgcaaggttaaggtttactcctccacacatggacttttggggataggcttgccatcgtgttttgctagatgagtcgtgaaataagcttttacttcctcgctgctgtgggtgaagtaactggaattcggaaatttggaactaacaaaaccccccgtggatttgtatgatatgttttgttcgac

SEQ ID NO: 26627 - DNA, 1808 bp, Zea mays
  Clone ID: LIB4569-009-E12_FLI
ggccggccgggggccggcgaacagaggagaggagaggagagactagacccgctagctgaggccgggcggcgcgctggacacgaacatgatggggagaaaggcgctcggctgtgctcctcttctcctcctcttggccgccgccgtcgctccggccgagctcagcgtcggggcggcggctgcctcgggcgcggtcacccgggccgacttccccgcggggttcgtcttcggcgtcggctcctccgcgtaccaggtcgaaggtgcagttgcagaggacggaaggaagcctagcatctgggacacattcacacatgaaggctattcccttgacaacgccacaggcgatgtaactgcggatcagtatcataagtacaaggacgacgtaaagcttctgcatgagatgggtgtcgatgcctaccggatgtcgattgcctggcctcgacttatcccagatggtcggggagccgtgaatccgaaggggctggagtactacaacaatctcatagatgagctccttagctacggaatacagcctcacgtgacgatataccatttcgatttcccacaggctcttcaggacgagtacagcgggctgatcagtcccagattcatagaggacttcacggcgtacgcagacgtgtgcttcagcaacttcggcgacagggtcaagtactggagcaccgtcaacgagcccaacgtcgagacgatcggcgggtacgaccagggaatcctgccgccgcggcggtgctccttccccttcggcttcggctgcgaggaaggcaactccaccacggagccatacgtagcggcgcaccacctcctgcttgcgcacgcgtctgcggtgtccctgtacagagacaggtaccaggctgcgcaaggaggacggatcggactcaccttgcttggttggtggtacgagcctgggacgcagactcccgacgatgtcgcggcagccgcacggatgaacgacttccacatcggatggttcatgcatcctatggtgttcggggactaccctccggtgatgaggaggaacgtcgggtccaggctgccgaccttcacggacgaggaggcggcgcgagtgagggggtctttcgacttcgtcggattcaaccactacatcgtcgtctacgtcaaggctgaccttggccgcctagacgaccaagtgcgagactacatgggcgatgcagccgtgaagtatgacatgccgtttctcaagtcacgcaaccagttcccgttcggcgccttgacgagcgacttcatgacgtccaccccctgggctctcaagaaaatgctgaggcatctccgggtgacatacaagaaccctgcagtcatgatccatgaaaacggagccgccggacagcctgatccatccggcgtgaacagctacgacgacgagttcaggtcacagttcctgcaggactacatcgaggccacgcttcagtccatcaggaacggatcgaacgtgcaaggctacttcgtgtggtcgttcctggacgtgttcgagtacctgttcggctaccgcctccggttcggcgtctacggcgtcgagttcaactcgacggcaaggacaaggtaccagaggcactcggccaagtggtacgccagcttcctccggggcggcgagctgaggccagtcgctctgcctgacggagcatattcacagtgaccagttacacgtgtacgctccggctccaggggaatatctggcgatcagcgctctcggtgaggtggagagaaaatagagagtttgtaagcaaggatagtcggggtggtatatatagcagtgcttagatacggttttcttgggt

SEQ ID NO: 26628 - DNA, 1603 bp, Zea mays
  Clone ID: LIB4569-009-E5_FLI
atacttacagctgaccaggcgatcaatcacgcacgccgctggtcagcagtcagcagcaagccgcctcgtcgcctcgtcgggagtcgggagtctggtgagcgagctggtgatcaggtaccttggaggcctggcttgcttggacgctccattgcttcgacttcgaggtcgtcgcgggtttggatcctgtgtggagggggtaacaccgtgtagctcaactgtcccctagcgccgccgcgcgaaactccctaccggtccattttgtttgtagccattaagctcttcggaggtggagatctgggctgtcgtttccaggaccctggccgcgtcggctgtgatgggtcgaagcgccttggcggttcggttggcttcccttcttgcgtttggtttggtgctcgtctccgtcgaggccagcctcggggatgttgatccgcgctacagaacttgcgtgagggagtgtcaagctacagggattgttggggagaatgtcatcagccattgtcagtccaaagagaactacacttctgttggagtctcttggtataaccgggagcaaatttacatccagtggaaggaactgaactgtaggacagactgtcgctatttttgcatgatgcagagagaaggggaacgacagtcacttggtctgagccctgttaaatatcatggaaagtggccattcttacgtgtttctgtgttccaggaacccctttcaactgcactatctgctgtcaacctactgatgcacttcactggctggctttcatttttccttctagtgaattacaaattgcctcttagaccccagaccaagagaacttattatgaatacactagcctgtggcatatctatgcaatcttatcaatgaacgcatggttttggagctcaattttccatactcgagacattgagttgactgagaaactggactattcttcagctgtggccttgcttggctactcgttgatcctttcattgctaagggctttcaatgtcaaggatgaggctagcagggtgatgtttgcagcccctattttggcattcgttacaacgcacatcttgtatcttaacttctacgagcttgactatggatggaacatgaaagtctgcgtggtgatggctgcggttcaacttctgacgtgggctgtttgggctggtgtaagccggcatccatcacggctgaaactctggacggttgtttttggaggagcactggtcatgcttcttgagctctacgacttccctccatacatggggtttgccgatgcccattcactgtggcatgcaagcaccattccactcacctatctctggtggagcttcatcaaggacgatgccaaattccgcacgtcaacactcagcaagaaggcaaagtagttaagcaaagcgcgacattcttagcatagggtcagagaggatcagattccgattccgtggtctgcacgggggacattttgggggcacacgtgttgtcggacatcatggaacctcggtacatttgccctccccaaaaaagacattcatcttcatccactcaggtttttggcccacaaaagtcaacatactctttagggcgcatgttctgcccttacgaattatctctag

SEQ ID NO: 26629 - DNA, 2771 bp, Zea mays
  Clone ID: LIB4569-009-H11_FLI
ggtcctccgggagcggcgtctcttcttcctggtcgaatctccccgcggctgtgaataggaggaggtcgacgacgccatagcaaaaaacaaatccttggaatgctttcggagggtcggggattcgtcgccggctgcctgcactgatgcttggagcgcgcgaatctgctcaagttttgatcttggcgtgctcttgagtctggaatccgggcattcattggggctttgttctcagtttgcaaggctgcaaggccgtgctagtttgaacccatggagactactagcacaacaaatgaacagactgataggggggcgatgtgggagttggaaaggaatctcgatcagcccatggatgcagaggccggcagattgagaaatatgtacagggaaaagtcctaccctacacttgtgctgttataacttgctttccaaagccttggtgtggtgtttggggatttaggcacatcacctttatatgtcttctccaacattttccctcatgaaattgaagacacggaacaaattattggagcactctcgcttgttatttactcccttaccctgattccacttgttaagtacgtgttcattgtcttgagggcaaatgataatggccaaggtggaacatttgctctttactcgttgctttgccggcatgcaaagataaacactattccgaatcagcatagaacagatgaagaactaacaacatacagccgccacacatatgatgagaaatctcttgctgcaaagatcaaaaggtggttagaggggcaccaattcagaaagaatgtcattcttattcttgttctttttggtacttgtatggcagttggagatggaatcctcactcctgcaatatcagttctttctgcaactggaggaatacaagtggaagagaaaaaaatgaaaaatgatgcggttgtcatcgtctctgtggtcatattgattggattattcagcatgcagcactttggtactgataaagtcagttggctttttgcgccgatagtatttgtttggttcatactcattggagtcctgggcgctgtaaacatttccaaatatgaccaatctgttctcaaggcttttaatcctatctatgtatatcggtactttaagcgagggaagactagctgggcttctttgggaggaattatgcttagcattacaggtacagaagcactgtttgctgatctctcatatttccctgtacaagctattcagattgctttcacggtggttgtgtttccatgtcttcttttgcagtatacaggccaagctgcctatatagctcagaacaaagatcatgtctcccatgccttctatttttcccttccagattctgtactctggccatcattcattgttgcaacagctgctgcaatagttgctagtcaggcaactatatcgatgacatattcgattatcaagcaagcgcttgctctagggtgcttccccagagtgagaattatccatacttccaagaagtatctaggccagatatacagtcccgatattaattggatccttctggtattctgcattgctgtcactgctggatttaaaaaccaaagccagatagcaaatgcatacggtactgccgtgataatggttatgcttgtgacaacatttctcatgatccctataatgctgttggtgtggcgcagccactggaccttggtcatcctgttcaccgtgctgtcactgtttgttgaaattccgtacttcaccgctgtggtgcggaagatcgaccagggtggctgggttccacttgtgtttgctgttgccttcctcatcatcatgtatgtatggcactatggtacgctcaagcggtatgagtttgagatgcacagcaaggtgtccatggcatggatcctaggccttggtccaagcctcggtctggtcagggtgcctggtgtgggcctggtgtacaccgagctggcaagtggtgttcctcacatcttctcacacttcatcaccaacctccctgccatccactccaccctggtctttgtgtgtgtgaaataccttcctgtctacactgtgccactggatgaaaggttccttgtgaagcgaattggtcccaagaacttccacatgtttagatgcgtggcgcggtatggctacaaggacatccacaagaaggatgatgacttcgagcagatgctcttcgacagcctgatgctattcgtcaggctggagagcatgatggaagagtacacggattctgatgagtacagcacccgtgagacgaacctgtcaggcagcgccaacccaagaatcaatggcatcagcgccggttcaaacatggatctcagctacacatcccatgactccattatacaggtgcagtccccaaattatacggggaacagccaggcggtgtcaccaggtcagctgtaccataccgtgggcgacgagattgcgttcctgaacgcgtgcagggacgccggggtggtgcacatcctcgggaacacagtcatcagggcccgcagagattcagggttcatcaagaagattgctatcaattacttgtatgctttccttaggaagatctgcagggagaacagcgccatcttcaatgttccccatgagagcctactgaatgttgggcaggtgttctatgtgtaagcactaaaaccaaacacatgtagtagatgagagttcagcttcggaaccactggagagaatctagctgtgttttgttcataggtaataggagtataatagttgaaagaattgtacagcaaaacagcatctttaatgtgacc

SEQ ID NO: 26630 - DNA, 1483 bp, Zea mays
  Clone ID: LIB4569-010-E10_FLI
ccgggctctcactcgcctcgacgcgcctctgaaagttcggagccgccggcccgtccgcctccctctccgcctcccgtccccaaggccaatagttttcaagtggcaatggcggaccaggctaaccaacccactgtccttcataagctcggtggccagttccacctgcgctcgatcatctctgaaggtgtacgggcccgtaacatatgcccatctgtctcatcttatgaaaggagatttgccacaaggaactacatgacccagagcctttggggcccttcaatgtctgttagcggtggcatcaatgtcccagtgatgcagaccccgctctgtgctaatgctcctgctgagaaaggaggcaagaacttcatgattgatttcatgatgggcggtgtttcagctgctgtttcaaagactgctgctgctcccatcgagcgtgtgaagctgcttattcagaaccaagatgagatgattaagtctggtaggctatcagagccgtacaagggtattgttgactgcttcaaacgtaccattaaggatgaaggtttctcttccttgtggaggggtaacactgctaatgttattcgttacttccctactcaggctttgaactttgcgtttaaggactacttcaagaggttgttcaacttcaagaaggatagggatggctattggaagtggtttgctggcaacctggcctctggtggtgctgctggtgcttcctctttgttttttgtgtactccctggactacgcgagaacaaggttggctaatgacgcgaaggctgccaagggaggaggtgaaaggcagttcaatgggcttgtcgatgtctaccgcaagacactcaagtctgatggtattgctgggctttaccgtggatttaacatctcctgtgttggaatcattgtttatcgtggtctgtactttgggctctatgattccatcaagccagttgtccttactggcaacctccaggacaatttctttgccagtttcgctctgggttggctgatcactaatggtgctggtcttgcatcttaccccatcgataccgtccgcagaaggatgatgatgacatctggtgaggctgtcaagtacaagagctccttggacgcgttccagcagattcttaagaaggaagggcccaagtccctgttcaagggtgctggtgctaacattcttcgtgccattgctggtgctggtgtgctttctggctatgaccagctccagatcctcttcttcggaaagaagtacggctccggcggtgcttaaatggagaaatatgatgacgaacaagagcagtgtgtgttcccggtcctttccaatcaggatctggtgaagtttttgcctttcatatcgaagaaattaataattcatgtagagggaggattcttccaacaatttgttttggatggagacttagatctccaaacactcgtaactatcctactaggtggtgacatcggtccccaaaaacatttatggt

SEQ ID NO: 26631 - DNA, 1346 bp, Zea mays
  Clone ID: LIB4569-011-B8_FLI
ggtcttccgggagacgcgggatttccttcgccgccgccgccgccagtgaccaccttgccgaccggagcgtgtgaaccgtacggagtcgcccgcgtgagatgacggccacctccgcgttcgagtcgtccccggaaatggagcggttcctctgcgagcggctgctgaacacggagcagcccatcgcggagcgcttccgggcgctcttctccctccgcaacctccgcggggatgcgccgcgccgcgccctcctccaagctgcaagggatccttctaacttgcttgcccatgaggctgcatttgcgcttggacaaatgcaggatgctgaggctattcctgcactgatggcagttctcaaagatctttcgctacatccaattgtccgccatgaggcagcggaagctcttggagctattggcctggaaaagagcatccctgtgttggaggaaagtctaacaactgatcctgctgtggaggtccaagaaacttgcgagctggcactaagacgaatagaggagaataagaaagttaatggggctgagagtacaaccacttcaccctttctctcagttgatccagcgctgccttcaaagcatgggctttcagtagatcaattaaggggccttcttctcaatgagcaagagagcatgtaccaacgttatgcagctctttttgcgcttaggaatgatggtggagatgctgctgtttctgctattgttgcagctctgagtgtcaaaagtgctcttctacgtcatgaggttgcttatgtgttaggtcagctgcaaaacaaagccgcttcagatgcgctttctacagtcctgaaggatgtctgtgagcatccaatggtcaggcatgaagctgctgaagcccttggctcaatcgcagaccaagaaagcattgcccttttggaggagtttgcaaaggatcctgagcccatagtctcgcagagctgtgaagtagctctcagtatgctcgagtatgagagatcggggaaatcctttgggtttctcttccttcagactcctcatgtgcagtcctaggttcctcttcgtcgatgatcactcaatgcgaagtgactgaaagcttcttgtattggttaatgtgactggaccagccatatatccactggctttgatgatactctttatcctgataggatctgttttttttttttttggttaatcgtgatatggaggttgaaacacggagcagcatgaaaacaaatggaaaagaaaccatgaaaactatgaagacttataaatttcgacaaaagaatacatgtaaactaggtcagtggatggtttcggcaattatacactcgcagcaaagaaaactgggctatcctcacc

SEQ ID NO: 26632 - DNA, 1215 bp, Zea mays
  Clone ID: LIB4569-011-F11_FLI
ctcgaggccggccgggaggctgccgggtgccacagtgccctgccacccagcatcgctcaatcactcgttcgatccatgctgactcacccgaatggtgtggtccggccgtcgactaaggagccgctcttctccttcggcgtcatcgccgacgtacagtacgccgacatcccggacggccggtccttccttggcgtgccgcgctactaccgtcacagtatcgccgtcctccggcgtgcggtcgagaggtggaacggcgagaggagcgtcaggttctgcatcaacttcggcgacatcgtagacggcttctgccccaaggacaggtcgctggccgccgtgcaggccgtggtgcgcgagttcgacggcttccgcggcgggccgacgtaccacatgctcggcaaccactgcctttacaacctaccccggagcgagctggtctccgtgctgcgcatgccgtcggcgtcgccgggacgcgcttactacgacttctcgccatggcccgggtaccgttttgtggtgctggacgcgtacgatttcagcgccgtggggtggccgcgcggccaccctgtgtccgcggcggcgcggcggtttctggagaagcggaacccgaaccatgacaagaacagcccgagcgggctggaggggacggaccggcggttcgtgatgttcaacggcggcgtgggcgaggcgcagctgcggtggctggacggcgtcctccgccgcgctgagcggcgcggggagaaggccgtcgtgtgcagccacctgcctatgcaccccggtgccgcgtccccgacgggtctcatgtggaactacgaggaggtgatggacgtcgtgcgccgccatggtggctgcgtcgtcgcgtgcctcgccgggcacgtccacaagggcgggtacgccgtggacgacagcggcgtgcaccaccgcacgctggaggccgcgctcgagtgcccgccgggcaccgatgcgtttggacacgtcgaggtgcacccggaccggctgaggctcgttggatcggacagaatggccagcacggagatgctgctcagcccctcgaatgagctagcttctgcgtagaacctgcatttgccgcatctgcttgtaccgacactgttgctctactgctgccatagtcgttggcagttgtttcttgtagttgtagtagttgtagcgaaggctaacgacgaaatcaatggataccaacgaacgtaaccgtcgtct

SEQ ID NO: 26633 - DNA, 1467 bp, Zea mays
  Clone ID: LIB4569-011-G7_FLI
tagctcgtaggatacaacggcaacgggtgacgtccgtgtattttaggacgcatccgctagtgtcgtccctcccagcatccgcatccgcgtgacacaattgttcacttgttcttggtttcggtcttacagaccgtcaccggcagcggcaggcagcagccttggcgggttggtcttgtgtcattgtttcctggctgccatcaatggaggtggtgaacaggtacgtcgccacccggcaccacatcgagggcgccccgacggaggccgattttgaggtgaaggaggagatggcgaggtgggcgccggactccggcgaggtgctcgtcaggaacctgtacctgtccatcgacccgtaccagctcaaccgcatgaagcggagtagcgtgacgcacctcgccgtcgaaggcatcctgcccggccaggctgcttctactctattatctccgtctccgtccgtgaagaggatcactacgtacgcggccggcgaggtagtggcgtcggcgtgcgaggagtacaaggcgggcgacaaggtggccggcgtgctcgggtgggaagactacacgctgttcaagccgtccccggccgtggtcatgtccaaggtcgccgacgacgccgcgggcttccccctgtcccaccacatcaacgtgctgggcaccagcggcatgaccgcatacggtggcttcttcgaggtgtgcaagccggtgaagggggagaaggtgttcgtgtcggcggcgtcgggctccgtcggcagcctcgtcggccagttcgccaagctcgccggctgctacgtcgtcgggtgtgccgggaccgcagccaaggttgatctgctcaaaggcaagctgggattcgacgatgctttcaactacaaagaggaacctgacctgaaatcggcgctgaagaggtacttccccgacggcatcgacatctacttcgagaacgtgggcggggagatgctggaggcggcgctggccaacatgaacccctacggccgggtggcgctcagcggcgtcatctccgagtacacgggcggcgcccggcgcgcggtgccggacctgctggaggtgatctacaagcgtatcaccatccggggcttcttcgcctacgacttcttgtccaagttcgcggagttcaacgccgtcatcggcggctgggtccgggacggcaaggtccaggtgctcgaggacgtctccgacgggctggagagcgtcccgtcggcgttcgccgcgctgttccgcggccagaacgttggcaagaagctcgttaagctggcgtagaaagaaccgtcgtccgtggaggtagctagcatccaggagcatgtacgttcgtctgtcatgcatgctggccgtgcccgtcattcagcaccttaggctatctggagcagcctctttataccactttctaatttactctatctatctcatcatctatttcaaactctaatttatctccattacaaaatagtattttgcc

SEQ ID NO: 26634 - DNA, 1560 bp, Zea mays
  Clone ID: LIB4569-011-H9_FLI
gcgcacggcgaacccgaatcccgagcacaggccgccgctcgctcgctcgctgcagctacgcacgcacgcgcctgctcctccccttagcttccacaaggctcgactcggccggcggcgatggcgcggaagaagatccgggagtacgactccaagcgcctcctccgggagcacctcaagcgcctcgccggcatcgacctccagatcctctccgcgcaggtcacacagtcaacggatttcactgagcttgcaaaccaggagccgtggctctcatctatgaagttggttgtgaaacctgacatgctctttgggaaacgtgggaagagtgggcttgtggccctcaacctagatcttgcccaagttcgccaatttgtcaaggagcggttgggagttgaggtcgagatgggtggctgcaaagctccaattacaaccttcatagttgaaccatttgtgccacatgaccaagagtactacctttcgattgtatctgaaaggcttggcaacaccattagtttctcagaatgtggaggtattgagatcgaggagaactgggacaaggttaagactatctttcttcccacagagaagcaaatgacacctgacgcatgtgctccattgattgccaccctgccattggaggtccgcacaaagataggtggtttcattagagctgtattttctgttttccaagacttggatttctcatttcttgagatgaacccattcaccttggtaaatggtgaaccgtatcctctggatatgagaggagaactagatgacacagctgctttcaaaaacttcaataagtggggcaatattgtgtttcccctaccatttggaagagttctcagtccctccgaaagttttatccatgaactggatgagaagacaagtgcttctctgaaattcacggtactgaacccaaaaggacgcatctggacaatggttgcaggtggtggtgctagtgtcatatacgcagacactgttggtgatttgggatatgcttcggagctaggaaattatgcagagtacagtggagctcccaaggaggaggaggttctgcagtatgctagagtgcttttggattgcgctacctctgatcctgatggccgtaagagagcccttctaatcggaggaggaatcgctaacttcacagatgttgcttctacatttagtggcatcattcgggctttaagagagaaggagtccaaattaaaggctgcaaggatgaacatttatgtccggagaggtggtccgaactaccaaactggactcgccaaaatgcgcaccctaggcgccgaacttggcgttccaattgaggtctatggaccagaggcgaccatgactgggatctgcaaagaagccattgattgcatcatggccgcgtaaatcacaaatgtggttgttccatttgaagtcacatccgttttgtactagacgttccttgtacgtgattgctctggtaaaacagagaacgatcattgtcatgagtaaactcggcctttgtaacacagttacgcaagtaataattaagatcttggtttggtgctctgccacccttct

SEQ ID NO: 26635 - DNA, 1288 bp, Zea mays
  Clone ID: LIB4569-012-C10_FLI
ctcgaggccggccgggaactccccaattccctctcccggagtcatcgacatgctttcctcctccaatagcttagctcccgccgcgctgtcccgcgggatacctctccaagaaccatgccctgcctatcgtttcttctagctccaccgcctcgcccctgtctagctgactcggtgagtcggtcgccactccccaacaaatatcggttcttcctgccccagacccggaggcggccaagtccgcggcttggcgacggcgtgcgaatggcggagatgaccagggtttggagctgcggggaaccgctcgaggttggggtttccatggagagtgacccgattgtcggaggggaggcgccttctcgctcgaggtgggaagcgagccggtgggcgcccgtggaggctgcgctgaatcggatgagtaaatggctggtggctggttgttttgcttttgcagctatttggaagcgtgatgctgaaatcatgtgggttttgctgggtgcggttggcaactctctgctttcgttggttctcaagaagatgctaaaccatgaaagacctgcaccagctttgcggtctgatcctgggatgccatcgtcccatgcacaatccatattctatgctgcgaccgtcctagctctttcattgtactactggcttgggacaaattatctgaccatgattcttgggcctgcaactctgtcgttggccgcctatctttcttggctacgtgtgtctcggggccttcatacactaaaccaggtcatggtgggagctgttgtaggatctgccgtcggtgctctttggtttgcgctctggcattggcttgtgcaggaggcctttgcttcttctgtgcttgtcagagttgctgtcatccttggatcatcagcattttgtgttagctttgtcgtctacatgattcgtcactggctcaaggatgagtaatgtacttcggagctgcaatgggagatggactgataggcatggtgcgtttggaaaagtgaatccgttccgattcttatcagaatcgcttgaaaaaaatggtgacaaatgggttttggcggagcgattcacgagtggaacaattctcttttccttcagaaactctcggattggggaaaatgaagtttcacaccgattcctaatagtcacatacgcctcgtgtcacactagtaattgtatttttttcccagttaatcatttttaagtacaaggaactaaatatgttgtatctagagcaagctcaggagatttatgtcaggaatacagttttgatgaaaatatatccttcaac

SEQ ID NO: 26636 - DNA, 1128 bp, Zea mays
  Clone ID: LIB4569-012-D8_FLI
ctcgaggccggccgggattccgtcgtcgtcgtcagcagcttctgcttgctctggggggaaggagagagagagagcgagagagagagagagatctagtagagaggctagtaggtggtcctcgaacgaagatgttggcggtgttcagcgggcaggtggtggaggtgccggcggagctggtggcggcgggcagccggacgccgtcgcccaagacgaaggcgtcgcagctcgtggggcgcttcctggccgcgtccgagccggccgtgtccgtgcagctcggcgaccacggccacctcgcctactcccacaccaaccaggcgctcctccgccccaggtcgttcgcggccaaggacgaggtgttctgcctgttcgaaggggtgctggacaacctgggtcggctgagccagcagcacgggctgtcaagcaagggcgccaacgaggtgctcctcgtcatcgaggcctacaagacgctgcgcgaccgcgcgccctacccggccagcttcatgctcgcccagctcaccggctcctacgccttcgtcctcttcgacaagtccaccaactccctgctcgtcgcatctgaccccgagggcagggtgccgctcttctgggggatcaccgccgacggctgcgtcgccttctccgacgacatcgacatgctcaaaggctcatgcggcaagtcgctcgcgccgttcccgcaaggctgcttctactccaacgccctcggagggctcaagtgctacgagaaccccaagcacaaggtcaccgctgtccccgccgacgaagaagagatctgcggtgccactttcaaggtggtggaagggtctactgtcctgacggcgctgcactgatcgatcatcatcaggcggaggcgatgcgacgatacagaactttgtacatgcgtggtgggtgtaacatagtggctggcaacaagccatgctcatgcaaaccgatgaatctatctctgtatcatgcatcgatctcggttgcttgctagtccagactccagactccagacatggctatatatagctggtgctaataaataggagtataatcgtcatatcgatcggttgcgtgtggaatgccaatcaagtgtgtaatctgttccaaataacaaacctatgttcctct

SEQ ID NO: 26637 - DNA, 1404 bp, Zea mays
  Clone ID: LIB4569-012-H2_FLI
gcaaggaagaccgcaatacagagcttcgccactgccagcgcgctggccctggagcggaggcaagaggggtgactacaaggagcttttcgtcatggcactgcctaaggacggctgcctcgatggtgccaagatcacagaggtaggaggggtcggctacaaggagcttcttgtcatggcgctgcctaaggacgacagcatcgatggcgccaaggtcgcagaggccatcggcgtcaagctgccagacgtcgggggggccataaggactattttgaatagcagagaggccagagaatttgccagtggggcactagctggtgctatgtcaaaggctattcttgcacctctagagactatcaggacaagaatgattgtaggagtaggacctaggcacatttttggtagtttggtggatatcatccaacaaaacgggtggcaagggctttgggcagggaatacaatcaacatgctccgcatcattccaacccaagcagtcgaactcggaacatttgaatgcgtcaagaggagcatggcagaagcacaagagaaatggaaagaggacggatgcccaaagatacagcttggtaatatgaaaatcgagcttccacttcacctcttatctccagttgctattgccggtgctgctgctggaatagttgccacactggcgtgccatcctctcgaagttatcaaggatcgcttgactatcaaccgagaggtttatccaagcattggccttgccttccgcaggatctataagacggatggtataggtggtttctatgctggcctgtgtccaacgctgattggcatgattccttacacaacatgttacttctttatgtatgacacgatcaagacctcttactgccgcttgcataagaagtcgtctctgagccgccctgagcttctacttatcggcgctctttcaggtcttactgcaagcacaatcagcttccctctggaagtagcaaggaagcggttgatggccggcgccctgcaggggaagtgcccgcctaacatgattgccgccttgtcggaggtgatccaggaggagggcgtcatggggctttaccgcgggtggggggcgagctgcctgaaggtgatgccgaattctggcatcacctgggtgttgtacgaggcatggaaggatgttcttctggctgacaggaacaagccacgctctttagcgaactaaacaggccgtccttgagcaatggaggcgttgctgggattcctgatctattttcagttttggaatcccggctgcggcgagtggggtacatagggcgcgtttctctcttttttgattgactgatgagtggtaagcgttttgttgtgtcatcggcacacagacaaacatcattaatgtgtcaaaaaactaagcgaaaagacaaacccttctgc

SEQ ID NO: 26638 - DNA, 1579 bp, Zea mays
  Clone ID: LIB4571-012-B11_FLI
ccctatcaaaagctggccccttccacagcgcactccctcaccttcctccacggctccaccatcccctcccctgccctgcccccaccgccccgcttccttccgccttgctccgttgcttcctcccaccacagtccactccactcgccggccctgcagctcagtatttgactgagactggtggtggagctgctagcagcgagcctgctacttcctggtcctgacggtgcgttcagacctcagaccagtgccgacgacgagctgtgaggagagggcaaggaagcaagcctgtgaggaaggcggcgatggagaggtacgaggtgatcaaggacataggatcgggcaacttcggggtggccaagctggtccgggacgtcaggaccaaggagctcttcgccgtcaagttcatcgagcgggggatgaagattgatgagaatgtccaaagggagatcataaaccacaggtcactgaggcatccaaacatagttaaatttaaggaggttgtgctaactcccacacatttggccatagttatggaatatgctgctggtggtgagctatttgaaaggatctgtaatgctggaagatttagtgaggatgaggcgagatttttcttccaacaactgatttcaggagttagttattgccactcaatgcaaatatgccatagagatttgaaactagaaaacactctcctggatgatagtatagcacctcggctaaagatatgtgattttggttactccaagtcctctgtgttgcactctcaaccaaaatcaactgtcgggacaccagcttacattgctcctgaggtccttgctagaaaggaatatgatggaaaggtcgccgatgtttggtcatgtggagttactctgtatgtgatgcttgttggtgcctatccctttgaggaccccgacgaaccgaagaatttccgcaagacgcttactcggattatcagcgtccagtacgcggttcctgattttgtccgagtttcaatggagtgcaggcatctgctgtctcggatctttgtggcgaaacctgagcaacggataaccatcccagagatcaagaaccacccatggttcttgaagaacctgcccatcgagatgaccgacgagtaccagatgaacctacagctagtcgacatgaatgtcccctcgcaaagcctggaggagatcatgtccatcatactggaggcccggaagcccggcgacgggctgaagcatgcgggacagctccccggccttgggagcatggagctggatgacattgatgttgacgacatagacgttgaggacagtggcgactttgtatgtgccttgtgacgcggttcaggctgtccggcaccgttgctgcggtggactctcccccactctcctggtctttgtgtcttgctgttattccatgttgtttgtttcagcgagctccgagctcccattttgttgttgtaatatcacatgttttgtgtaaccaaggtagtgacgctgtggataaataatagacgttatgtgttgtattcttgctgaattgttgttcagctccttctgtttgccctgtatgaactgggcagtttcatgagtac

SEQ ID NO: 26639 - DNA, 597 bp, Zea mays
  Clone ID: LIB4572-012-C4_FLI
cgaggccggccgggactgacgagctcgccatggcctccctctcctctgccgccgtcaccgccccttccttcgccgcaccagcgccagcccgcgccgtggtcagaaggaggtccttcaccgtgcgcgcctctctccgcaaggccaccggcaccgccgccgtggcaatggctgccagcgccctgcttgccggcggtgccatggcccaggaggtgctgctgggcgcaggcgacggcgggctcgtcttcgagcccagccagttcaccgtcaaggccggcgacaccatcacattcaagaacaacgccggcttcccgcacaacgtcgtcttcgacgaagacgaggtgccgagcggcgtcgacgccaccaagatctcgcaggaggagtacctcaacgcgccaggcgagacctactccgtcaccctcaccgtgccgggaacctacggcttctactgcgagccgcatcaaggagccggaatggtcggcaagatcaccgtcaactaattaagctagctatcgatcgatatccattcatgtattagctgttgcttcctgctttgtactccgccgatctgtccatctctacatgttttcgtcttcacac

SEQ ID NO: 26640 - DNA, 1810 bp, Zea mays
  Clone ID: LIB4573-002-E10_FLI
gctctgccctactcagtaggcagttgtcgccgcgcataatcatactagtgacacaatcacagctagccacctccccgtccccagcatcgccaaaggtcacatcggtcggccacgggcgcggggcaagaaggaccaggtgacggacgagcaggagggaggaataatggcgggcgcgggcgcgggcgggtggaagaagcgggtgggccgctacgaggtgggccggaccatcggccggggcaccttcgccaaggttaagttcgccgtcgacgccgacaccggcgcggctttcgccattaaggtgctcgacaaggagaccatcttcacccaccgcatgctccaccagatcaaaagggaaatatctatcatgaagatcgtaagacatcccaacatagttaggcttaatgaggtgttggccggcaagacaaagatatacatagtcttggaacttgtcactggaggtgaactgtttgatagaatagtccgccatgggaagctacgtgagaatgaagccaggaagtatttccagcagcttattgatgccattgattattgccacaacaaaggagtttatcatagagatttgaagcctcaaaacttgcttcttgactcacgtggaaacttaaaactttctgattttggacttagcacactgtctcaaaatggagtaggccttgtacacacgacatgtggaacaccaaattatgttgcacctgaggtgctaagtagcaatggatatgacggatctgcagcagacatttggtcgtgtggtgtcattctctatgttttaatggctggttaccttccctttgaggagaacgaccttccacatttgtatgaaaagataactgcagcttagtactcatgcccatattggttctctccaggagccaagtcattgatccagagaatacttgatccaaatccaagagctcgtatcactattgaagaaataagagaagacccatggtttaagaagaactatgtaactattagatgtggtgaagatgaaaatgtcagcctggacgatgttcaagctatttttgacaatattgaggacaagtatgtatcagacgaagtaactcacaaggatggtggtcctcttatgatgaatgcctttgagatgattgcactatctcaaggtttggatctctcagcattgtttgataggcaacaggagtttgtcaagcgccaaacacgtttcgtctcaagaaagccagccaagactgtagtagctacaattgaggttgttgctgagtcaatgggtctcaaggtccactcccggaactacaaggtgaggcttgaaggtccagcgtcaaacagagcgagccaatttgctgttgttctagaggtctttgaagttgctccttctctgttcatggtcgatgttcgaaaggttgccggtgacactccggaataccacaggttttacgagaacctatgcagcaaacttggcagcataatctggaggccaaccgaagtttctgccaaatctacgccgctgaggacgaccacctgctagccgcctagcccagcactgagctactgtagtggcatcaccaagagacgtgattcgtagccgtcagaaagggagagcttctgttgaatctagcattgctcgtggagctgggattcatgttgaccaccaggtgtttgtatattgtagtaacgctattgtagatagtctgtatagctccatttgtgcagttgtacgtagcaggaatatgttaaaaaacaacttttaatgtcaggtataatcggtttgcatccaggaagcatctccaacagtgtcttaaatcagtactctattttc

SEQ ID NO: 26641 - DNA, 1238 bp, Zea mays
  Clone ID: LIB4573-004-D2_FLI
cgtcccgcccaaccctaacccgaccgcaccagccgacctgaccccgccctcggcgtccgccgcgcgcaagctccccatcaagcggcgctccccgcggccgtcgtcatcgcccccgtcctcttcctccccggcctcctccgacccgctccgcgcgcccggcggcggatccgaccagcagcagccgcccttcaagttccagcgcatctggtccgagtccgacgagctccgcttcctgcagggcctcctcggctgcggcacgcagggcctcgtcttcccgcgcgatctcaacgtcttctacgaccgcttctccgagtccatgccccagccctacatccgcgcccagctctcggagaagctccgccgcctcaagaacaagttccgcagcatgtccgcgcgcgtcgcgggaggcatagacccggcccgcctcgcgccgcacgaccgcgacgtgctccacctctgctccaggctgtgggaccccgccaacgccgccacctcgcccttcgcggccagcgccggaacgacggggaacaagcgccgccgctccaacccgcgtggcacgccgcttcctcccccagacgcgtctggggacagcaactcccatgactacaatgggattagctcctctgctcccggtttgtttccggatggttccaacggcgaggttacgttttaccttgagcaagaaagcgggcagctgggcaatcatgaaggcgctgctcttgtagcagatagcaaattcgatgttgttgtgcaggagcagcctgaggccgtggttactctcccgaatgggaacaacggaattggcagtgagatgagtgcggagtgtaaaacggtggtgccgtgcagcaacgagcaccgaatggcaaatgctgtcctagatgtgtttgaggaatgcctgagggaggcaaagagtaacgggattatcaatggtggcaatgcggagagcgagctctccaagcggtggagagcacagaggatggatgagcttgatgtcttgagccggaggctgaggttgctcgtcgagtatgctgcagcggctgggcattgaagcgtagattttggtggttttggtgatgtgcctcccaccctttgtccctttgttgtgtatagaagctaggttattgtgctatgctttgtaacgtcttcctcagctggacccttagaaagcctactatatttgcctatgtacccctcgtgtttaataatttgagcagcataataatctatggtgttagcac

SEQ ID NO: 26642 - DNA, 1094 bp, Zea mays
  Clone ID: LIB4573-008-D1_FLI
ccgggatgagaggcacaaacctcaccccacctatattatcccgtgccccttgtctttcttcctccacaagcagcgaaatccaatctagaagctcccctctccctccctccctctctctctctctcttcgccgtccgaagctccgcacccaatctaatcgacacctcaccgagatgggccgcaagttcttcgtcggtggcaactggaaatgcaatggaaccacagatcaggtcgagaagattgtcaaaaccctgaatgaaggacaggttcccccttcagatgttgtcgaggtcgttgtcagccctccttatgtcttccttcctgtggtcaagagccagctgcgccaagagttccatgttgctgctcagaactgctgggtgaagaagggaggtgctttcactggtgaagtcagtgctgagatgctcgtcaaccttggtgttccctgggtcattcttggacactctgaaaggagagctctgctgggagaatcaaatgaatttgttggagacaaggttgcgtatgccctgtctcagggactaaaggtcattgcatgtgttggtgagacccttgagcagagggaggctgggtctaccatggatgttgttgctgcacaaacaaaagcaattgctgagaagatcaaggactggagcaacgtagttgttgcctatgaaccagtttgggctattggaactggtaaagttgccaccccagctcaggctcaggaagtgcacgcctccctgagggattggctaaagaccaatgccagccctgaggttgctgaatctactaggatcatctacggaggctctgtaactgctgcgaactgcaaagagctagcagcacagcctgatgtcgatggttttcttgtcggtggagcttctttgaagcctgagttcatcgacatcatcaacgcggccaccgtgaagtccgcttaagatgctacgctgaagacgaacatacttttttttgctcaactgtgctatgtaagctagtagcttttgcgcaggagcagagactgttttgcctgcccccaacttctagcttgagcttgctaataatgtttacctctggacgtatcaataatggtgcttatgt

SEQ ID NO: 26643 - DNA, 1523 bp, Zea mays
  Clone ID: LIB4605-006-H2_FLI
ccgggatgtggatatcacacgcacgcgcctacgcttattagccctcattcgaagtcgacggcacccgtcttctctccgcactcgaaaccccatccttgactagctccgatctggtacgagatggccggcaagatgaaggagttagacggcgccagccctgccaagatcttcattggcgggctctccaaggatacaagcatgagtacattcaaagaacattttgggaagtatggggatataattgatgctgtcataatgaaggaccgctacacacaaaagcccagaggctttggctttattacttttgctgatcccactgttgttgacagagtgattgaggatgaacatgttatcaatggaaaaccggttgaaattaagagaacgatccctaagggagctgctcctttgaaagatttcaagacgaagaagatttttgttggtggattaccctcagctctaaaagaagatgaattcaaggaattcttttccaagtttgggaaggttgtggagcatgaaatcatccgtgaccatgcaaccaaccggtcacgtggatttggttttatagtctttgatgcagaaaaagcagtagatgatttattacataagaagggcaatatgattgatctaaatggttctcaggtggagatcaagaaggcagaaccaaagaaaccctctaaccaaccacctcgttcacttgatagtgagcctaggggccgtccatatgcagacagttatgatggatttggcagctcttacaattatggtggtagttttggtccctatagatcacctcgaagttttggcgctaggcctagcagctacagtagtgcttatggtcctggtgattatggtagtggctatgctacttatggtggagcattagtaggataccgtgaaccttccctttattctagtcgctatggtagcacttatggaggcagccttggcggtgggtatggtggtgttagttatgatggtggattagctggtgcatatgagcgtgatgctgggggctatggtggttctagctatggtcgtagttatgactcttcctgggctaatactggtgatgggtttggcaccggtggactctatggtgctaggacaggctatggtggcagtggcggcagtggtgctgctggtcgttaccatccatatggaagatagaaaatctccagtgctgctgtttgctagagaagcttgcagaagatgaattctagatgtgtgctcaagagatcatctgcatctaaaagatgcactgaagttcaatatgctcagttttctgtattaggaagtactgttagatcaacttgtagaaatttaaacctttgttttggtatttggaattggaatttaagcatatttgataagcgtatgcacttttatagatagaaaatctagtgacccgtcaaaactagctgctagtacaagcatgagttattctttgttagtatagtttgctttgtctttacgaatattatggagtggtcaaagttaacctaagggccgaacgcagtttcttt

SEQ ID NO: 26644 - DNA, 1286 bp, Zea mays
  Clone ID: LIB4605-009-A12_FLI
ctcgaggccggccgggacatacaggagttaattgttgggggatgcacactagctcctcacacatggacgatgagtggaggccggtgatggcatgctcgtcttcaacctcatctctgctgtgatgacggcgctggtgaagaaggcgctccagcaagggctcaacgccctggtcctcatcactcttcgccagttggtggccactctcttcctagcaccaatagcctacttcaaagaacggaacacaaggcctaagctcacgctagagatctttgtgtaccacttcttcagtgcagcgcttggtgcttccctgtcgcagtacagcttcttctacgggctcaagttgacgactgcgacgttcgccataacatttgccaacatggctcctgtcctcaccttcctcattgccatagctctacgggtggagtcgctcaacatgaagagcaaatcagggtctgcaaagatggtggggacgctcatgtcgctcggtggagtgctgctgctgagcctctacaagggcatggccgtgacacaccacagcagcggcactcctccgccctctcaagtacaactaggcaacgacggcgacaggaaggtctggatgctggggactgtagcgttactggccaactgcctcgtcttctccctgtggttgctgctgcaaagcaggctgacgaacaagtacccggcgctctactccagcaccgccttcatgttcttcatcagcacgctgcagacaggatcgctgacggtgacggtcgagtggcaccacgcgtcggtgtggattgtcacaaagaagctggagatggtcacgatattgtattcgggaatcatggcgtctgcagcaggcttcctgataatgacctggtgcgtccacaagaggggtccagttttcactgcagccttcatccccatcgtccagatcatggtggccatcatcgatttcttcttcctccatgagcagctataccttggcagaagaaggatgcaatggcggcatgctctgcaggtacgaccaaacatgacgaagaggccagcatcaacaagtagtgaaataatcagcagtcagcatcatcgagtggtggcaaacacagacatgtactagtagtggcggcatgcaattgtttgaagaaaagaaaatctactgtggcaatacaaaaacgatcgatccagaccccttttgccatgcatgagatgtgtttccagcaacactaattaacaaaactgccgatcgatgatatcacgagtttattgttgataaccacttgtcaataaaaacttttgctttc

SEQ ID NO: 26645 - DNA, 780 bp, Zea mays
  Clone ID: LIB4605-009-C9_FLI
ctcgaggccggccgggctccaaagccgtcgccttcctatccatcccttcctcgccacgggggtcgcctgagatcacataaacaatggtgaaggctgttgctgtgcttggtagcagcgatggtgtcaagggcaccatctttttcacccaagtgggagatggccctaccactgtcaccggaagtgtctctggcctcaagcctggcctccatgggtttcatgtgcatgcgcttggtgacaccaccaatggctgcatgtcaactggaccacactacaatcctgcgagcaaggaacatggagcaccagaagatgagaaccgccatgccggtgatcttggaaatgtgacagctggagcagatggtgttgcaaacattaatgttaccgacagccagatcccactgactgggccaaactcaatcattggcagagctgttgttgttcacgctgaccccgatgatcttggaaagggtggacacgagctcagcaagagcaccggaaacgctggcggccgtgttgcttgtgggatcatcggactccagggctgaactgaaacgaatggtcgctggacttcgggggcgcctgggagtgccgtcaccactcaccagcaggctagaataacatcccgagacatcgtgaaataataataataagagcgcctgatatgtgatcagtggtgtactcgccattaagcacctgtggcaaccgatgagctgaactgtgttggactgttggataatgctggttcgcctgagcatgtgttacaagtctgtcggttttgatggc

SEQ ID NO: 26646 - DNA, 1523 bp, Zea mays
  Clone ID: LIB4606-006-G7_FLI
cctctgaaagttcggagccgccggcccgtccgcctccctctccgcctcccgtccccaaggccaatagttttcaagtggcaatggcggaccaggctaaccaacccactgtccttcataagctcggtggccagttccacctgcgctcgatcatctctgaaggtgtacgggcccgtaacatatgcccatctgtctcatcttatgaaaggagatttgccacaaggaactacatgacccagagcctttggggcccttcaatgtctgttagcggtggcatcaatgtcccagtgatgcagaccccgctctgtgctaatgctcctgctgagaaaggaggcaagaacttcatgattgatttcatgatgggcggtgtttcagctgctgtttcaaagactgctgctgctcccatcgagcgtgtgaagctgcttattcagaaccaagatgagatgattaagtctggtaggctatcagagccgtacaagggtattgttgactgcttcaaacgtaccattaaggatgaaggtttctcttccttgtggaggggtaacactgctaatgttattcgttacttccctactcaggctttgaactttgcatttaaggactacttcaagaggttgttcagcttcaagaaggatagggatggctattggaagtggtttgctggcaacctggcctctggtggtgctgctggtgcttcctctttgttttttgtgtactccctggactacgcgagaacaaggttggctaatgacgcgaaggctgccaagggaggaggtgaaaggcagttcaatgggcttgtcgatgtctaccgcaagacactcaagtctgatggtattgctgggctttaccgtggatttaacatctcctgtgttggaatcattgtttatcgtggtctgtactttgggctctatgattccatcaagccagttgtccttactggcaacctccaggacaatttctttgccagtttcgctctgggttggctgatcactaatggtgctggtcttgcatcttaccccatcgataccgtccgcagaaggatgatgatgacatctggtgaggctgtcaagtacaagagctccttggacgcgttccagcagattcttaagaaggaagggcccaagtccctgttcaagggtgctggtgctaacattcttcgtgccattgctggtgctggtgtgctttctggctatgaccagctccagatcctcttcttcggaaagaagtacggctccggcggtgcttaaatggagaaatatgatgacgaacaagagcagtgtgtgttcccggtcctttccaatcaggatctggtgaagtttttgcctttcatatcgaagaaattaataattcatgtagagggaggattcttccaacaatttgttttggatggagacttagatctccaaacactcgtaactatcctactaggtggtgacatcggtccccaaaaacatttatggtcatagagtctgcccttcgtttgtcagtcgggcaatttttcttgcatacaatgccttcgtttaaat

SEQ ID NO: 26647 - DNA, 1753 bp, Zea mays
  Clone ID: LIB4606-006-H2_FLI
ctcgaggccggccgggagccggaggccaaccagtactcgtgccacgactaccacccctcctcttccttgtgatctccgaatactcatctcagattccaagggccgcgccgtgtaatccccggctctccccacccaccatatatctagtatccgcgcctcaaatccctcgcgaaacgccccgccgtaagcagttgttgtctgccgtgatttgagccgggcggacggattgatcccgggacgaggtgtctcagctcttgatcttgatcctgatcctgggaggcgttcctggtttattggtgggagcgaagaagccatgataccttccgtgaggctctctcctggtcctgcagccttctcaggctccagcctacgctcaaaattaccgtcaattccatccatctccagtctcaaaccctccaaatatgtggtctcctcgctgaaaccactctacctagcaccgctagatggtccgcgcactgccgagcttaagtctcggagacggccacttgagttccgttgttctgcttctgctgctgatgacaaggagtcaaagactcaggtggtgccagttcagtcggaaggcgcacagaggttgaagatctccatctatttcgccacctggtgggcgcttaatgtgatatttaacatttacaacaagaaggttctcaatgcattcccttacccctggctcacctccacaccctccctcgcctgtggctctgctatgatgcttttctcgtgggccacccgtcttgttgaggcccctaagaccgacctggacttctggaaagttcttttcccggttgctgtggcgcatacaattggccatgttgctgctacagtgagcatgtctaaggtggcagtgtcattcacacacataattaaaagcgcagaacctgcattcagtgttttggtgtcaaggttcttccttggggagacgtttccaattccagtatatctttctcttcttccaatcattggtggttgtgctctagctgctgtcacagagctgaactttaatatggttggatttatgggtgccatggtatccaaccttgcatttgttttccgcaacatcttctcgaagaggggcatgaaggggaagtccgtcagtggcatgaattactacgcttgcctgtcaattatgtccctggtcatactgactccatttgctatagctatggaaggccctcaaatgtgggctgctggttggcaaaaggctcttgcagaagttggacccaatgttgtctggtggattgctgcacagagcgtgttctaccacttatataaccaggtgtcctacatgtctctcgatcagatttctccattgacattcagcattggcaatacaatgaagcgtatatcagtgattgtttcatcaatcattatcttccacactcctgtccgcgctgtcaatgcactgggagctgccattgccatccttggcacattcctgtactctcaggcaaaggcgtgaggcgggccatgacgacgaacgtctgcagaatcagtagcaagcactaaatccaattttgcttgttccagtggcatgtagatatcgggttagttttccgtatgagagtttgtaataatggatgaatggctctgctgtttcgttcttgtttgttggccagactcaaatccataggccatgaactgcggtcgagtgtacctgaataatactgtaacggagaattcgccgatgctgtttctttatgggtatatatatagtccaagccggaatcccgtttcg

SEQ ID NO: 26648 - DNA, 1285 bp, Zea mays
  Clone ID: LIB4606-006-H8_FLI
ctcgaggccggccggagcgagttggattcagagtcagagcaaccctatctcttccccactccgctcctcgctcaccctctcaccaaatccttctcctccgcgccgccacagccgggcgcgcctccccgatcgagatccaggagatatgcctcgttatgatgatcgccatgggaatacacgcttgtatgttggaagattggcccctcgcacccgttcccgcgacctagaatatcttttcagcaaatatggaagaatacgtgaagtggagttgaagcgtgactatgcattcattgaattcagtgacccccgtgatgctgatgatgcgcagtacaacctagatggcagggaagtcgatggaagccgtattattgttgaatttgctaaaggagttcctcgtggttctggtggttcacgtgagtacatgggaagaggacctccaccaggaacaggtcgttgttttaactgtggaatggatggtcactgggcaagggactgcaaggctggtgactggaagaacaaatgctaccgctgtggtgaatcgggccatatagagagaaattgccagaacagtccaaggaatctcaggcgtgataaaagctattcacggtctccatccccacgtggtggacgtggccgcagccggagctacagcagaagccggagctatagccgatccagatccccatctggatctcccaggggtggacgccgtgaacgtgacgagaggagatctaggagtcttagctacagcaggagcgcaagccccaggcgttctgtctcacctgcaaaggaaaaggagcgcagtcgcacacccaatggcagtaggagcccaaggagccccagcccaagggctgaggtgagcccaccactgaaggataatggtgcacgcaatggctcagaccatgaaggcagccctggtggtggagagaacagcaagaggagtcggagcccatctgatggctaccgtagccctgtggccaatgggcgcagcccgagcccgagggacgatcggagcccaagccccaagggcaacaacgaagatgacgagcgccgtggttcacctagaggaagtcagtcccccctgaactgagaaattctgatcaaatttgggccgcacgattcggttgtaactgttatattttagtttgagacaacaaactgtatttgctcatttctcatacagtcaggtttatgctttttgagctagaaaacatgtgtaagaatttgttaccttcaagctattcctggtttgtgatatggtaatacttgaactatttagcttgcc

SEQ ID NO: 26649 - DNA, 1452 bp, Homo sapiens
  Clone ID: LIB4653-002-F12_FLI
ggcttgggcagcggacatgctgctgctgaagaaacacacggaggacatcagcagcgtctacgagatccgcgagaggctcggctcgggtgccttctccgaggtggtgctggcccaggagcggggctccgcacacctcgtggccctcaagtgcatccccaagaaggccctccggggcaaggaggccctggtggagaacgagatcgcagtgctccgtaggatcagtcaccccaacatcgtcgctctggaggatgtccacgagagcccttcccacctctacctggccatggaactggtgacgggtggcgagctgtttgaccgcatcatggagcgcggctcctacacagagaaggatgccagccatctggtgggtcaggtccttggcgccgtctcctacctgcacagcctggggatcgtgcaccgggacctcaagcccgaaaacctcctgtatgccacgccctttgaggactcgaagatcatggtctctgactttggactctccaaaatccaggctgggaacatgctaggcaccgcctgtgggacccctggatatgtggccccagagctcttggagcagaaaccctacgggaaggccgtagatgtgtgggccctgggcgtcatctcctacatcctgctgtgtgggtacccccccttctacgacgagagcgaccctgagctcttcagccagatcctgagggccagctatgagtttgactctcctttctgggatgacatctcagaatcagccaaagacttcatccggcaccttctggagcgagacccccagaagaggttcacctgccaacaggccttgcggcacctttggatctctggggacacagccttcgacagggacatcttaggctctgtcagtgagcagatccggaagaactttgctcggacacactggaagcgagccttcaatgccacctcgttcctgcgccacatccggaagctggggcagatcccagagggcgagggggcctctgagcagggcatggcccgccacagccactcaggccctccgtgctggccagccccccaagtggtgatgcccaggcagatgccgaggccaagtggactgacccccagatttccttcccttggatgctttcggtcccctcccccaacccctccccctggggctggcctctgctggattttgagatttgagggtgtggcgcatggcgctggggttggaatggggcacccccaagtctgtccccaggctctgccctgcctgggggcagtggctcccctcccctgttgcctctcccgcccctgccccccccgccccgccaaaagccgagggggtgctggcaggcgggcctcaggggctgtctttcctgcacggctgttgtgtgcttcgctgagtgtgggtggtcctgcttgtgtcatggtcatggccttccagccccctccagttttccccaaaccaataaagaaagatacagc

SEQ ID NO: 26650 - DNA, 1554 bp, Zea mays
  Clone ID: LIB4570-001-E9_FLI
ggtcctggcgggggaccacctgccttctctccttccttccatccattcctccctgtctccgccctcttctgactcccgtaggccgtggtgccgccgccgactgctgggactgccctacaccaagtgcccaggtcatcttcgggccattcgccggcgacgagcaccaccaggtgtgccaggttgaccgagctatggacagcctgtggcatcttggggacgagctccgcgggcagcccaaggtggtggaggaccgccagtggtctctcatgacgtccaagctggcggagatcaccaggtccaagggcgagaggatgaacaccgtccctgacgccaagcagtgggacaagacgtcctaccagcttcacgacgacagcaggatcggccacatcggcctcatgaacctggatctcaagatgaacgaggctgccgccatgaagctccccttccgtggcatgccgtatagcatgaaccagatgtacctcaaggggagcaatgccaattccaatgtcaatgcgttcaagatgaatgttggagtcaacaagtactccaatagtccaaacgggaaagacgccaatgggaaaaacaatggcggcagtggcggcaacaacaacaatgggagcgccaacggcacttctgtggctgacaagcgcttcaagacattgccgacgagtgagatgctaccgaggaatgaagtccttggtggatacatctttgtctgcaacaacgataccatgcaggaggatctcaagaggcagctttttggtttgccagcaagatatcgtgattcagtccgagcaatcactcctggcttgcctcttttcctctataactacacaacccaccagcttcatggggtatttgaggctgccagttttggtgggtccaatatcgatcctactgcatgggaggataagaagtgtaaaggtgaatctagattcccagcgcaggtgaggatctgcattaggaagctgtgcaagccgttggaagaggattccttcaggccagttttgcaccattatgatgggccaaagttccgccttgagctctccatcgcggagacattgtcactgctagacctatgcgggaaggaaggcatctgagctgtcgaggaggtggtggtggttgccttgtgagcttctagtaaataccaatcatctttgtatgttttgtggatggtggttggcaacgttgtttatttatgcgcaagctgctgctggtttcgggatggaaggaaagacctggtccctgaaacaagctgcggagagtgagcctgtcagtgtattgtgtctggcgtggtcaagaaccaaatcaatgttggaccgaccgactgagagtttggagtgtgtatgttttgctattactcttatctctagtagagtgtgggtatacctgggcagaatgtgtccccaaaagttgggggcctgtctgtgtactgtgtgcgatggacgccctaagtaaaaaaagggcaggtgatggtcgtgctccaggtttgtgttttgtactctgttgtaccttgaacctcctttgcgttttgcctaatcagagaatgaatgc

SEQ ID NO: 26651 - DNA, 1186 bp, Zea mays
  Clone ID: LIB4570-002-C8_FLI
ctcgaggccggccggggctccagcgagggcactagccgccgccgtttccatctccccggcgctccatcgctgggcacgcaggcgacggcgacggcgctcaggctcgtgctctcaggaacggcgtcagctgcttcctttctcgcctcttgccagtcgcctcgcgccctcgcctttggtcctccgcacggctggtgagctctgcgtgcgtgcctctctctctctcctcccttctccggtggatcatcaacggcgcccggccccggcggctgcgccgtgcgcggcctgagggcagcgggagccagcagccgctgcttagtgccgctttttggaaccctgctatttgttcagacagttgttatatatatctgaagaataacatctttcattgaaagacatacgtagaccgatggcaacactgaaagatgcagcggcaaggaagtctatactggcaacaatccgtcttgttgtcccagccggtgcagcccgtcctgcacctccagttggtccagcacttggtttctaccggctcaatttgatggccttttgcaaggacttcaatgccaggacccaaaaatacaaggcagaaactccaatgcaagtcaccctaactgcctacaaggatagcaccttcgagttcgtggtcaagtcgccctcggtatcatggttcctcaagaaggcagcaggaatcgaaaccgccagcactcgcccaagccacgtgaatgtatcgtccctcaccctccgccacgtatacgagattgcaaagttgaagcaggctgaccccttctgcaagcacatctctcttgaggcgctgtgcaagtccatcattggcacagccaactctatgggtattgcgattgttaaggatctatgagcagcaatgccagccttttagtcatgaagaaatctgtgacattttgtatgttcctagtttgtagttggtgctggagaggatacaactcatctgtctcacagagcttcctgccactgccatgtcaggagtatgaaactctatgcaattcctgggagagccttcagcgcagcctttttctcttcctttgttcattttgtgacttaactggtactatgtggttttacgttggtgctttaaataataaattgtagttttggtttcttccaaaaaaagcaggcaagagacaacctggcgaactgaaacatcttagtagcc

SEQ ID NO: 26652 - DNA, 631 bp, Zea mays
  Clone ID: LIB4570-003-A5_FLI
ctcgaggccggccgggatccgtccaatcaacccgaccgggctgctctgctgcctctccggcgccattgacgagcaagagagtcctcatcctccggcacctggtccgtcgcgtgccgtgcccacccgctaaggccagggcgccccgacttgagctcaccgcgccgaactcgaaccgctgctgttcctcggggcagggtcgtcgaggatgccggagcactcagagaacgcggcggcggacctgatgggcaacatcatggagaccatcgcggagaacctcccgaggcagaagtccgtgcggttcgacgacggcgacggctcctccatctccgagcaggccaagaagctgttcggcggcggcgagagcgggaagaagtcggtacaccacgtgctgggcggcggcaaatccgccgacgtgcttctgtggcggaacaagaagatctcgtccagcgtgctgggcgtggcgacgctggtgtgggtcttcttcgagtggctggactaccacttcctcaccatcctctgcttcatgctcgcgctcggcatggccgtccagttcgcctggtccatcttctcgtccagcgtgccccgcgtgcagctgccggaggagctgttcgcgagcgccggcgcggccctc

SEQ ID NO: 26653 - DNA, 1313 bp, Zea mays
  Clone ID: LIB4570-003-A9_FLI
ctcgaggccggccggggattccgcggataaatgcttgcccctatttgctcagcccgctctcggacgaacccattcacccgtccggccgtccgtgcgcggcgcacccacccggcaccggcaccagcaccaccgcccgcccggcgcccgtcacgctcgagaggaggaggaagaagaagggactgggcgacagcgcgcgatggccgccgtcgtgtgcgtcaccggcgccggcggcttcatcggctcgtggatcgtcaagatcctcctcgcccgcgggtacgccgtccggggcacctcccgccgcgaagctgctgaccccaagaacgcgcacctgtgggcgctcgacggcgcggcggagcgcctcaccatgctgcaggtggacctgctcgaccgcgccagcctccgcgccgccttccgcggctgcgacggcgtcatccacaccgcctcgccgatgcacgacaaccccgaggagatcatcgagccgattatcgccgggacgcggaacgtcgtggaggcggcggcggacgccggcgtgcggcgcctggtgctgtcctccaccatcggcaccatgtacatggacccgcgccgcgaccccgacgccccgctcggcgactccagctggagcgacctcgagtactgcaagagcaccgagaactggtactgctacgcaaagacggtggcggagcagggcgcgtgggaggcggcgcgggcgcgggggctggacctggcggtggtcatcccggtggtggtgctcggcgagctgctgcagcccagtatgaacaccagcaccctgcaccgcggcgagctctgccgcatcctcgccggactcttcccggagtaccctattccgacaaggtgcaaggatcaggtgaacccactgaagaagggctacaagtttacgaaccaacctctgaaggaccttggcgtcaagttcacgccagtgcatgggtacctgtacgaagcagtgaagtcccttcaagacaaggggttcctcccgaagacatctggcgccaaggtgcctgaacgacgcagctgcctgcctcaaacgacatcacagccaccacccgaaatcgtttcgaaactttgaggtggatctgcacacgtgctcaaactggccatgtgtttttttgtcagaacaagccgttcatttgattggttattaaaagattttgggcagtctgttcttacatagcaaaaatgtcttgtctctgtctatggtgcatcctgttgcttttgcactacaactatacacatccttgtctgggtagtctgttctttacatagcaaaatgcgaagtctgcagggtgatttcagcg

SEQ ID NO: 26654 - DNA, 1391 bp, Zea mays
  Clone ID: LIB4570-003-E5_FLI
tgggcaccctgcgcgcggtgctcgccatcctccagtggtggggcttcaacgtcaccgtcatcatcatgaacaagtggatcttccagaaactggatttcaagttccctctcaccgtgtcctgcgtccacttcatctgctcttccattggagcttacattgcaatccatgtcctcaaggcgaaacccctgattcaagttgaaccggaggaccgctggaaaaggatatttccaatgtccttcgtcttctgcataaacattgtgctgggaaatgtcagcttgcgctacatcccagtctccttcatgcagacaatcaaatctttcactcctgcaaccacagttattctgcagtggctagtctggggcaagcatttcgagtggcgcatatgggcttcgctggtccctatagttggcggaatactcctgacttcggtgacagagcttagcttcaacattttcggtttctgtgctgccatggttggctgcctggctacgtctacaaagaccatcttggcagagtccctactccatggatacaagtttgacagcattaacacggtgtactacatggcaccctttgccaccatgatactggctctaccagcgatggtgcttgaaggaggaggtgtaatgaactggttctacacacatgattccatcgttcctgcgctgactatcatcctaggttcgggggtgcttgcgtttgccttaacttctccatcttctacgtcatccattcaacaacagcagtgacgttcaacgttgcaggcaaccttaaagtcgcggtggcagtgttagtgtcgtggtcgatcttccggaatccaatctctgcaatgaatgcaatcgggtgtggaatcaccctggttggttgcactttctatggctacgtgaggcatctgatctcgcagcggcaggctgcagccccagggagtctaggaacagcgcaagcaaggaatcagacggagatgattccccttgttgtggacgagaagcaagaaaaggtttagcaatggtgctaggccttctcttcacttgttgaagagagaattatatatgtactcgtgcgtgcgtgtgtggtgagggtagtaaactggaacttcgtacaagcatcgtttcctccttccatttgtgacactattcgccagcatcagaatgtgaaattgaattaagcgcacgccaggaggattgggcttggatgctggggcttcactcccggcaactcgccggcgtgggcacaggactcccaggccaccggcggccgactctccgtgctccactcgtcgggaactgtgaggaagtgcttgctcatgaacttcctgaacctcttcttgtaatcccttggggaaatcaccgttggcgattcattcttgggcaccaccagagacgctttcaaac

SEQ ID NO: 26655 - DNA, 965 bp, Zea mays
  Clone ID: LIB4570-003-F6_FLI
ctcgaggccggccgggagactcactcccgtcccccctgcctgcctgcgcgcgctctctgcctcgtagcggcgacgacgccctcctccaggtggccaggccatcgtcggatcgtattcctcggccccttctccggtgatgagcacccagaataaaaggctcaaggatgtggaggtcagtttcccaatcgtctacggaaccatttccttctggctcggcaaaaaggccagcgagtataactctcacaagtggactgtatatgtccgctcggcaaacaatgaggatctgagtgtcatagtcaagcgcgcggtgtttcagcttcacccgagtttccagaacccgacgagagtcgtggagcagccgcctttcgagctgtccgagtcggggtggggagagtttgagatagccataaccctttatttccacagcgatgtctgtgacaagcgcttggatctgttccatcagcttaagctgtatccagaagaggaagctggacctcaatcgaccaaaaagcctgttgtcgtggaaacgtacgatgagattgtcttccccgagcctacagaggcctttttcctacgcgtgcaaaatcatccagcagctaacgtgcccaggcttcctcctggtataaccttgcctcctccaggccctatggaaattgttccgtatgaaaagaagcgaggtgacactaaggatcatcctttgagtcagtggttctcgaatttctctgaggctgacgagcttttgaaactagctgcagctcggcaacaggttcaggttcacatagccaagctgagaaggcagttaaccatgatagaaggaatgccccagcaatcgaaagccttttctgtccctggacagcagtttaggcacatctaatgtagtgcacctggtttgtaaggaagatgttggaatggaacctttcagcaactgcttgacagattgggttctgtgtattcgcattgcagtc

SEQ ID NO: 26656 - DNA, 969 bp, Zea mays
  Clone ID: LIB4570-004-A10_FLI
atcgaggccggccgggactgcaagttttgaaaactgaactgtaagatggcatcagcagagctttcccgtgaggaaaatgtgtacatggcgaagctcgccgagcaggcagagaggtacgaggaaatggttgagttcatggagaaggtagcgaaaactgttgactcggagaagcttctcgaatctcaccttgtgccgtcttccaccgctcccgagtccaaggtcttctatctcaagatgaagggtgactactacagataccttgctgagttcaagactggagctgagagaaaggacgctgctgagaacaccatggtggcatacaaggctgcccaggacattgctttggctgagcttgctccaactcaccctattaggcttggactggcactcaacttctcagtgttctactatgagattctcaactcacccgatcgcgcctgcagtcttgcaaagcaggcttttgacgaggccatctcggaactggacaccctgagcgaggagtcctacaaggacagcactttgatcatgcagctccttcgtgataacttgaccctatggacttctgacatctcggaggaccctgcggaagagatcagggaggcgcccaagcacgactcgagcgaggggcagtaaagccggctttacgtgcctagaagctagtacctagtgtttgctgctgtctaatgacactatgcaatgtgatctggaccctggtttcttgggtgcgacgcttgtagcagccgtgttatgattatttgtcgggaaaatttgggggctccccatatgagatgctgccgggcaagacctcggcatcccacctcgtttcaggcgggggacgctggagcgtggtccggttgtgttgggaagccccttaaactgttgtcgcttgcattttaaccttttcatcgccgttcagtggtcctaaatctatggctcgtctcagtggtctagtatatgttttcttggttc

SEQ ID NO: 26657 - DNA, 2359 bp, Zea mays
  Clone ID: LIB4570-004-B11_FLI
taccagtcagtccaccacacagcctacggcctgccctgcctgtagagggctagagctacaagctacaactctgaaagtctgaacagtgcgccgcccaaccagagatggcgccgcataccaccgccgacgacgacggggaggggaacgcgctgtcggtggagcgcgcgttcgcggaccaggcggtgccatcgtggcgggagcagctgacggtgcgcgccttcgtggtcagcttcttcctggccatcatgttcagcgtcatcgtgatgaagctcaacctcaccacggggatcatcccctcgctcaacgtctccgcggggctcctcggcttcttcttcgtacgcctctggaccgccgccatcgagagggtcggcctcctcaggcagcccttcacgcgccaggagaacaccgtcatccagacctgcgtcgtcgcagcctacgacatcgccttcagcggtgggtttggtacatacttgtttggcatgagcgaaaccatcgccaagcaagcaacagaggctgacaatcctcagaatgtcaaaaaccctcacatcggatggatgatagggtttctcttccttgtcagtttcattggcctatttgctcttgtgcctctgagaaaggttatgatcgtcgactacaaacttacgtatcctagtggcacggcgactgcttatctcatcaacggtttccacacgccagagggtgccaagcttgcaaagaaacaagtgaagactctggggaaattcttcttgatgagcttcctctggggcttcttccagtggttctacactggtggggataattgtggattccagaacttccctacattaggccttcaagcttataagaacaagttttacttcgatttctctcctacctatgttggagttgggatgatctgcccccacattgtgaacgtttctgttctactgggaggcatactttcctggggaataatgtggcctctaattggcaaccagaaggggagttggtacgacgccagtctcccagaaagcagtctccatggactgcagggttacagggtttttatatccatcgcgataattcttggagacggcctgtacaacttcgtgaaggtgctcattcgcaccaccgcggggttcatatcgatgatgaagaaaaacagcacgcttccggtttcaaacaatggcagccccatcactgaaggtgtttccttcgatgacgaacgccgcagggacctgttcctgaaagaccagatccccagatcagttgcctacggagggtacgtggctgtcgctgccatctcaatcggcacccttcctcaggtcttcccgcagctcaagtggtactacatcctggtggcgtacatcttcgcgcctgtgctggccttctgcaacgcgtacgggactggccttaccgactggtccctcgcgtccacctacggcaagctcgccatcttcatcttcggcgcgtgggccggcgcgtcgaacggcggcgtcctcgtggggctcgctgcctgcggcgtgatgatgagcatcgtgtcgacggccgccgacctgatgcaggacctcaagaccgggtacctgacgctggcgtcgcccaggtccatgttcatcagccaggtgatcggcacggcgatgggctgcgtcatcgcgccctgcgtcttctggctcttctacaaggccttcgccgacatcggcctcagcggcagcgagtacccggcgccctacgccatcgtgtaccggaacatggccatcctcggcgtggacggcttctcgtcgctccccaagaactgcctcaccctctgctacatcttcttcgcggcggccatcgtcgtcaacctggtcagggacctggtgccgaagaacgtcgccaggttcatcccgctcccgatggccatggcgatcccgttctacctcgggtccttcttcgccatcgacatgttcatcggcaccgtgatcctcttcgcgtgggagacgatcaacaaggccaaagccaacgccttcgcgccagcggttgcgtcggggctgatctgcggcgacggcatctggaccctgccgcagtccattcttgcgcttgccaaggtgaagccgcccatctgcatgaagttcttgtccaggtcggtgaatgcccaggtggacggcttcctcggaagttgaactgttgaaatcgtgacgtgcatgtatattgtgttgatgcaccacgcgtgctgtaaaacgtaccgggtaatgttgtgtcgacacgttctggttttgatgtacatgagtaagtacactagtcgtagggattgctaaattaatgtttggcgtatacgcgtcagcattagtaatgtacatgagtaagtaccaacatctgtatgttacctgggttcaaatttcat

SEQ ID NO: 26658 - DNA, 699 bp, Zea mays
  Clone ID: LIB4570-004-E8_FLI
ggccggccgggaacgccccaacctgccatggcttccatgcccgtatcgatcgatagacgaagctcgatccttgccgtactgagacgtcaactttcttgctgcgtcccgcgtggcggcgcatgaatgcagatggcgcgtggtgcgtgtgccgcccggacgtgtccgatgcggcgctgcagaagacgctggactacgcgtgcgggcacggcgcggactgcgccgccgtgctcccgaccgggccgtgctacagccccaccactgtgcgcgcgcactgctcctacgccgccaacagctacttccagcagaacagccaggccaacggcggcgccacctgcgatttcggcggcacggccaacctcaccgacacagacccgagctctggaacttgcaaataccctgcaacaccaagcgaagcagggacaagcggcaacgccaccggcacgggcacggcaccgccaggctcgacgagtaacccagctacgacgcccagcatgggagggagcgtcacgacgacacctgtcggcgcgtttggtcccgcgcctagcaccttcagcgcggccaccgccactgccgccgcgtttggtggtcgccgtgccctcctcctcgccgtcgtctccgtcctgtctttcttggcgcgctaacttgctcgatcagaagaaatccgtagcatcgtcaccctatgtgtaattggcggccctc

SEQ ID NO: 26659 - DNA, 975 bp, Zea mays
  Clone ID: LIB4570-005-E8_FLI
ctcgaggccggccgggaaaactccgtttcgaattctagggttttgctgctctccgaccccgagctccgaaggccgcagcatcaggcgcggcccccctcgcgtgtgaccgagatggcgctgccgaatcaggggaccgttgattaccccagcttcaagctcgtcatcgtcggcgatggtggaactggtaaaactacatttgtgaagaggcatctcactggagagtttgagaagaaatatgaaccaaccattggtgtggaagttcatccgttggatttcaccactaactgtggtaagatcaggttctactgctgggataccgcagggcaagagaagtttggtggcctcagggatggatactatatccatggccagtgtgtgatcatcatgtttgatgtaacttcaaggcttacttacaagaatgttcctacgtggcatagggacctgtgcagggtctgtgaaaacatccccattgtcctctgcggtaataaggttgatgtgaagaacaggcaggtcaaagccaagcaggttactttccacaggaagaagaatctgcagtactatgaaatttctgccaagagcaactacaactttgagaaacctttcctgtaccttgcaaggaagctggctggtgatccgaaccttcactttgttgaagctgttgctcttaagcctccggaagttaccatcgacatggctatgcagcagcagcatgaagctgagcttgctgcagcagctgcacaacctcttcctgatgacgatgatgatctgattgagtagaaaggatcatgagtcttgaacttgagcaggagttgtgccttgcgtgttttaagttgttctagggtgaactcttgagttctcattgtctggatcatctttttctccttggatgtgttgcatcttttgagtgtggaaatggatggtactcctcgccatgaatttgctggctactttatacattgctttgtaactctgttt

SEQ ID NO: 26660 - DNA, 852 bp, Zea mays
  Clone ID: LIB4570-005-G12_FLI
ctcgaggccggccggggcccggcctttgttactcaaagtcgagaagcgccgtcttccccctttccaacctcaagtctacagtctacaccgaatccatcccccatcgccgccgccgccgccgccgacgacgacgatggcaagcctactccggcgatctgccgtacccgcgcgcctgctcctcctcctcccgcgccatttcgccgccgccggctccgcccccgccttgtcccgctcgttctcccgcttcaacccccgagacgacagctctatgttcgatccaccggagccgccggtgaactggggcgtgagcatagttccggagaagaaggcttacgttgtggagagattcgggaagtatctcaagaccctcggctccgggttccacctcctgatccccgccgtcgaccgtattgcctacgtgcactcgctcaaggaagagaccatccctatccctcaccagaacgccatcaccaaggacaacgtcaccatacagattgacagcgtcatctatgtcaagatcatggacccctaccttgcttcctatggtgtggagaatccaatctatgctgtcctacaacttgcacaaacaaccatgagaagtgaactcgggaagataaccttagataagacttttgaggagagagatgcattaaatgagaaaattgtgagtgccatcaatgaagcagccacagattggggcctgaagtgtatccgctatgggatcagggacataaatcctccagcagggattaggcaggctatggagatgcaggctgaggcagaaaggaaaaaacgcgctcaaatccttgagtcagaagggatgaaacaggcccaaatccttgaatcagaagg

SEQ ID NO: 26661 - DNA, 1073 bp, Zea mays
  Clone ID: LIB4570-005-H11_FLI
atcgaggccggccgggattccgtcgtcgtcgtcagcagcttctgcttgctctggggggaaggagagagagagagcgagagagatctagtagagaggctagctaggtggtcctcgaacgaagatgttggcggtgttcagcgggcaggtggtggaggtgccggcggagctggtggcggcgggcagccggacgccgtcgcccaagacgaaggcgtcgcagctggtggggcgcttcctggccgcctccgagccggccgtgtccgtgcagctcggcgaccacggccacctcgcctactcccacaccaaccaggcgctcctccgccccaggtcgttcgcggcgaaggacgaggtgttctgcctgttcgagggggtgctggacaacctgggtcgtctgagccagcagcacgggctgtcaagcaagggcgccaacgaggtgctcctcgtcatcgaggcctacaagacgctgcgcgaccgcgccctacccggccagcttcatgctcgcccagctcaccggctcctacgccttcgtcctcttcgacaagtccaccaactccctgctcgtcgcatccgaccccgagggcagggtgccgctcttctgggggatcaccgccgacggctgcgtcgccttctccgacgacatcgacatgctcaaaggctcatgcggcaagtcgctcgcgccgttcccgcaaggctgcttctactccaacgccctcggagggctcaagtgctacgagaaccccactttcaaggtggtggaagggtctactgtcctgacggcgctgcactgatctatcatcatcaggcggaggcgatgcgatgatgatgcagaactttgtacatgcgttggtggatggtggtgtaacatagtggctgccaacaagtcatgctcatgcaaaccgatgaatctatctctgtatcatcgatctcggttgcttgctagtccagactccagacatggctatatatatatagctggtgctaataaataggagtataatcgtcatatcgatcggttgcgtgtggaatgccaatcatgtgtgtaatctgttggcaaataacaaacctctgttcctccc

SEQ ID NO: 26662 - DNA, 1872 bp, Zea mays
  Clone ID: LIB4570-006-E1_FLI
tcgaggccggccggggcgcaaggtgcgaaaggcaccttccctgcccgattggcgatttaagtggtgggggagggaaggccgatggtcagtgaaagagaggtaggtggccggacggtggtggcatcgccaattcaactccgcatctgaatcggcactcggcagcgcgccagctccataggaggaggagatggcgctcacaagaatcggtcttgctggccttgcggtcatggggcagaaccttgccctcaacattgcagagaaagggttccccatctctgtgtacaacaggacaacctccaaggtggacgagaccgtgcagcgtgccaaggcagaaggaaaccttcccgtctacggcttccatgaccccgcgtcctttgtgaactccattcagaagccacgggtggtgatcatgctcgtcaaggccggcgcgccagttgaccagaccatcgcgacgctcgcagctcacttggagcagggcgactgcatcatcgatggggggaacgagtggtacgagaacacggagaggagggagaaggccatggaggagcgcggcgtcttgtatcttggcatgggtgtctctggaggagaggagggtgcccgcaacggcccgtccttgatgcccggaggctcgttcgacgcttacaagtacgtcgaagacattgttctcaaggtggctgctcaggtccctgacagtggcccgtgtgtcacgtacattggcaaaggtggatcgggcaactttgtcaagatggttcacaacggaatcgagtatggcgatatgcagctgatttccgaggcttacgacgttctcaagtcggtcggtaagctcaccaacagtgagctgcaccaggtgttctccgagtggaacaagggcgagctcctgagcttcttgatcgagatcacggccgacatctttggcatcaaggacgagcatggcgatggctacctagtggacaaggtccttgacaagaccgggatgaaagggacagggaagtggacggtgcagcaggccgccgagctgtcggtggccgctcctacgatcgaggcgtccttggactcgaggttcctgagcgggctgaaggacgagcgggtggaggcctccaagatcttccagggtgactactactccaccggctcgccggtggacagggcgcagctggtggaggacgtgaggcaggccctgtacgcgtccaagatctgcagctacgcgcagggcatgaacatcatcaaggccaagagcgcggagaaaggctgggggctcaacctcggcgagctggccaggatctggaagggcgggtgcatcatccgcgccatcttcctggaccgcatcaagaaggcctacgacaggaacccgggcctcgccagcctgctcgtagaccccgagttcgcgcaggagatcatggacaggcaggcggcgtggcgcagggtggtgtgcctcgccatcaacaacggcgtcagcaccccgggaatgtccgctagcctggcctacttcgactcctaccgcagggacaggctgcctgccaacctggtgcaggcccagagggactacttcggggctcacacctacgagagggtcgacatgcctggctctttccacaccgagtggttcaagattgcgcgcaacatctccaacaactgatgagctgctcaacggatggcatgcccggtgttgactactccagtcggtaatgagatttcctgcaggaacttgtctattgatctttgtaagttaattatttatatgaataaaataagagcaaacatgcttgtgtttgggcaccctctgttttctcctccctgttaatcaatgcaccatgctccaaaggtgatgtacataattcagacaagtctcgatgatgtacatgttacagaacc

SEQ ID NO: 26663 - DNA, 2465 bp, Zea mays
  Clone ID: LIB4570-007-A11_FLI
tttcggtgtctgatcaaaaatttttagcacgagatgacgtgcttctagttgttgttgatatcttgtcctgagttgagtaaacctgaagctggaaaggagcggatcacattcgtgctcttgctcttgttgacttctaggtctatcttagatacctagaggctggaaggggtcagatccagttcctgtggtcctagtaacaaggtcctcttgggggaaggcgccatgacctacttccccgaggaggtggtagagcacatcttcagcttcttgccatcgcacagcgaccggaacacggtctcccttgtgtgcaaggtgtggtatgaggtcgagaggctgagccgacgagcggtgttcgtagggaactgctacgctgtgcgccctgagcgtgtggtgctgcggttccccaatataaaggccctcacggtgaaggggaagcctcactttgcagacttcaaccttgtgccgcctgattggggtggctacgcagggccatggattgatgcagcagcaaggagctgtgttggtctcgaggagttgcgcatgaagcggatggttgtgtttgatgagaaccttgagctgctagctcggtcattcctgagattcaaagtccttgtccttatcagctgcgaggggtttagcaccgatggtctagctgctattgcgagtcactgcaagctcctgagggagttagatttgcaggaaaatgatgtggaggaccgtgggcccagatggctttccttccctgattcctgcacttcgctggtctccttgaatttcgcttgcatcaaaggggaggtgaattctggtgcgttggagagacttgttgctaggtctccaaatctacgcagtttgaggttgaatcgttctgtttcagtagacacactctcaaagatactattgcgagccccaaatttggaagacttggggacaggtaatctgacagatgagttccaagctgagtcctattccaggcttactagtgctctggagaaatgcaaaaagctgagaagtctgtctggattttgggatgcttctcctatttgtgttccgtatatctatcccctctgtcatcaactaacaggcctaaacttgagttatactcccacactggattattctgatctagctaaaatggtcagccgctgtgtgaaactccagcgtctctgggtactggattgcatttcagataagggtttgcaagtggtggcctccagttgcaaggacctacaagaactcagggtgtttccatcagaattttatgttcctggtgcttctgcagtgacagaggagggacttgttgcaatatcgtcaggctgcccaaaactgacctctttgctgtatttctgtcaccagatgaccaatgaagcgctaattactgtagctaataactgcccaaatttcatcagatttagactctgtatccttgagccaaagaagccagatgccatgacaggccagccgttagatgaaggttttggtgcgattgtccgtgaatgcaaagggctaagacgtctgtcaatatcaggtcttctcacagacaaggttttcatgtatattggaaaacatgcaaaatacctcgaaatgctttctatagcatttgctggagatagtgataaggggatgatggacgtgatgaacgggtgcaagaatctgaggaagcttgagatcagagacagtccatttggcgatgttgcactcttgggaaatgttgccaagtatgagacaatgcgatccctttggatgtcttcatgcaatgtcacattaaaggggtgccaggtccttgcatcgaagatgccgatgctcaatgtggagatcatgaatgaactagatggaagtagtgaaatggagaaccatggagacctctctaaagtggacaagttatatgtttaccgcacaactgctggagcgagggatgatgcaccaaattttgttaagatcctacagagctagccgcgactacccttatatcttcccacctcgagggatggtcggtggaatccggcatgcctggggccagggcaacagtggtaagttcttgaatcgtctccccttttgcagggtcaggaaaagccacactggcctgcgcccttatcgtggagcaacacgaccgggaatccatcatcatcctctgtaccaccgcccccctccctttcagtgtctggtcatatggccacccaggcccccctttattacctgtgaattctcccactcgagaggaggggaccgaacggataactttttctagccatgtaacatctctagtgtacttgtctccatttgcttttgacattggcacggtggattgtgttgctggcgtcgctgttgtagtgttttgtttcgcaaacctgagaattatcgggacattccggggacgacgctctgtttcttgctcctgtgaatgcatggactgcatgtaatatttgatggccttgcaggatttatcgtacacacttttcgcccttgct

SEQ ID NO: 26664 - DNA, 1774 bp, Zea mays
  Clone ID: LIB4570-007-A5_FLI
cggggaaacatccgttgtttcttagctcgtggtgccattgcattggtatcttcgtcttcgttgtagacatggggatgctggcttctgctctgagttctttcaacaagaaaagcacgttgttgcagatgcttacctcactggcgaagacagtaggcaggattccagcttcgtgggggagacatgcgtggagcatcggaagcgaagatccaaggagagcggtccatgctctcaaggctgggacggctctcacgctggtgtccctcctgtacatactcgagcctttcttccaagggatcgggaagaacgcaatgtgggctgtcatgaccgtagtcgtcgtgctcgaattcactgcaggagcaaccatatgcaaagggctgaatagagggctgggaacagtgctggcaggctgtctagcacttctcatcgagctcgtagcagccggaaccgggaaggttctgcgcgctttcatcgtgggggcttcggtgttcatagtaggatttgccgccacatataccagattcttcccagcgatcaagaagagctacgactacggtgtgctgatcttcctcctgaccttcaacctgatcacggtgtcaagctaccggcagcaggacgtggtgtcgttgacgagagaccgcctgagtactatcgccattggctgcgcgatatgcctgttcatgagtctcttggtgttgcccaactggtccggagaagacctccacagtagcaccgttggcaaattccaaggattggcgacgtcaattgaagcttgtgtgaatgagtatttccgagaccaggatgaaggcgacgacgttcttggcaagcaggaagcaagagcttccattcagatcggctatagagcagtcttggactcaaagtccagtgatgagaccctagcacactatgcgagctgggagccaagacactcgatgcattgttacagctacccatggcagaagtacgtgaagctcgggtccgtgctcaggcacttcgcctacacggttgctgcacttcatgggtgtctggaatctgaggttcagactccgccgtccgtgagatcgctgttccgaggcccatgcacaagagttgcacgagaagtagccaaggtcctgcaggagcttgcagcgagcataaagcatcaccggcggtgcgcccccgacgtgctctccgaccatctccacgaagcgctgcaggatctgaactccgccatcaggtcacagccgcggctcttcctcggctccaagcacgcgtgcgccgccaacaagcgggtgctgctgatggaactgaactccgggtccgggaagctttccgcgtcgagagcagctcttcgctcgttcaagaccgacgcgacagcgctgtccgagacgaggaacgcccggtcagaccaaccgccgccgccgtcggatcgcagcgagaggagcggcggcttgctgcggccgacgctcagcaagatcgccatcacgagcctcgagttctccgaggcgctgccgttcgccgcgttcgcgtcgccgctggtggagatggtggtgcggctggagctggtgatagaggaagtgaagaacctggagcgggttgcgaacttcagagagctcgctactgggcataatcacctgatcgtcgatctcggtagcaaggagaagacgaggaacagtaatgctgcggcgttacaccctgtttctgctgcagctgaatgagggctccattctgagattgtaggctggaatatttctgttcatttcctatataaaaagcagccgtctgggaagagagatgt

SEQ ID NO: 26665 - DNA, 1823 bp, Zea mays
  Clone ID: LIB4570-007-A9_FLI
ggccggccgggatcgatccatccatcgatcgcccacgcttccgtccatccagactccagagagataaaatctaattcctggacctggagtgcagaccgatcgccgccgccgccgcgttgtttcttgtgtgcgcagctgtggtgatggtgcggtaaaagaaggctgctccatcgctccaacaaaaaaaaaggtcgagatcgcacgcggcaggcgacaagcagtttccaaagagaagggaagcctagaggaagggagctagagatgggggagggcagagcaggagacggcctcatcaagctgttcgggaagaccatccccgtgccggagacggccgccgtcggcgaggctgccaaggacatccaacaaagcggcggcagcggcagcggcacgactgatccgaaagggcaagagaacaacgttcaggactccacaggctcgcctccgcagcaggaggtcgcggacaccgaagactcgtcggcagacaaacagcagggcgaggcgggcaacccaaaggagaagctcaagaagcccgacaagatcctgccgtgcccgcggtgcaacagcatggacaccaagttctgctactacaacaactacaacatcaaccagccgcgccacttctgcaagaactgccagaggtactggactgccggcggtgccatgcgcaacgtgcccgtgggcgcaggccggcgcaagagcaagagcgcgtcggccacttcccacttcctccagagggtcagggccggtctgcccgtcgacccgctcgtctgcgcggcagccaagactaacggcacggtgctcagcttcggctctgccatgtccagcttagacctcacggagcagatgaaacagctcaaggagaagctcgtcccgatagcgggggacgagcgctcagttggctctcgcaatcaaggaccttctgccaaggcagaagacccggaccggaaggaaaatgttacagcagataaatccgcgagagttgttcagcatccatgcacgacgaacggggtggccatgtggccatttagctgcgcgccaccagtaccggcctctgcctgttacggcccaggcagcatcgcaatcccgttctacccggcagctgctgctgctgctgcctactggggttgcatggttccaggagcttggagtggcgcatggccgcctcactccggccagtccgagacgggctcatccattacctccgcctctccagcagcatccaccaagtccaacatctgcttcacgccaggaaagcaccctagagaccgcgacgaggaaggaggcgccaaaggaaatggcaaggtgtgggtgcccaagacgatccggatcgacgacgtggacgaggtggccaggagctctatcctgtcgctaatcgggatcggcggcgacaaggcaggcaaagatggcggcagaggctgcaagctcgcaagggtttttgagcagaacgaagaggcggcaaggacggcaactcctcactcggcagccatcagcggcttgccgttcttgcaggggaacccagctgcgctctcgcggtcactgaccttccaggaggggtcttgagcctctcgctcgattcacagctgagaattttgtacattagagggttgtatgtaatctaatctaggtggggggtggggctcatagctgccagcggacattgaaactatacaatagatagatatttgtagatagccaatatatatgggtcgggggaggaaaaaaaggataatgagagcaagtccccttatttgtatatattataatggattggaatatttggttgccaagtggtcttccagcaatagcgccagatgttctgatcc

SEQ ID NO: 26666 - DNA, 1631 bp, Zea mays
  Clone ID: LIB4570-007-C11_FLI
taccctcgaggccggccgggatccatctgctctgctccggtccgttccgctccttcctccccctatctagctagccttcccgttcctgcatcgcggcggagatgggcgcctccaccacgccgctcgcgtcggcggcggcgctgcttctgctgctgctcgcgccgctcgccgcggcggcggacagcatgtcgatcgtctcctacggcgagcggagcgaggaggaggcgcggcggatgtacgccgagtggatggcggcgcacggccggacctacaacgccgtcggcgaggaggagcgcaggttcgaggtgttcagggacaacctccgctacgtcgacgcccacaacgccgccgccgacgcgggcgtccactccttccgcctcgggctcaaccgcttcgccgacctcaccaacgacgagtaccgcgccacctacctcggcgtcaggagcaggccgcagagggagaggaggctcggtgacaggtacctggccggcgacaacgaggacctgccggagtccgtcgactggcgggccaagggcgccgtcgcggagatcaaggaccagggcagctgcgggagttgctgggctttctcaacaatagcggctgtggaaggcatcaaccagattgttactggcgacatgatctccttgtctgagcaggagcttgttgactgtgacacttcatacaaccaggggtgcaatggaggtctgatggactatgcgtttgagttcatcatcaacaatggcggaatcgacaccgaggaggattacccttacaagggcacggacggacggtgtgatgtcaacaggaaaaacgccaaggttgttgctatcgacagctatgaagatgtaccagcgaacagtgagaaaagtctgcagaaggcagttgcgaaccagcccgtcagtgttgcaattgaggctggtggcagagcatttcagctctacaactcgggtatcttcacaggaacctgtggaacagcgttggaccatggtgtcacggccgtcggctacggcacagagaacggcaaggactactggatcgtgaagaactcttggggcagcagctggggcgagtccggctacgtcaggatggagcgcaacatcaaggcgtccagcggcaagtgtggtatcgccgttgagccgtcgtaccctctgaagaagggcgccaaccccccgaaccctgggccgaccccgccttcccccaccccgccgcccaccgtctgcgacaactactactcgtgccccgacagcaccacctgctgctgcatctacgagtacggcaagtactgcttcgcctggggctgctgcccgctcgagggcgccacctgctgcgacgaccactacagctgctgcccccatgactaccccgtctgcaacgtcaagcagggaacctgcctcatgggcaaggacagcccactgtcactgtcagtgaaggctacgaagcgcaccctggccaagccgcactgggctttccctggcaacacagctgctgacggcatgaagagcagcgcatgagaaaaacgcagcatggcattaggccgccaacagccagcatgattagagcccccctgcatgcagaatgatcacccggtcccgtagttcacgacgaaagcatggctgggcggccctcgagct

SEQ ID NO: 26667 - DNA, 1043 bp, Zea mays
  Clone ID: LIB4570-007-D5_FLI
taccctcgaggccggccgggagcgggacgaactcgtcactggtgtgggccgtggctgtacgccgcagagtgaagcgagacgagacgacgatgcgcaagtgggcgctctcctccgcgcccctccttctcttcctcctcaccaccctccccgacccagctaagaagctacaggtgaatgcggaagagagcagcgatgacttagctaacccacccaaggtagaggagaagcttggtgctgtccctcatggcctgtccaccgactctgaggttgcccagagggaagctgagtctatctctaggaagactcttaggagctccgccgagaagtttgagttccaggctgaggtgtccagactcatggacatcatcatcaactcactctacagcaacaaggatatcttcctgagggagctcatatccaatgcctctgatgcattggataagatcaggttcctttcccttactgataaggaagttctgggtgaaggtgacactgcaaagcttgagattcagattaagttggacaaagagaagaaaatcctctccattcgggataggggtattggtatgaccaaggaggatcttattaataaccttggaaccattgctaagtctggcacttcagcttttgtcgaaaagatgcagtctggaggtgacctcaatcttattggacagtttggtgttggcttctactcggtgtacttggttgctgactatgtcgaagtggtcagcaagcacaatgatgataaacaatatgtttgggaatcaaaagctgatggatcgtttgctatctccgaggatacatggaatgaaccccttggccgtggaaccgagataagattacatctgcgagatgaggccaaggagtacttggaagaggataagcttaaggatttggttaagaagtactctgagttcatcaacttccctatctatttgtggtcaaccaaggaggttgatgttgaagtgccagctgatgaggatgagacaagtgaagaagaggattcgtccccagaaactacagaagaagagacagaagaagat

SEQ ID NO: 26668 - DNA, 576 bp, Zea mays
  Clone ID: LIB4570-007-H6_FLI
aaagctggagctcgagggccgcccgaggaccctgagaacccgtacgggttcctgaggttcccgcagggctacaacccggagctggacagcctcgcctccaaggtccgcggcgacgtgcggcgcgcgtgctgcgtcgtgtcgggcggcgtgtacgaaaacgtgcttttcttccccgtcgtgcagatgctcaaggaccggtaccccggcgtgctggtggacgtggtggcgtcggccaggggcaagcaggtgtacgagatgtgcaagaacgtcaggtacgctaacgtctatgaccccgacgacgactggccggagcccgccgaatacacgcacatgctcggcgtcctaaagaataggtactatgatctgatcatctccacgaggctggcggggatcgggcacgctctcttccttttcatgtcgtcggcgcgcgacaaggtcggctacgtttaccccaacgtcaacagcgtcggcgcgggcctcttcctcaacgagatgttcaaggcgccgactaacaacctcgccgacggcgggtaccacatgtataaagacatgctggagtggatcggccggcctcga

SEQ ID NO: 26669 - DNA, 637 bp, Zea mays
  Clone ID: LIB4570-008-F7_FLI
ctcgaggccggccgggggctgctgcccccaacggaacgacggccagaggaagctagcagagtcgagagagagagagagagagagagagagagagagagagagagagcatggctggcaggagtttcctgattcggtcccccaaggaggaggagtccgacgccgccgtcagagaagctgtactgctgggagcaaagaacgccgcaatagctggtactgtggttgcagttcccacgttggttggctgccgcgtccttccttgggctaaggcgaatctcaactacactgcacaagcactcattatatctgcagcctgtattgctggcttcttcatcactgctgacaaaaccattctacggaacgcacgacaaaacaccatcgggaagcttgacaagtcaacctgatgcagagatgtagctgaagctgaaaaggttctctggttgccgcggcggttgatagggtgtcttttgccccatatgcagtggcaccatttctcttcgtggacaagtaatttttgggtgtttggctattcaaaccagaggttgttctgtaatgacttgtctaactgatggacccaactattgtatccagtttactccgaatttgaatcagaataaaaggtggttctatatgttcgtag

SEQ ID NO: 26670 - DNA, 1573 bp, Zea mays
  Clone ID: LIB4570-008-H8_FLI
aaggccggttaaaaggttactagtgaagaatccaagggccaggctaacagctgctcaagctctctcacatccgtgggtaagagaaggaggagaagcatccgatatccccgtcgacatatctgtgttatcaaacatgcgtcagtttgtcaagtacagccgtttcaagcaattcgcgcttcgggctctggcgagcacccttaacgaggaagagctatcagatctgaaggatcagtttgatgcaattgatatcgataaaagtggatcgattagtatcgaggaaatgcgtcatgcccttgcaaaggatcttccctggagattgaagggtccccgtgtgctggagattattcaagcaattgacagcaacactgatgggctcgtggacttcaaggagtttgttgcggcaactctccatatccaccagatggcggagctcgactcagaaaggtggggcatacgctgccaagctgctttcagtaagtttgatcttgacggtgatggatatatcacgccggaggaactcagaatgcacactgggtcgaagggatctatcgagccgctgctggaggaggccgacatcgacaaagacggcaagataagcctgtccgagttccgcaagctcctacggacagcgagcatgagcaacgttcccagcccaaggggccccccaaaccctcaggctctgtgaattccggctcggccactagggaggagcaagcttaggaagttgccatacaatagccatgtgttctttgggttcttcagagtgccatgtgatgtttctggtttttagcgtccaggttatgtgtgcagtgcagccccgagtgagtttcgaagtaaatattcagtgctttctttttctttccggaggagtgaaaggtggaggtacgcgcacgctcgtccttgctttctccgtgctcggctttcaggtcctcccagcgctcagatctcatagcctcctccatcagcctgttctccacgcggcaccagacgcacgattcgtctctgcttccctcgtcggccaagctctctctcccgctgccttctctgtgccgcctcctcgccatgctgtgcgctgccagccgcgccggtgagctcgcccaggtccggcgacctgctccggctcgactttgtccacgtctgcatcttgcccaactctgctactcctgactcgccggcgacctgcagctcggacttcagcatcggccttttgtgtgctccgctgcgccagatcgccgtgttaccgtggagctacatgccttgcccttcgctgtcgttgtagcggagtcgtcatcgcccaagtgctgagcgccctgaactcgctaccgttctgcagccccgccgtcgactccctgctcgtctcgctactttgtcatcattcactatccccgtcctcgacgtctaccttgccgctcctcgtgtctagcaagccgtcacgtttggcgggtttcctctatgcggcctcacgcgttcctctcgcttcattcacatgtcgtgtggtagagcaggtatggttatttgattcgatgtatgtgtggatgcggaataaatttcaagagaaataggttcttgtgcg

SEQ ID NO: 26671 - DNA, 2353 bp, Zea mays
  Clone ID: LIB4570-009-B10_FLI
cttctccttcttggcggctgcggccatttttttcttctttctctcttctattctatctcttaaaccctagatttgatctgggtttttcctgattccatttagggtttctctatcttctttttttttttcttcttcttcttctttctctttggtcgcatccccttttatccgagaaggatctatccaaatctttgtttgtcgaatctcctctcatggctaccgttgctcctcctgctgatcaagctacagatctgttgcagaaactatccttggactcgccagcaaaagcttcagagatccctgagcctaacaagaagactgccgtctaccagtatggaggcgttgatgttcatggtcaagttccttcttatgatcgatctttgacaccaatgcttcccagtgatgctgctgacccttcagtttgctatgttcctaatccttacaatccctaccagtattacaatgtatatgggagtggtcaagagtggactgactacccagcttacacaaatcctgagggtgttgacatgaattctggaatttatggagagaatgggactgttgtgtatcctcagggttatgggtatgcagcgtatccttactcgccagcaactagccctgctccacagcttggcggggaagggcagttgtacggtgctcagcagtatcagtatcctaactattttccaacagtggaccgtatgcttcatctgtggctacacctacccagccggatctctctgcaaacaaacctgctggtgtgaagacactacctgcggatagcaataatgttgcttctgctgctggtatcacaaaaggaagtaatggatcagctccagtgaaaccaactaaccaggctacccttaacacctcaagtaatttgtatggtatgggtgctccaggaggaggtttggctgctggttatcaggaccccaggtatgcctatgaagggtattatgctcctgtgccgtggcacgatggctctaagtactctgatgtgcagagacctgtttctggtagtggagttgcatcctcctattctaagtctagcacagtaccttcatcgaggaatcaaaactaccgctcaaattctcactacacgagcgtgcaccagccttcatcagtgactggctatggtacagctcaggggtactacaacaggatgtatcagaacaagttatatggtcagtatggtagcacagggagatctgctttgggttatggttcatctgggtatgattcaagaacaaatggaagaggatgggcggccacagacaacaaatacagaagctggggcaggggtaacagttactattacggaaatgagaacaatgtagatggtttgaatgaacttaacaggggacctagagctaagggcacaaagaaccagaagggaaatctagatgatagcttagaggttaaggagcagactggagaatcaaatgtaactgaggttggggaggcggataacatatgtgttgttcctgacagagaacagtacaataaagaagatttcccagtggattatgcaaatgccatgttctttatcatcaagtcatacagtgaagatgatgtgcacaagagcattaaatataatgtttgggctagcacaccaaatggaaacaagaagcttgctgcagcataccaggaagctcaacagaaagctggcggctgtcccatctttctgtttttctcggtcaatgcaagtggacaatttgttggtcttgctgaaatgacaggaccagttgatttcaacacaaatgtggagtactggcagcaagataagtggaccggctctttccccctcaagtggcatattgtgaaggatgtgccaaacagtttactgaagcatattactttagagaacaatgagaacaaacctgttaccaacagcagagacacacaagaggttaagttggagcaaggtttgaagattgtgaaaattttcaaggagcatagcagcaagacttgcattttggatgatttctcattctacgaggttcgacagaagactatcttggagaagaaagccaagcaaacccagaaacaggtaagcgaggagaaggtaaccgatgaaaagaaggaatctgcaactgcagagtcagcgagcaaggaatctcctgcagctgttcaaacgtccagtgatgttaaggttgctgagaatgggtctgttgctaaaccagtcacaggcgatgtggtggcaaatggttgctaactaagaggatggtgtcgctcacggcatgggcataaaactgactagagatgaagatatgaacaatcccgtttaacgtttctcttgagaagaagattgccgtgagccttgaagcatggaaggagctttagtacctgagac

SEQ ID NO: 26672 - DNA, 1045 bp, Zea mays
  Clone ID: LIB4570-009-D4_FLI
tcgaggccggccggctctctctctccctccctccaactcattggcagcagcagcagcagccgcagccgcgagggccaagcagtggggggacaaggaaaagggccgacgaagaggaaaaaggaagaacgcgtcgcggagccatggggcttggccttggcgtgcgggcggcgcccttcacgtacgcggcgcacgcactggccgtcgcggcggcggccatggttctcgtctggtccatccagttccgcggtgggctcgccatcgagtccaccaacaagaacctcatcttcaacgttcaccctgttcttatgcttatcggttatgttattatcggcggtgaagctataatggtgtacagggtacttccaacatcgaatcatgacacaactaagctgatccatctaattctccacgggattgcactcgtccttggtgcggttggaatatactttgctttcaaaaatcacaatgagagtgggattgccaatctttacagcctgcactcttggattgggataggaacaattactttgtatggtattcagtggataattggattcgtcacgttcttcttccctggtgctgcgccaaacgtgaagaagggtgttcttccttggcacgtactctttgggctctttgtctacatcttagcaccggctaatgcagaactcggctttcttgagaagctcactttcctcgagagctcaggtctcgacaaatatggcacagaggcattcttagtgaacttcacagcattggttgtcgtgttatttggtgcctctgttgtggtggctgctatagctccagttcgccttgaagaaccacagggttatgatccaattccagaaaactagcgcaaatgaaatgtacagcgtatgcagttgccaagattggctgttaccacatggagataagatattcatgtctctttattgacgaagaaggtgatggaattatcacaataaagatgtagacataaatgtgtgtatatacattctgtgacacttcaaagtttcagtatatgcaaaactgaatatgctgcttcatg

SEQ ID NO: 26673 - DNA, 766 bp, Zea mays
  Clone ID: LIB4570-009-E8_FLI
ctcgaggccggccgggcttgctcgctgcgccgccgcctccgacatcgtcccttcgtccccacgagcaaccgataatccgccggcgttgagatgttggtttatcaggatctcctatctggcgacgagctcctgtcggattcattcacctacaaggagctcgagaacggcgtcctgtgggaggtcgagggaaagtgggtcacccaaggtcctgttgatgtggacattggtgccaatccatccgccgagggtggtgaggacgaaagcgttgatgacacagctgtgaaggtggttgatattgttgacacattccgtctacaggagcaacctccttttgacaagaaatcatttgtgtcttacatcaaaaaatacatcaagaatctcactgctgtgttggagccagagaaagcggatgagttcaaaaagggtgtcgagggtgcaaccaagtttctccttagcaagctgaaggacctccaattttttgttggtgagtccatgaaggatgatgcgtctgtggtattcgcctattacaaggatggtgccactaatccgacattcctctatttctctcatggtcttaaggagatcaagtgctaggcgtgcggcgaaattagttacccatgttgggtactatctatgtactattattatatccaaaactatagttgtcctggctgaattgaactcaaaagggtttgtttgagaaaaaattgtcccaagattggattgcttgttaaagctcaatattgttattgaagtgttattgctg

SEQ ID NO: 26674 - DNA, 347 bp, Zea mays
  Clone ID: LIB4570-009-H8_FLI
ctcgaggccggccggggtgtcatcaatcaaatactcagacaaccatggggcaccaggcgcagcacggcacggacgacaccgaggagctgcttgcagcccaccggcagctgtggtgccatgccctgggctacgtcaagtccatggcgctcaagtgcgccctggacctgcgcatccccgacaccatcgaccgctgcggcgggagcgccaccctgggcgagctgctcgccgcaagcgagatcccggcgtccaaccacgactacctccgacgggtcatgcgcacgctgacagccatgcgcatcttcgcggtcagccacgacgaccccgccaaggccgacgacgcggccctc

SEQ ID NO: 26675 - DNA, 1522 bp, Zea mays
  Clone ID: LIB4570-010-H1_FLI
ccgggactcgcctcgacgcgcctctgaaagttcggagccgccggcccgtccgcctccctctccgcctcccgtccccaaggccaatagttttcaagtggcaatggcggaccaggctaaccaacccactgtccttcataagctcggtggccagttccacctgcgctcgatcatctctgaaggtgtacgggcccgtaacatatgcccatctgtctcatcttatgaaaggagatttgccacaaggaactacatgacccagagcctttggggcccttcaatgtctgttagcggtggcatcaatgtcccagtgatgcagaccccgctctgtgctaatgctcctgctgagaaaggaggcaagaacttcatgattgatttcatgatgggcggtgtttcagctgctgtttcaaagactgctgctgctcccatcgagcgtgtgaagctgcttattcagaaccaagatgagatgattaagtctggtaggctatcagagccgtacaagggtattgttgactgcttcaaacgtaccattaaggatgaaggtttctcttccttgtggaggggtaacactgctaatgttattcgttacttccctactcaggctttgatctttgcatttaaggactacttcaagaggttgttcaacttcaagaaggatagggatggctattggaagtggtttgctggcaacctggcctctggtggtgctgctggtgcttcctctttgttttttgtgtactccctggactacgcgagaacaaggttggctaatgacgcgaaggctgccaagggaggaggtgaaaggcagttcaatgggcttgtcgatgtctaccgcaagacactcaagtctgatggtattgctgggctttaccgtggatttaacatctcctgtgttggaatcattgtttatcgtggtctgtactttgggctctatgattccatcaagccagttgtccttactggcaacctccaggacaatttctttgccagtttcgctctgggttggctgatcactaatggtgctggtcttgcatcttaccccatcgataccgtccgcagaaggatgatgatgacatctggtgaggctgtcaagtacaagagctccttggacgcgttccagcagattcttaagaaggaagggcccaagtccctgttcaagggtgctggtgctaacattcttcgtgccattgctggtgctggtgtgctttctggctatgaccagctccagatcctcttcttcggaaagaagtacggctccggcggtgcttaaatggagaaatatgatgacgaacaagagcagtgtgtgttcccggtcctttccaatcaggatctggtgaagtttttgcctttcatatcgaagaaattaataattcatgtagagggaggattcttccaacaatttgttttggatggagacttagatctccaaacactcgtaactatcctactaggtggtgacatcggtccccaaaaacatttatggtcatagagtctgcccttcgtttgtcagtcgggcaatttttcttgc

SEQ ID NO: 26676 - DNA, 1060 bp, Zea mays
  Clone ID: LIB4570-011-C12_FLI
atctcttggcagaccaatcttgggttctgcagagaatatcaagtcaatcaccaaagaggaccttgagaactacattgcaactcattatacagctcctagaatggttatcacagctgcaggcaatgtgaaacatgaagacattgttgggcaggcaaagaagttgttcaataagctatcaactgaccctacaacaacaaacatgttggtcgctaagcaaccagcctctttcacgggttctgaggttcgaatcattgacgatgacatgccccttgctcaatttgctgttgctttcaatggagcatcatgggtagatcctgattctgttgcactgatggttatgcaatcaatgcttggttcatggaacaagagtactggtggaggaaagcacatgggttcggagcttgtacagaaagcagcaatcaatgacattgctgagagtgtaatgtcattcaacatgaattacaaggacactggtctttttggtgtctatgctgttgctaaggctgattgcttggatgatttggcttttgcaattatgcatgagatgagcaaattgtcataccgggttacagaggaagatgttatccgtgcacgtaatcagctgaagtcctcaatccaactccaccttgatggttcaactgctgttgtcgaggacattggccgccagctgctgacctatggacgaagaattcctaccccagagctttttgcaagaatagatgctgttgatgcaagcactgtgaagcgtgttgcaaaccgcttcatctttgatcaggatgttgctattgctgcgatgggaccgatccaaggacttccagactacaactggttcagacgccggacctacatgctccgttactaagatcaatctgccggtgtaccatgtttacggtgtgcaaggacaaagataaaatttgcctctttcggcgtctgtatatcaaggcctcagcactgcacatcgcttgctgcgacagaggtttttttcttcttcagaatttgttttatttcttttcttgctcagaatccacaaatctgccaataatgatagacaagttcgact

SEQ ID NO: 26677 - DNA, 757 bp, Zea mays
  Clone ID: LIB4570-011-E10_FLI
ctcgaggccggccgggaacccttgctcgctgtgccgcctccgacatcctactttcgtcctcacgagtgaccgataatccgccggcgctaagatgttggtttatcaagatctcctatctggcgacgagctcctgtcggattcattcacctacaaggagctcgagaacggcgtcctgtgggaggtcgagggaaagtgggtcacccaaggtcctgttgatgtagacattggtgccaatccatccgccgagggtggtgaggacgaaagcgttgatgacacagccgtgaaggtggttgatattgttgacacattccgtctacaggagcaacctccttttgacaagaaatcatttgtctcttacattaaaaaatacatcaagaatctcactgctgtgttggagccagagaaagcggatgagttcaaaaagggtgtcgagggtgcaaccaagtttctccttagcaagctgaaggaccttcaattttttgttggtgagagcatgaaggatgatgcgtccgtggtattcgcctattacaaggatggtgccactaatccgacattcctctatttctctcatggtcttaaggagatcaagtgctaggcttgcggcgagattagttacccatgttgggtactatctatgtactattgttatatccacaactatagttgtcctggttgaattgaactcaaaagggtttgtttgagaaaaaactgtccaagattggattgcttgttaaagctctattgttattgaagtgtt

SEQ ID NO: 26678 - DNA, 2282 bp, Zea mays
  Clone ID: LIB4571-001-D11_FLI
ctcgaggccggccgggactcgtccccttccgcagccgtcgccgcccaattcccccacccaattcccactctccgctcgacagatccatacatgatgggagaggccaaggagaacgacgtttatgaggaggagctcctggactacgaggaggacgacgacaagacggtcgatggctccgctgctaagcccaccggagaggtcgcaaagaagggctacgtcgggatccacagttccggtttcagagacttcctgctcaagccagagctgctccgtgctatccaggattgtggttttgagcatccttccgaagtgcaacacgagtgtatccctcaagccattcttggaatggatgtcatctgtcaagctaaatctgggatggggaaaactgctgtttttgtcctttcatccctccaacaaattgaccctgttgcgggtcaggtagcagcacttgtactgtgccacacaagggaactggcttatcagatatgccacgaatttgagaggttcagcaaatatcttactgaagttaaagttgctgtcttctatggaggtgttcacatcaggaagcataaagatttgttgaagaatgaatgccctcatattgtggttggcacgcctggtaggatacttgctcttgccagggataaggatctctccttgaagaatgtgaggcacttcattcttgatgaatgtgacaaaatgctggaatcacttgacatgcggagagatgttcaggagatcttcaaaatgactcctcatgataagcaagtcatgatgttttcagcaacgctcagcaaggagatccgtcctgtatgcaagaaatttatgcaagatgtaatgccctgcagccttctccagctctcctttccaaagtcgtcatattttattcccattgctcctgtggtggtcctcctgtagctgttagtcatctaccagctttggagttgtagttgtgtcttctgctctttctaggtgggaggattctattccttagtgtctccatttgtagtacataagtcagtcctcttttctttttttcattatcccacacctgtacagtagaaactggagagtaaggggtgtgtccaaatggtcattttttggcgatgtgttggtaactgggggcagataaagggttaccttctgtcctgaagatgcggtctctgagctcctggtcgacatctccagtttgctgcacactcaatgttcacttggtttcacttaattggacttcagtggcgctggttctccaactatcttgtacgggtggagaaagaattcttctgctggagttgtatttggaagcactgttgcaaaacttaagcatatttggagagaatctagtgttgaacagtgcataactgaacttctgtatggaggctgcatgtactgacagagggggtctattggtatatatactgcaagactgacgctggaatgctaatttgtttcatgtatcatttgttcccttacagccgatggaaatatatgttgatgatgaggcaaagttgaccctccatggtcttgtacagcactatataaaacttagcgaggcagagaagaaccggaaactgaatgatctcttggacgctcttgatttcaaccaagttgtgatattcgtgaagagtgttagcagagctgccgaactgaataagttactttgtgaatgcaacttcccatcaatctgcattcattctggaatgactcaggaagaaaggctaacaagatataagaacttcaaggaaggccacaagagaattcttgtggctacagatttagttggcaggggcattgacattgagcgtgtcaacattgtgataaactatgacatgccagactcagctgatacttatttgcacagggttggaagggctggacgttttggcacgaagggacttgcaattacctttgtttcctctgcttcggattctgatgttcttaaccaggtgcaagaaaggtttgaggtagacataaaggaactgcctgagcaaattgacacctcgacctacatgccatcataaatgggaaggacaactgagaagagaggaggataggggagtgagcagccgtctggagatggttacctttgaactatccgatctggaggatttgatttgcctcctttgtgtactttaaaaagggcagccaggatgatgatctgtattttaagacaatgctgtctgtttgggtttaggattttgctttgtcgaaaactagcacacttattgtactactgagcagcatatttgttttcatccctgggttaaatgatgcgtctaaac

SEQ ID NO: 26679 - DNA, 1968 bp, Zea mays
  Clone ID: LIB4571-001-G11_FLI
gtttccaacacagtgaggccacgttgtagggttttgcttgcttcgcccggcggtaaagctgagcgcggcgagagccggagaccgaagaagcgccgcgcgcccggtcatggagatcggacagtaccccgcgagcggctgctccaaggagcaccagaagatctaccaggagtggttcgcgctcgcggacgcagatggggatggccgcatcacgggccccgatgcgatcaagttttttggcatgtccaagctctcccgccctgacctcaagcaggtctgggctatcgcggacaccagaaggcaggggtatctgggtttctctgaattcgtcaccgcgatgcagctagtctctctggcacaagcaggcaacgagattactcaagatagccttaagcgagatgatttgagcagtttgaatccacctgtgatggaaggtttggatgccctacttgcgaaatctaagcatttggtgaagcgtgttgatccagaaatggatggatatcctcaggaacaatctcctttaacaaacaaatggtttagctcaaagtcatcaaagaagatacctctgacagccgtcacttctgttatcgatggcttgaaaaaactttacatcgaaaagttgaagcctttggaagttacatacaagttcaatgattttgtttcccctttgctgacaagtagtgattttgatgcaaagccaatggttatgctcttaggtcaatattctactggtaaaacaacttttatcaagcatctgctaagaacaagttatccaggtgcccatatcggaccagagccaacaacagacagatttgtagttgtcatgtcaggatctgatgaaaggactattcctgggaatactattgctgttcaagctgacatgccttttagcggtcttaaacatttgggactgcatttttatccaagtttgagtgctctcagatgcgacatccactgctagagcatatcacatttgttgacacacctggtgttctttctggtgaaaagcaacgcacacagcgcagctatgatttcactggtgtgacatcatggtttgctgcgaagtgtgatcttatccttctcctgtttgatcctcataagctcgatatcagtgatgagttcaaacgtgtcattggatcattacgtggccatgatgacaaaatacgcgtagttttgaacaaggcagaccaagtagacactcaacagcttatgagagtttatggtgcattgatgtggtctctcgggaaagtattgaatacacctgaggtttcacgtgtttatattggatcattcaatgacaaaccagtaaatgaatcagctgttggtccacttggaaaggaactatttgagagagagcaagatgatcttctttctgatctcaaagatatccccaagaaagcctgtgaccgccggatcaatgaatttgttaaacgtgctagagctgccaagatccatgcttatataataggtcatctaaagaaggagatgcctacaatgatgggcaaagcaaaagcccaacaacgactcatagacaatctgcctgatgagtttgcaaaggtgcaacgggaataccatcttccgtcgggagattttccttacgtggagcacttcaaagaggtgttgagcgggtacagctttgacaagtttgagaaggtgaagcccaagatggtacaggccgtggatgatatgcttggatatgacattcctgaacttctcaagaacttcagaaacccatacgagtgaacccatacaggcggttgaaagatgacttcgatctgcaacagaatgagggattgattgtcaggcgatgtgaatcatagtggtcaatgtctcttggggcgttcattgccatccatgcttagccattgttatataactttatgcataagaatcatagagccattgctcaagctttcaccagacatctgattatgtaaaatcgacaaaatagtgatgttagtgttaaagagt

SEQ ID NO: 26680 - DNA, 1359 bp, Zea mays
  Clone ID: LIB4571-001-H4_FLI
ggccggccggcacactcacacagccatctctcccagtgtcccagctcagcttagcaatccgtctctctatctacaggcgggggaattaatagatggagggcaaggaggaggacgttcgcctgggcgccaaccgctactcggagcgccagccaatcggcacggcggcgcagggcacggaggagaaggactacaaggagcctccgccggcgccgctgttcgaggcggaggagctgacgtcgtggtccttctaccgggccgggatcgccgagttcgtggccaccttcctgttcctgtacatcagcatcctgactgtgatgggcgtgagcaagtcgtccagcaagtgcgccaccgtgggcatccagggcatcgcgtggtccttcggcggcatgatgttcgcgctggtgtactgcacggcgggcatctccggcggccacatcaacccggccgtcaccttcggcctcttcctggcgcggaagctgtcgctcacgcgcgcgctcttctacatggtcatgcagtgcctgggcgccatctgcggcgccggcgtcgtcaagggcttccaggagggcctctacatgggcgccggcggcggcgccaacgccgtcaaccccgggtacaccaagggcgacgggctcggggcggagatcgtcggcaccttcgtgctcgtctacaccgtcttctccgccaccgacgccaagcgcagcgcccgcgactcccacgtgcccatcctcgcgccgctccccataggcttcgccgtcttcctcgtgcacctggcgaccatccccatcaccggcaccggcatcaaccccgcgcgcagcctcggcgccgccatcgtctacaacaggtcccacgcatggaacgaccactggatcttctgggttggccccttcatcggtgctgctcttgccgccatctaccacgtggtcatcatcagggccctccccttcaagagccgtgactgattatacgtacattgtttattaccaacagcaaccatgcagcatacgaatcatcgttattaagctatatatgtataatatccagcatgtcttgttaattactagtatatgtgctagtaagtggtgcgtgctcgctcttccatcgctgtcgtcgtctcatctgctattgttcgtcatatatatatgtccatgtgagctagctagtgtgtatcacgcgcggaggccagttcagctagccatcagtctgcaatgcactttgtgacttctctgtttagtcctctctcgcttgggttttggtacggtgaagtatataaactaagcatgcatatgtgtaaaattcaaattcaagtgtatgcatgcatgccaataatgaaagttaagaagaagactccctgtttatgat

SEQ ID NO: 26681 - DNA, 1912 bp, Zea mays
  Clone ID: LIB4571-002-C11_FLI
acctctccttccctccacccgtgccgtcgcctcgcctatccgatctgccacctcctcccgtctcgcacgttccttcccaactccgcagcgtagcctctccgcggcgcgatccagatccaggtttttcagcatgggcctggtgaaggaaggcatcgacatggaggagggaacccttgagatcggcatggagtacaggactgtatctggtgttgctgggcctctggtcatattggataaagtaaagggcccaaagtaccaagaaattgtaaacatccgacttggagatggcaccaatcgccgtggtcaagtcctggaagttgatggcgaaaaagctgttgtgcaggtctttgaagggacttctggaatagacaacaaatacacaaccgtgcagtttacaggcgaggttttgaaaactcctgtctcacttgatatgcttgggcgcatttttaatggttctggaaaacctattgacaatggccccccgatattgcccgaagcctacttggatatctctggaagttctattaaccccagtgagagaacctatccagaggagatgatccaaactgggatatccaccattgatgtcatgaattccattgctcgtggacaaaagattccactgttttctgctgctgggctccctcacaatgaaattgctgctcagatttgtcgtcaggctggtcttgtgaagacattggagaaaggaaagcatgctgagggtggtgaagatgacaactttgctattgtgtttgctgctatgggagtgaacatggaaacagctcaattcttcaaatgtgattttgaagagaatggttccatggagcgggtcaccctttttctgaatctggctaacgaccccaccattgaacgtattatcacccctcggattgctctaacaacagcggaatatttggcatatgaatgtgggaagcatgtacttgttatcttgacagatatgagctcttatgcagatgcacttcgtgaggtttctgcagcccgagaagaggtgccaggtaggcgtggttatcctggatatatgtatactgatttggcaacaatatatgagcgtgctgggcgtattgaaggaagaacaggctccattacccagattcctattctaacaatgcctaacgatgatatcacacacccaactcctgaccttactggatacattactgagggacagatatacattgataggcagctccataacagacagatttatccacctattaatgtcctgccatctctttcacgattgatgaagagtgctattggtgagggcatgacacgtcgagaccattcggatgtatctaatcagctttatgccaactatgctattggaaaggatgttcaggccatgaaggctgtcgttggagaggaggcactctcgtctgaggatctgctttacttagagttccttgacaagtttgagaggaagtttgtgacacaaggagcatatgacacacggaacatcttccagtcactcgatcttgcatggacattgcttcggatcttccctcgcgaacttctccaccgtattccagcaaagaccttggaccagtactatagcagagatgcttcccactgaatcactgatcgttgatcagtgttccaatattttggcaggtgcagctttgaataaattgaacagattggcctcgtggccattttcctgtatttatctgtagtcaggtccaattcttttctgttggtgagcgcaagttattcatagatgactcggtcatgggaatatttgtaatattatgtcatgtatcgttaaatttcagttgttttgtttcagctgccagaactgttagcaagagtattctggagctggaagctcgaacgcaactggttgtatctatatccttgaatgccgaataaaggaggggcaataaactgcagc

SEQ ID NO: 26682 - DNA, 1553 bp, Zea mays
  Clone ID: LIB4571-002-C12_FLI
ccggccgggacccacagaaaaagtgttgctcctacgactagttctttttatgtgtaaccttcaatgaaggattctcaggatattcagagcacgacagagttgcagtcaccagtgcaaggtactaatgaagtgcaaagtcagcaaccaaactcaatggccgctgatgctcctgctggaaattcgggttccttgtctgtagctagtaatgacaataagaaggtgtctcgcgaagatattgaacttgttcagaatttgatagagcgttgtctacagctctacatgaacaaaggagaagttgttagaactctttctactcgtgctagaatagaacctggcttcactactttagtatggcagaaacttgaagaagaaaactccgagttctttagggcttactatatacggttgaagttgaaaaggcagatcatcttgttcaatcatttattgcaacgccagtacaatttgatgaaatatccagcacctccgaatattccattggctccaatacaaaatggaattcatcatatgccagttagcaatttaccaatggggtatccagtacttcagcagcctatcatgcctgctcccggccagcctcacatggatccaatggcctgcggtctgtccagtggtcatgtggttaatggaatacctgcaccaggtagttatcatcccatgcgcatgaactccggaaatgacatggttttggacaatggagcgcctgaagcaccacatgctggtgctaccggtagtgctatgtcgtctgagatggctgtgagtccctcgtcggcagcttcaagtaaccatgctccttttacgccgtcagatataccaggcatgaccatggatgtatcggccctagactcggcatttgggtgtgatgtggggaatcctgaatctctgcaattgggaccagatgggtcgtcaagagactctattagatccttagggcagctctggaatttcagcctctctgatctaacagcggatttgacgagtttgggagcagatctggacgtgctggagaactacactggcacccctttcctgccatcggattcggacattttgcttgattccccagaccaagatgatatagtcgagtattttgctgacgccatcaacgggtctccgtcagacgaagagaaaccctagtttttccggggtggcgttcaggttcatcatcaggcagggctgtcatctcatctcatgtagtgtaaagcagccaatctaactgtgtattcggctcgcgcgcggtgatccggtaatcgggcctctgccactaaaagaattttgtagcggttaattgaaatcctaattctttggaataagtagctgggactgggatgtccagagagtagcggtcgttgttggcttagggattgctgctggtggatgcaaacctcacagctagctggtgactctgaaaccacaggaactccttttcttttctttttatttttacttgtatttgtatttgctgctacataagtaaacagaagtggggtgtacctagttttctggttctcgagtgtcttgaaagttgaaacagt

SEQ ID NO: 26683 - DNA, 859 bp, Zea mays
  Clone ID: LIB4571-002-H12_FLI
ctcgaggccggccgggaaagctgctctcgcccccataaataaagcagctcctccgggggcggcgaactactcctcgtcgccaaaaccctagccctgcttctttgccatggcgagcagcgctagccaggcgagcctcctgctccagaagcagctcaaggatcttgcgaagaaccccgtggatgggttctccgccgggcttgtagacgacagcaacatcttcgagtggcaggtcaccatcatcggaccgcctgacaccctatatgatggaggctacttcaatgcaataatgaccttcccccagaactatcccaacagcccgccatcagtaagatttacttctgagatgtggcatccgaatgtttatcctgatggacgtgtttgcatttctattcttcatccacctggtgaagatcccaatggttatgagcttgcaagcgaacgatggacaccagtgcacacggttgaaagtatagttctgagcatcatttcgatgctctctagtccaaatgacgagtctccagcgaatatcgaagctgccaaggattggagagaaaagcgggatgagttcaagaaaaaggtaaggcaatgtgtccgcaaatctcaggaaatgctctgaaggagaaacatatggggagttgaacgagtgctgcaacttcacaaccagttacctagccagcattcttttgcttttcccctgtatattttccattcagtgtcattcgtatggtggtgttgggtctctttagacaaactggggactgttgcttatcctaaaaattcgattgtattgtgtggcatgaaatgatcgatgtcaaagaatattttgaacatgctgccacctaattatacttttcatacg

SEQ ID NO: 26684 - DNA, 1364 bp, Zea mays
  Clone ID: LIB4571-003-A6_FLI
ccggggcctctttctcacgcaccttctgttggctcctcctccgtcctcccccaagcgccccctctcggccggtcgcaaggtctgcggctctgcgcactggtccgattcccggggagggggatttgatatatatcgagagagtagtgtttgttccccccggattcctcatccgtggcgcccaaaacctagagatccttttttgcgcccgattcggtcccgttagaggggatctgtgtacctcgccgccggccggcgctgtcgatctggttgtcttccacggttggtttccagacggggactccgccggcgcggcgcggcgcggcgctcacccgcatccgccgccgcttttctaccgcccgcggggctgggtccggctctgacggttgagtctggtggcgcaggcggaactgcaccccatggaaatggaatcgagagaacttacacgctgcttcgcaaccgtattatgcagttattactgaaaagataatacagtacctatggcttctctggacgccgtgcgaggagacctcgccctgctgattctgtacctgaacaaggccgaggcgcgggacaagatctgccgagcgatccagtacgggtccaagttcatcagcaacggcgagccagggcctgcgcagaacgtcgacaagtccaccagcctggcccggaaagtgttccggctctgtaagttcgtcaacgatctgcacgctttgatcagccctcctgccaaggggactccgctcccgctgatcctactcgggaagtccaagaacgcgatgctgtcgactttcctcttcctggaccagatcgtgtgggcggggaggacaggaatatacaagaacaaggagcgggcggagtttctcgggaggatagcgttctactgcttcctcggctccaacacctgcacggccatcatcgagctagccgagctgcaacggctgtccacgtcgatgaagaagctggagaaggagctgaagcaccaagagctgtacaagaacgagcagtaccgcatgaagctgcacaagtcgaacgagcggctgctggcgctcgtcaagtcgagcctggacatcgtggtggccgtggggctcctgcagctggccccgaagaaggtgaccccccgcgtcacgggcgcgtttggcttcgccagccccctcatcgcttgctaccagctgcttccaagcccaccagcaaagcagagcaagtgaggactcccactccaagcactgtttaccaggaaaataatcccccccggataggtttgatttggttgccacatccccttgtatggcagactagactaatatatgtaatcatcatcataataattgataaaccatcccactatggataggtttggtcacttc

SEQ ID NO: 26685 - DNA, 1507 bp, Zea mays
  Clone ID: LIB4571-003-C5_FLI
atcggcgtcgccatctccggagtgccacgcctaggagctattctctctagtactgcggcgacttcactccaagcctcccccttcagcgatcagcacacatcacgtaaagcgcaaccaaatgatttccaccaccgtcgctgctcaccccgccaccgtcacagcgctgcggcgaaggtacccgcttcgccctcgccagccactctgtgctccaatcttcacggcggcgacgaggcagtgcatggctacggcgaagccctcggtcacaaacgcgctcgctaacctatccgttgagagcgcccccgcggcgcttcccaagctttcgttcccgatactggtgaatagttgcactgggaaaatggggaaggctgttgctgaagcagctgtctcggctggtcttcagttagttcctgtatcattcagtgccattgaggtccctgatcgaaagattgaaatatgtgatagagaaatttttattcatgacccatctgaaagtgaaaaaattctgcctaccattgttaaagaatacccaaatgtcatagttgtagattacactgtgcctgatgctgttaatgcaaatgctgaactctattgcaaatttggtttgccatttgtaatgggcacaactggtggaaataggcaactcttgcacaaaactgtgcatgatgcgaatatctacgctgtgatatcccctcagatggggaagcaggttgttgcttttcttgctgccatggaaattatgtcagagcaatttcctggtgcattttcaggttacaagctggaggtcatggagtctcatcaagcaacaaaattggacatttctgggactgccaaggctgttatctcttgttttcagaagttgggtgtatcgtttgacatgaatgaggtaaagcaagttagggatcctgaggagcaggtaacgttagtgggtgtcccagaagaacatctcgggggccatgccttccacatgtaccatctcacttcgcctgatgggacagtttcgtttgagttccagcacaatgtatgtggccgttcaatatacgcagaaggaactgttgatgcagctatgtttctctacacaaagattcaatcgggtgcgagcaagaaattgtatgacatgattgatgtcttgagagaagggaacatgagatgaggtccatgttggcgtcagatgagctttcatgtaccaatttgcaagctcaattccaccgtgaattaggttacttttacaatgtacccttcccaatttaccagttaactcactttcagttttgaattggctgcttcaatgatggaaggtactccgttccagagtgtatgcaattttagtttctctaggtatattgattttggcgttttgctatacacctatatgcaatctatagattgtagtaaaaaaaatgtattcagaaaggccagaatgatctacaatttgaaacggagtaatgcttagggacttaatgctttgagtcacgtccagccaaggatgctcgctcaatttattaacttt

SEQ ID NO: 26686 - DNA, 1330 bp, Zea mays
  Clone ID: LIB4571-003-D11_FLI
gaggccggccggggaacgggtggataacaaagggatagagaagcggcagctgcagaggcagagcgtcagagccatcgtcctcgcctcaccccgtagtcccgtacctagcgcagcgaagccggcacaatgccagccgccgccgtagcctcccctctcctcctctcgctctcctcgtcctcctcccatttcctctcttcctcatccacctcctttttcccaccctcctccgctgccgtcgctccacacgccgccgtcaggacgaaggcggctgtctccgtcctccgcgcgctgcgcgccgaggcggccaccctccccgtgctctcattcaccggagagaaggtcggggaggtaaccctcgacctcaaatccgcgccaccctccaccgcgcgcgctgtcgtgcaccgcgctatcatcaccgaccgccagaacgcgcgccgaggcacggcctccacgctcacccgcggcgaggtcagaggcggagggaggaagccctatcagcagaagaagacggggaaggcgcggcgggggtcgcagcgtaccccgcttcgtcccggcggtggcgtcgtgttcggccccaagccccgcgactggtccatcaagatcaaccgcaaggagaagcgccttgccatctccactgccatcgtgagcgccgccaaggacgccttcgttgtcgaggagttcgaggaggccttcgcgtcggggcccaagaccagggatttcgtggccgctttgcagcggtgggggcttgacccgaagcagaaagccatgttctttgccacggacttcgacgacaatgtgcggctcagcggcaggaacattggttccctcaagatgctcacacccaggacgctgaacctgtacgacatactcgacgcacgcaagctcttctttactcctgctgctgtagactacctcaactccaggtacggagccagtgtttccgatgactactatactgatgacgaggatgatggcgaggaggaactggtcgagcaagaagcagaagaaggcaccacagcagatgctgctccagatgcaactgaagagggcgaggcagacagcagctcctaggcgggaagtgtagatttgttgtttcgtttttgttatgttaccctcaggtgaggatggtggggaattctttcctaacggggagaccttttgtctgcttttattgtaagttgattatgttctcttactgaagcagtatactagatttccaaacctcacataagagcatgttttcaaatacatcatccgttgtcgaccactgcatataaagtgttctttcatctacgctgcaatggtgaagaacagcggacaattatcctgg

SEQ ID NO: 26687 - DNA, 2709 bp, Zea mays
  Clone ID: LIB4571-003-E11_FLI
gacccgccgttcctccgaggaaatggctgcactgcaaccctcattttcaccagcaatgactttgaagagtagctgcagcgccctgaagttcccaaaaactgcactgttatctggttttggtggcattccacgccttcaagatgcgcaagacaggaacactagcgtcgcttatttgatccccaaggctgcttcagtgactgaccagtcaatagcagagccaccaaaaaccaagcaaaataggcacacagtcgacccaacagctccagaatttctgccactcccatcttttgaagaatgctttccaaggagtaccaaagaatcaagtgaaatcatccacgaggaatcaggtcatgtcctcaaggttccattccggagagtccatttgactggagatcagaagcactttgatacatatgacaccagcggtcctcaaaatataagcccaaggattggactcccaaagataaggaaggaatggattgataggagggaaaagctgggtagtcctcggtacacacaaatgtattatgctaaacagggaattgtaacagaggagatgttatactgtgccagccgtgagaaccttagtcctgaatttgttcggacagaagttgcccgtggacgagccataattccttccaacaagaggcacctggaattggaacccatgattgttggaagaaacttccttgtaaaggtgaatgcaaatattgggaattcagctgttgtgagctccattgaggaggaagttcacaagctccagtgggccacgatgtggggagctgatactgtcatggacctttcaacagggcgacatatccatgagacgcgggaatggattattcgcaactctccggttcctattgggactgttcctatttaccaagcacttgagaaagtaaatggtattgctgaaaatctgagctgggaaatttttagggataccttgattgaacaagctgagcagggcgttgattacttcacaatccatgctggtgtcctgcttcgttacattcctcttacagcaaagagaatgacgggcatagtttcacgtggtggctcaatccatgcaaaatggtgcttaacttatcacaaggagaactttgcatatgaacattgggatgacattcttgacatatgcaatcagtatgatgtggcattatcaattggtgatggtttgaggcctggttccatttatgatgcaaatgatagtgcacagtttgcagaactgctgactcaaggtgaactaacacgtcgagcatgggcgaaagatgtgcaggtaatgaatgaaggcccgggtcacatcccaatgcataaaattcctgaaaacatggagaaacagttggagtggtgtaatgaagcgcctttctatacattgggtcctttgacaactgatattgcacctggttatgatcacatcacttcagccattggtgctgccaacattggagctcttggcactgcacttctttgctatgtaacaccaaaggagcaccttgggttgcccaatcgtgatgatgtcaagactggtgtaatatcctacaaaatttctgctcatgctgctgatttggcgaagggtcatccctatgcacaagcttgggatgatgcacttagcaaggcaaggtttgagtttagatggcttgaccaatttgctttatctctggatccagtaactgctatggctttccatgatgaaacattgccctctgagggtgccaaagtggcacatttctgctcaatgtgtgggcccaagttttgttcaatgaaaatcacggaggatatcaggaagtatgctgatgaaaatagttatggaacagtagaggaagctgtgatacaaggaatgaatgctatgagtgctgaatttttggctgcaaggaaaacaattagtggggaacaacatggtgaagcaggaggggagatctatgtaccagaaagctatgcagctcagaaataaggtttcctcggagccatccattctaaatgaggctaaggcatcagcagctgttctggctagtggctaaggcatcagcagctgttctaccatcttatctaatgagatgtctgagagcctcttagcctggactgttgtgagatgggctgagaaagtccctttgaacctgaacaggataatgcctgcgaagggagtgtgcaattctattttcctgttttccaggaacctatcaaccccttggtggaaattgaggtattgtccatgattgcatggagctcagcaacaaggtacctgttctctacttgtttgcatttctcaaggggaagattcttaacaggtatcaggttcgtcatgacatctaacaattttatttataatgtgcaagttatttagttaaatctacacgaccatgaaatttgtcaaagtatttcctagtcctatattatctagttttacttctacgtctatctgttctttgattgtgcgctccatctattctttggtgaagcttgcgggttctactttctagacctattgagataggaccttttggcacggtacaatatcaatactgttttggtgaagggagtatatttacagtagtacaaagggagatggctaaaactgctacaatttttttagatggacgatgtttgtcattgagggtgggaagtaccaaccagattgcatttgacttcatccggccatcatatggtgttctcgtctattaataaataaccaaggaagtggttcttggc

SEQ ID NO: 26688 - DNA, 1492 bp, Zea mays
  Clone ID: LIB4571-003-F12_FLI
ctcgaggccggccgggaatattccctcccccaaggcccgaagccccgaaactttccggatctttcttccgccgcttcatcttctttgcgcaaaactagttttgtttctcgttcttctcttcgatttcggccgaataaagatggcgtcggctgcgcgcctcctcgcgccgatctccaggcgcggcgtcgtctctgtggctctggcgggggtggagaggcggcggccggaggcggcgtcgctcctgggggcgcctgtgctggctacggtggaagcctgcgcttcgatcaaggtcattcctttgtcgaatcagctggctcgatactcgacaactgcatttcagaggtttgggttttcaacttcagccccccaacaagatgataaggagacaaacaagcacacagatgatggggttaatagaagtgttggagcaagtactggagcttcaagtgaagccaataatgtgcctggaaccgagaaggcacaggaagcaggttcacttgattctatatccaagtctaacaggaagaggacagctaaacgaactgcattttctgattcagattcagaagacctagacctatcaaaggaggaccttgtgaagctgcttcttgagaaagacgaatcattgaagtctaaagatgaagagtttaaagatatgaaggataaggtcctacgcagctatgctgagatggagaatgtccttgccagaacaaagcgtgagtcagagaacaccaagaagtatgccatacagagcttctccaagagcttgttagatgttgcagacaatttgtctcgggcatcatctgttgtcaaggcaagtttctcaaagatagattcatctaacgattctgatgaagctgtaacactactgaaaaccctactagagggtgttgagatgactgagaagcaacttggagaggtcttcaagaagtttggagttgaaaagtttgatcctttgaatgagaagtttgatccaaataggcactatgccattttccaaattcctgatccttcaaaaccatcaggaactgttgctgctgttgtgaaggttggctacatgttacatgatcgtgttcttcgccccgctgaagttggtgtcactgaaggtggtccaactgaagaagagccagaggagtaatctagatcaaacggaggttgctggctgcacgtatatctatgactactgccctttattggttggataagcatacatatcataggttatgtttttaactagatctgtgaggcaaatcactatttttgtagcatgttcaacgaggcaatttgttcaagctagtccagaactctcctttttcttgctcggtaataaaaacgagattgtagaacatgtacatcaccgaaattgcttgccaaagacggattattgcagcctgcattaataggaatactgacaatgagcgtgccacaatcaaaggtggtctgttttgaatgataatgtttgaatgaagatgggactgccgagatgtgtgct

SEQ ID NO: 26689 - DNA, 2677 bp, Zea mays
  Clone ID: LIB4571-003-G5_FLI
agtttaaagttcagagttcaatctcacagcaccaagcaaaaaggaagcagatcaagggcagccgagcgagcagaggttgtcaattacgtgtcttaatgagtctctggaagcagccgtcgaaactcgccatggttgtagtactgctgctgctgctatgtcatgcagtggacaaagtccattgctcgacgcaccataacaacagccaagattttcattctctgctagagttcaagaagggcatcaccagtgatccgcacggagccttgagcaattggaaccccagcatccacttctgccattggcatggtgtgaactgcagttccacgcgaccatatcgagtcacggagctcaacctcaccggccaaaacttggctggccaaatcagctcctctgttggaaacctgaccttccttcatacccttgatcttagcaacaatagcttcattggccccctacctcttcttaacaagctccgaaacctggacttactctttctgggaagcaaccatttggaggatgttattctagattggcttacaaactgttccaacttagtctacctagatctctctaaaaaccatctcacgggtcatattcctccgaacatagcctttcttaaaaagctagaaggtatcaacctttatggtaattatctcagtggggtcatccctccaaccttaagaaacctctccacactattgttagttgatctttcaaacaatcaactaaatggaagcattcctaatgaagtttggcaaataccgaacatacaaatggtaaatctagcaataaataacctatcaggtggaatcccagatactttcactaacttatcttctcttatgatattaggccttgaccacaatatgctgggcggcacattgccatcaaacattggtgatgtgctccctcatctgcaaggactatacttaggaagcaacttattttttggtacaattccaacttccctaggcaatgcttcaaatctagaagtcgtagacctaccaaacaaccttttcagtggcacaatcccaagttcttttggaaacctttcaaagttgcagattctaaaccttgaggtaaacatgcttgaagcaagacatagtgagggctggcaattctttgatgccctagcaaaatgtagatatctcgttatactttcagtgtctcataatcatctacacggacctataccaaattcgattgctaatctgtccactagtcttcaacaactattcatgggttggaataacctttcaggaatagttcccccaactattggaaaacttagtggcttaactaaattatcactagaaaacaacaacctcataggtaccattaaggaatgggtcagaaagatgacaaatctacaagttttaacactacaatcaaacaacttcatagggaaaattccaccttgaattggcaatcttacacagttggcacgtttctctgtagctagtaacaatttcttcggttctatatatgggtgacaatgggctctaacttttacaatataagatttaaggattggatcggattaggatcgggtcctattactattcatttttgaactaaaatttatttagggccctaccattttgtgaagaagcatttggatcgtgatccattaccacccctagttctataccatctaacttctgtgatcctaaattaatgacaaagttagaccttagccataacaatttctaagggagcatacctgttccctaaatcttacttagaactcatctcgctaaatctttcatcaaacaaatttagtggcgaaattcctaaaactttatgaagacttgaacaactaaaggacaatcaaatggaccacaacattcttactagaaacattccgtccacattcagcagtctacacagcttgaacttgttcaatctttcccataacaatttatctggtcgaatgccaaattttctaagtggtctaaatcttagtaaactagacctaccgtacaataataatttccaaggagaaagatcaagaactggtctatttgataatcctacagtcatatcgctagatggaatctgggattgtgtggaggagccatggttttgcatatgcctccttgccatgttgcttcaagaatagtagggagtgcaacattattgatcaaaaatattgatcccaatatttgggttcatgtctctcgtattgcaggtgtagttttactcctagaaaagaggacatcaagaagagcatatagatcagagcaatcttattatgagcattttgagaaagttacctataacgacttagctcaagcaacacatgacttcttagaatccaacctgattgggagaggaagttatggttcggtgtatcaagggaagctgaaggaaggcagaatggaagtggcagtaaatttttttgacctagagatcagaggagcaggaagaagcttcttgtcggagtgtgaagcattgagaagcattcaacactggaatattcttcccatcatagtttcttgttcaatagtagataatgtacgaaatgttttcatagatttaatttatgagtacatgcctaatgggagcttggacacatggctacatcacaaaggcgacgaggaggctacaaaatgtcatggcttgactcaaagtataagcatagctgttaatatagctgatgcattggattatttgc

SEQ ID NO: 26690 - DNA, 1437 bp, Zea mays
  Clone ID: LIB4571-004-D7_FLI
aaaaaatgtgttatccaataccgttggtggtgggccgcagaaccgcgcgcacgggggaggcaatggcgatcgtggccgttctcgtcgcgcccaccgccagctacgtcgggccgcgccgccggtggcgcgccacggcagcctcgtcttcggcggcgtccggggtggacctcaaaacactgcaggccgccatcgataagaaaagcagcgatgatgttaggcaggcgctggaccagctgagagagagcggatgggccaagcggtggggctcgcagccctatgtgtcgcgccggacgacatctctacgggagctcactacccttggaatcaagaatgctgagaatttagcaattccaagtgttagaaatgatgcggcattcttgtttacagttgtgggtatcactggattcttagccgtccttgcaggccagctccctggggattggggcttctttgtcccctacttgattggaagcatttcattgatcgtattggctgtcggaagcgtcgctccaggtcttctgcaagcagcaatcggagcgttctctacagtctttcctgactaccaggagaggattgctaggcatgaagctgctcatttcctagtcgcctatttgattggcctccctatccttggatattctttggacatcggaaaggagcatgttaatttgatagatgagcaattacaaaagctaatatacagtgggcagctcgatggaaaggaactagacaggttagctgtagtttcaatggcaggactggctgctgaaggtctagaatatgacaaagttgtaggtcaatctgcagatcttttcacccttcagaggttcataaacagaactaagccgcaactaagcaaagatcagcaacaaaatcttaccagatgggcagtcctgtttgctgcatcacttctgaagaacaacaaagcagcccatgaggcgcttatgtcagcgatgtcccaaaaggcaagcgtgttggggtgcattgaagcaattgagaatgcatcctgatcaaaatgtaacctgagtagtgtactagcatcactggactcgatattgtttcaccgcttctgattactgctgctgttggttcgttgagcctgaggaatcgggtggaggagaggatcgaggcgtaggaaggagaaacccaaatcgtcaccgtcgattcctgtacttctgtagacataaaaaactcaggccacagggaagtcaagtgctcgaaactcgaaaggcaaggaaattcatacaatgacaaaaacaatagcctaatctgctgccatttactatcatacacgtgtgccccaaatattactcccatcttttgttttcgtatataatgcgggattgtcctctccaacaccacactttgaccattaatatcttgtatgctgtaatattcatactgtgaaagtggacattatataaataacgtgtttcc

SEQ ID NO: 26691 - DNA, 1960 bp, Zea mays
  Clone ID: LIB4571-004-E5_FLI
taccctcgaggccggccgggattccaccctcctcctcctccgtctccgatcctcgccttcaactccactccctcgctctctcgggccttcttccctagcggcgacgacggggtgatcactgattcactgccgcccgcgccaggttggccagaactagtgggcgccgccgccaagcatcgtagcgaccatggaggtggtctcttgcagccactcctgcccggcattacatcaaacaccagcaagcacatggaggcttcggggcagtgctcttggtcttggtcttgggcatgccaggccttcccggaccagaagatacacagttgcgtgtgtaggaaccacaagtggagcttcgaatccgggtggttccggcaaggtccatgcagcccagggattccatgtaagcgacgtggatgcagccctgcagggcattccttccatgaaagccggagaggccgagagggtgatgattcaaggccttccggaaggccctgacagctccccgatcagtactgggttctgggagtggaagccgaagctgactgtgtactacgagagacccggcatgaagaacagcaaggcacctgcggtgctcttcctgccggggttcggagtcgggacgttccatttcgagaagcagctgagggatcttggtcgcgatcatcgggtgtggacgatggattttctcgggcaggggatgtcgctgcctggtgaagatcctgctcctagtagcatagcgagcgaagaggcgttttggggctttggacaagattcgcagccttgggcagaggagctggtgtattctgtggatttatggcaaaaccaagttcagcatttcattgaggaggttatccgtgaaccagtttatattgtggggaactctcttggaggttttgttgctctgtattttgctgcatccagtccacaccttgtaaaaggtgtcacgttgcttaatgcaacaccgttttggggattctttcccaaccctgctacatctccccgattgtcaaagattttcccatgggctgggacatttccgcttccatcatttgtgaggaaaattactgaagcagtttggcaaaagataagtgacccaaaaagtattcaggacatactcaaacaagtatacgctgaccactcaacaaatgtggacaaagtattctctcgtattgtggagataacacaacacccagcagctgctgcatcgtttgcctccattatgtttgctccaaggggtcagatatccttccaagaggcaatctctaggtgccaagaccaaggcattcctatatctctcatgtatggaagagaagatccttggattagacctatttggggccttaaagttaaacagcaagtgcccgaagcaccttattatgaaattagccccgctggtcattgtcctcatgatgaggtccctgaggttataaactacttgctccgtgggtggctgaagaacctcgagtctgagggctcaatcgacctgccgtttctagaagaacccagctatgctgagcgtggtgtatccagggagctggagtttgtcagagaaggatcaaggaaatcagttagtgtgcggctctatggtaccaagatttccctatggagccagctaagctcattcttgaacacacgtgtccccaagtcacggatagtcttgagataatccatcctcaactccaatagatctcaatcttagaagctttgattcagatattgtatttattactttattaaattggtcagcagacagtgtttccagaattcctagtgcatgtaaatattggcactgcagtggtagtttcgaatttatcatgattcatatcatgtcaagatatgcttgaagttctgttcatagctacaagggaacatttcatctatgtatacgtactcagcaaaatgatacaaattgagcgtggataggcgtcagattctacgagacgaccttatattgcttcctgtc

SEQ ID NO: 26692 - DNA, 1162 bp, Zea mays
  Clone ID: LIB4571-004-F4_FLI
ttctttgcttcagacgagaggattaaggctgtcaggcagatgattatggctcccacgcttgagctgaggcagcaggcgctcgaccgtctcttgccgtatcagaggtctgacttcgaaggcattttccgtgctatggatggactcccggtgaccatccgactcctggaccctcccctccacgagttccttccagaagggaacatcgaggacattgtaagtgaattatgtgctgagacgggagccaaccaggaggatgccctcgcgcgaattgaaaagctttcagaagtaaacccgatgcttggcttccgtgggtgcaggcttggtatatcgtaccctgaattgacagagatgcaagcccgggccatttttgaagctgctatagcaatgaccaaccagggtgttcaagtgttcccagagataatggttcctcttgttggaacaccacaggaactggggcatcaagtgactcttatccgccaagttgctgagaaagtgttcgccaatgtgggcaagactatcgggtacaaagttggaacaatgattgagatccccagggcagctctggtggctgatgagatagcggagcaggctgaattcttctccttcggaacgaacgacctgacgcagatgacctttgggtacagcagggatgatgtggggaagttcattcccgtctatcttgctcagggcatcctccaacatgaccccttcgaggtcctggaccagaggggagtgggcgagctggtgaagtttgctacagagaggggccgcaaagctaggcctaacttgaaggtgggcatttgtggagaacacggtggagagccttcctctgtggccttcttcgcgaaggctgggctggattacgtttcttgctcccctttcagggttccgattgctaggctagctgcagctcaggtgcttgtctgaggctgcctcctcattggcaaccggattgcctgctgctggtggatgtggtgatcaacagtattattacagagccatgctatgtgaacattactagtagcagtgctcataaaagctacaatcccatgtcccttttttccccagtcatgtaaaacttccaaactgctccatggttcaaaactctgttcttcaatacatcatcaattatcgattatatacgtggcaagtttttttcttt

SEQ ID NO: 26693 - DNA, 1790 bp, Zea mays
  Clone ID: LIB4571-004-H10_FLI
gtgggaccctcgaggctggccgggctggggcgctctcctcctcctcctccccctccgtctctcccttctccactcccccctctccgtctctctctgtcctttctgggtcgagggctgggcgccgccgcccttcgtcaggtcttcgccggcggcgattacacaccaggttgagcaaatattcttccaccaatggcgagagaaccgagtcctgaaatagatgatgaactttacaatgaagtttatgggaaagcatacagcggcccagttgcatcagctacaaatagtgtgactcctaaaggaaatgctgagaagaggcccctgactcgtgataagtcagatgatgaagatggggccccagatcctaatgctgttcccacggacttcactagccgagaggctaaggtctgggaggctaaagctaaggctacagaaaggaactggaagaagaggaaggaggaagaaatgatttgtaaaatatgtggagacccaggccattttactcagggttgcccctccacacttggggcaaataagagaaatgcagacttttttgaaagagttccagcaagagataagcaagtcagagatcttttcaatgagagggtaataagccagattgagaaagatgtggggtgtaaaatcagaatggatgagaagttcctgtttgtcagtggaaaggatagattaatattatccaaaggtgtttctgctgtgcataaaattattcaagagggtaagggtaaacatagtccaagcagtccgaaacacgatcgctctaggtcgcctgtacgaaacactactgagtttcgttccaaacactctgattctcatcgctcacctagcccaagaaattttgattctcaatggtcccatagtccaagaaatgcatcactctctcaaagtaaaggatactataatgaaagacatcgagatggtcgcttacacaacaatatgcccaagttttcgaaaggatctccacaagctcatgccaactttggagcaaaaggccgtccagcccaatcaaaatctccatgccatacctcttatcttgatgaattacctagaacacatggcgagaataaccaatttgctgcatcacgagtgcccaatgattggggaattgagaggcatggagcagatgccagttcaagtcttaggtttgacatgccatcccaccaacagaccttggaagaacttgagatggagtttaaaaaagaagctacacaattagctagagctcgtgaccaagaggaggatgaagagaactataggcatcgagagtcgctgagagtgattagagaaaattacatggagagagtgattaccttgaggaatgtgcatgcaaagaagtgggaagaatttcttgacacctttaaaagtcaacaacaagcacagccttcatacatacaaaccggatatctaggttttgagcagagaacggcacatatttcagctacacatcaaccaatggattcgaagagcacatatccgtatgcttctgatagctattcagccccaaaggctcatgcagcatatggtgagtttcaacatgagaggcatgatgatcttgggagggcctataggcgatattagctgtgaatagtggtgagttattgagttaattacccatttcagatttttgatgttaagccctgcagttctaatgtagctagagataatcatttcgttgtttgagcaattggtgtcctgctaggtaagctaattaaagagctgtgactgtcaatagctacaggcttgggaagcctccgtcttattagaaaatgttgacc

SEQ ID NO: 26694 - DNA, 1598 bp, Zea mays
  Clone ID: LIB4571-005-A2_FLI
ggccggccgggatcacccactaccctattccggtgcgccatcgctctcgtcctcgctgatcgatccaagagactgggaccttcaaagagcaataggactcatggaggttggagacgcaagaaacggttctgcagcagcggcactgacaaagggaagtgcggatgatgccgcccgcaaaccgctccctccttgctgcgtcaaggccaaggcgcgtgtgcctgaaaccgaggccaactgccatgatactgtggtttcagggtggttcacggaacccagatcgcgttttggtaaaacaagcaaagtgcagtacttcaataacccgatgtggcctggagaggctcattcattgaaagtggagaagatcttgtttcaagggaaatcgccttaccaagaaattttagtttttgagtcttcaacctatggaaatgttcttgtgcttgatggtatagttcagttgactgacaaggatgaatgcgcataccagtgaaatggctgctactttgctaccgaacaaattgaattgaaggatgttctccccaccttacgtcttctaatgagtagtaactttatgggcagctagccttatgatataagcctactgactgatgcaggttttggttgttggaggtggtgatggtggtgtactgcgcgaaatagccagacatgattcagtggaaactattgatatatgtttgcaaagaattctttccaaacttatccattggattcaaagatcctcgtgtccgacttcatgttggtgatgctgttgatttcctgaggaattctcccgaaggaaaatatgatgctattattgtagattcatcagatccaattgggccagcacaggcactcgtggagaaaccgtttattcagacaattgctagagctttgaagcctggtggtgttctttgtaatcttgctgagagcatgtggctgcacacacatctaatccaggatatgcttgctatctgtcgacagacattcaaaggtgctgtgcaccatgcctggacaagtgttccaacatatcccagtggtgtcattggatttttgctatgtgcaaaagaaggtcgtgcagtgaacttcttaactcctgtgaatccaattgagaaaatagaaggaacagcaaaagctggaagggaactcagattttacaattccgagatccatagggctgcttttgttctgccaacatttgtaagaagagaactggaagcatataccactcctagtgcctctgctgaaaacgagaaaccgaaagaatcggtgtcagaaccgcagaagataaagatattgtcaaacaacgccattcttacagctacctagccctgagccgtactcaatcttgctcggtatagttgtattctcacagaataaatcagtcactggcttttgctgacaccgcacgagcagctttagtatagtgagttgaatgatagtcgattgaataagagggtagatattgaactgatgtaatgcctctatcgaaacaatatgtccccctatcttgttaggcgtgttgtgtgttgtgcacgatttcagctgtagcttgtaaattgtacgaaccgttgatgtaatgtatagcctgcgtttctgctgag

SEQ ID NO: 26695 - DNA, 1917 bp, Zea mays
  Clone ID: LIB4571-005-A8_FLI
gggcgggactctctcgttccacgagtatcagtctagccgagcactcatcagtcatcactcatcagccccctcctcctctaaagctgaaccgatcctccctctccctccctcgctctgtccatcttattattaattttttttttttgcttgaagcaagcaccttcccctttctctgtcttgcctccttatatacgccattgtggcgctgcgctagacgcgacgcccatgaggggcctgacctaatgtagtgttaggagaaagcctactgttccatctctttcttggagtacgagggcacgaaggcctaaccccctcgcccccaccagattcggggaattcgcgcctcatccgatcgtcaccggccgccgaagcgcaagaaacagcggccgggttaggactctggaggatacggcggctcggcggattcaggaagtgaggatattttcttggatttctgttcttgattgaggagaggatctcgtattagctactgcgttattcactggatgttggcaatggggtcagaagagtgggagctctatccttcttccgacataggttcgcaggtcatagaatacagacctgtgtctgaagacagcgatgacgatcagaatggggatgtggcagtgtcgctggatgttgttctccctgatgatcttctggagaaggttctttccttcttgcctgttgcaagtatcataagatctgggtctgtttgcaaaaggtggcatgagattgtgcatgcccggaggcacgcatggagcaaaatagtgcctcagaagccgtggtacttcatgtttacctgtagtgaggatgcagtttctggttttgcctatgacccgagcctccgcaaatggtatggatttgatttcccttgcattgagaagagcaactggtctacatcctcatctgctggcttggtgtgcctgatggacagtgagaccaggcgccgcattgtggtgtgcaaccccatcactaaggactggaagaggcttcttgatgctcctgggggcaaaacagctggttacagtgctctcgcgttttctgtggacataaggtctcaccattacactgtggctgttgcaagaagcaaccaggttccatcggagtattatcactgggagcttaccatccatttgtacgagtcagtctctggtagttggatgactcccttcactggagtattggttgggtggagaggtggcgacgagtgtgtcatctgtgatggagtcctctactatttgctgtacttcacaggaattctggtgaacaacaatgagtaccgccattgtctcgtaatgtatgatctcacagcaagacctaaccacacttctctgatcagcatggctattccagtgccatgtgttcttacatgtggcagattgatgaacctgagcaagaagcttgtgctggttggtggcattggcaagcaagataggcctgggatcatcaagggaatcggcatttgggagctccataacaaagagtggcgtgaggttgctcggatgccacacaagttttttcaaggatttggcgagtttgatgatgtttttgcaagctgtggggcagatgatcttatctatatccagagctatgggtcgccagctcttctcaccttcgaagtaaaccacaagtcatggaagtggtccgtgaagagccctgtttcgaagaggtttccgctgcagctattcactggattctctttcgagccaaggctggacgttgctctctagtttcttgactgtccacctccaccagaatttttgcattacattttgcctgattctggactggccagagtcaggaggtgcttgcactgcagccatttgaacacagaaaatgttcgtttttatagctctactcttttctttgttgggtctattgggtatattaattgaaatggtcagttaacttccc

SEQ ID NO: 26696 - DNA, 1518 bp, Zea mays
  Clone ID: LIB4571-005-C6_FLI
ctcgaggccggccggggatttgatcaccgattaggggaggcggtttaccagtgagcacgcgcgagagataggataggaggaaagggaagctagcggcttcgctctcgcggggagatggcgcaggcggtggaggagtggtaccggcagatgcccatcatcacgcgctcctacctcaccgccgctgtcgtcaccaccgtcggctgcaccctcgaagatctctaatttgcgctctttacgtgcgcccgttggctgggccggctgtgcagatcatttcgccgtatcacctgtaccttaacccgaagctcgtggtgcagcactacgagatttggcgcctcgtcaccaacttcctctacttccgcaagatggatttggattttctattccacatgttctttcttgcacgatactgcaagcttctggaggaaaactcatttagaggaagaactgctgactttttttacatgctcttgtttggtgctactgtcctaactggcattgttctgatcggagggatgataccttacatttctgagacatttgccagaattctgttcttgagcaattcattgacatttatgatggtttatgtctggagcaagcacaacccttttatccatatgagctttctgggcctgtttacctttacggctgcgtacttaccatgggttcttttgggcttctctatcctcgttggaagcagcacatgggtggacctcttgggtatgattgctggacatgtgtactacttcctggaagatgtatacccacgaatgactgggcgtcgccccctaaggacaccgtccttcattaaggcgctatttgctgatgacaatgttgtggtggcacagccacccaatgctgggattggtgctggtgcaaggttcggtgctattggtgtagatccccaggctcaatgatgaattactttcagtgacctgagggccgaggctgtgactgatctgggatgcggcagtttgtattctctgcgcaaactgcggaactgtacaagccattgttcttgtgtatttatacaggctagatgagagttattgtgcataacaaaagattagtagtatctgaggcggctaagtttctcacctgttggcagggcccggaggaaaatggatcgtgatgggcaaacatgccaacccctgttgcagaaacttgttcatgtgacggtttaacatctgacctgctaccctttcatgcatcggtgagtttagtctaggaaactgtttgaagcggggaaatttggtgctttggcagcgagaatttggatggagcgctgtaattgcagaatggtgcaaggaatgactcctaacattgtggacgcctggatggtgttcgttttccttcctgattctgctgtgttcaccgatccggatgatctggtctcctggaagcagtctttgtccatttttccttcatcagctgctctttaaccgtaaaatcggcgttcgtcatttcaagtgttgtgaccgtatcccttttctgttatataaataaaatgtttcagct

SEQ ID NO: 26697 - DNA, 2037 bp, Zea mays
  Clone ID: LIB4571-005-D6_FLI
ctcgaggccggccgggattgacccgggcaggggcgaggtcaagagggcgaaccgttggccgggtcgcccccgctatcatgccgtgctgtgacacggcggcaggcggcttcccaacgacgctgcgtgcgcacccgcgggccgcagccgccccaggcgcctgcataccagtccaaccaggcggcctcgtataaagaggttccccacttgggctgccgctctcccatttgtctcgcgcttcgctctcacgctcgcgtcaccggagctctccagaaccgaaccccaactgcccaagggcgagcgatccgaacccctcggcggcttcgtcaacgacgccgagaacactttgaggaatggctgaagaggatgtccagccccttgtgtgtgacaatggcactggaatggtcaaggcgggtttcgctggtgacgacgcaccgagagctgtctttcctagcattgtaggcaggccacgccacactggtgtgatggtgggcatgggccaaaaggatgcatatgtgggcgatgaagctcagtccaaaagaggtattctgacactgaagtacccaattgagcacggcattgtcggcaactgggatgacatggagaagatctggcaccacaccttctacaatgagcttcgtgtggcacctgaggagcaccctatactgctgaccgaggctcctctgaaccccaaggcaaacagggagaagatgacccagattatgttcgagacattcaactgcccagcaatgtatgtggccatccaggccgttctttccctgtacgccagtggtcgaacaacgggtattgtgctcgactctggtgatggtgtgagccacaccgtccctatctacgaagggtacacgcttcctcatgctattcttcgattggaccttgctggtcgtgaccttaccgacaacctgatgaagatccttactgagaggggttactccttcactacgactgccgagcgagaaattgtcagggacatcaaggaaaaacttgcctacgttgcccttgattatgaacaggagctggagactgccaggaccagctctagtgttgagaagagctacgagctgcccgatggccaggttatcacaatcggtgcagaaaggttcaggtgccctgaggttctattccagccatccttcattggcatggaatctgctggcatccatgaagccacgtacaactccatcatgaagtgcgacgtcgatatcagaaaggatctgtacggtaatgttgtcctcagtggtggctccactatgttccctggtattggtgaccgcatgagcaaggagattactgcacttgcccccagcagcatgaaggtgaaggtggttgctccgccggagaggaagtacagtgtttggattggtggttccattctggcctccctcagtacctttcagcagatgtggatctccaaggaagagtatgacgaatctggtccgggcatagtccacatgaaatgcttctgaatttctggagcagtatatctgttgcttgcattttcagttagttgggatgcaagtttgtcccgtggtctcgctagcattcttcgttctttctggatattgaagagctgttggccatggagcattgtgcaaggtggtaaagtcgattgatggtactacatgaagaaacatgtgcagtacttcagcagtatagatcgtcaggtcagtttagtttttttttcaacaacagtgccatattaggatgttcctgatgtgcgcagttggtctgggtttttacacaacgcaagggtgtcggctgtcgcccgtgcagtttgcgtctttgtgagatctgggtccgtttctgcactccagtacgtggaacaggtttcgcatttggtggccagtgccccagcgtggcgtgagtgttgatgatttgaacttggagctgtttgttctattcctttcatgaaacagatattatcgtttgtacagggataaataataaattgtttatccttcaaatgttttagatactgttggaacaaacttcgtttaattataatctcttggatttaattcg

SEQ ID NO: 26698 - DNA, 2270 bp, Zea mays
  Clone ID: LIB4571-005-E12_FLI
ccctcgaggccggccgggaactgctaaaaccacccaccttctcagtgactcacgaactcacgactccagatctcccaccgctcgccatggacctcgacgcgaggcaccgccacacgccggattcgagctcctccccacatgccgcctctgacatgggtctcccgctcgccggggctgcctaccagccctacgtctctgagctcctctccttctccatcgagcgcctccacaaggagccggagcttctgagggtcgacgcggagcgagtgcggcggcagatgcaggaggtggcggtggagaactacggcgccttcatcgccgcctccgaggcgctctccttcgtccgcgcgcagctcgagagcttcgatggccacctcgaggccatgatagaggagataccaaacttaacatctggctgcactgagtttgttgagtctgcacaacaaattctggaggagaggaagcttaaccaaacattactagccaaccacactacattgcttgacttgcttgaaatcccaccattgatggacacgtgtatacggaatgggaactatgatgaagcacttgatctagaagcttttgtgagcaaaatatcgaagctgcacccagatttacctgttgtccaaggattagctgctgaagtcaagaagacagtacaatcattaatttcccagcttctccagaaactccgatcaaatattcagttacctgagtgcctccgtattgtagcacatctgcgtcgaattggagttttcagtgagtcagaattgcgcttacagttcctgaggtgcagggaagcttggctttctggaattcttgaagatctggaccaaaggaatgtttatgattacctcaaaggcatggtgacttgccacagggtacatctattcgatgttgttaatcaatatagagcaatattcaacaatgataaatctggaaatgatgagaactccgaaggtgggctgcttttcagctgggcaatgcaacaagttagtaatcacctcgctactcttcaagttatgttaccaagcataacagaaggtgggtctctgtccaacattcttgaacaatgcatgtattgtgcaatgggccttggcttagttggattggatttccgtggcctccttccgccaatctttgaggagtaattggtgtttaaattattgaattttatcaccgactctaaaggggctttgttattgatgctgttatctgcattttgcagcgcggttctaaatttattctcaaagaatatgagtatggcggttgaaaattttcaggttgttttggattcgcaccgctgggttccgatgccatctgttggctttgtagcaaatggtgttgtcgatgacacttctgatgatgtgactccaccttctgttttaatggagcatccacctcttgcagtgtttgttaacggtgtttcagcagcaatgaatgagctaagaccgtgcacaccattgagcttgaaagtcgtccttgctcaggaggtggtcaagggactacatgcagtctctgactccctagtaagatacaaagctatgcggatgcttcgtggaaatgagtccgctcttttcctgtcactctgccaggcatttatcgaggttgtacatccttattgtgccgcatgttttggtcgatgctactcgaatggggcaacattgatctcagagtgtcaaggcacactggacgctgtccgtcagctattgaccataccggcaagatctaacagttccagtatcgaaagaaagcagtcaggagccattgaaagaaagcaatctgttgagagctctgggacagcagtcacgtataacgagctgtcagccgatggacctgggctagagatcaacgatgctgctacaaccaccaccccaccggtagaggacgacgtgagtacccatccaccaggaagtaagtagcttggacctccgtttgaatttgttaaagctctttatcaaggcctggtttagtcaaccagagaagaaattgctgcaaacattatattcatcgataataattcatagttttgctccagttctacagtgtacacaatatctcactggatatttgtatcttatttttttatcactcattaaatttttagctgttcattgttatagtcaatacctagatgttgtagagtgtgtccaacccgaacattcagtaatatgatgagtacaaaccgtgttcatcgtgttgactgcacacttctgaaatcaaagatctgattcatgagtcatatatatgtaattgatactactgaccat

SEQ ID NO: 26699 - DNA, 848 bp, Zea mays
  Clone ID: LIB4571-006-B9_FLI
ctcgaggccggccgggagctcacaaacatacagtagctagcttgcttggagctgattacacttacacccggccagctagctaggccaggtgtgtgtgtatgtagccagctggagcgctttctgtacagtacagctctcgcgtaacgttccatgtggacaaggtatcctcggcacacgtctacctgaggctaaagaaaggcgagacgatacacaccatcagcgaggccctcctggaggactgtgcgcagctcgtcaaggctcactccattcaagggaacaagatgaacaacgtcgaggtgatctacacgccctgggctaatctcaagaagtccccatccatggatgtcggccaggttggcttccacaacccgcggatggtacatgtgcttatagtcgagaagcgtgtcaacgagatcatcaacaggctgaataaaacccgggtagaacgccgggcgccagacttgaaagcggagaaagaggcatcaaatgcagcagaaaaggccgagaggaagatgcagctgaaagagaagaaacggaaggaggagatggaaaggctggagaaggagaaatgggcggagatacggagctacaagggcctcatggtggccgagaagatgacgtccaaccgccagatcgcctccgccggcaagtccatgcaggaaatggaggatgagttcgtctgaagacgactgtcatcgtcactggagtctacatctctctctctctctctctctgtctgtgtgtgtgttgtgtgtgtacgtacatatgtccatgctcgcgtgataacgacgagtcgaagcaaccaaaagatctcatggatcgattattcgatccgttcctgatccccg

SEQ ID NO: 26700 - DNA, 2074 bp, Zea mays
  Clone ID: LIB4571-006-D12_FLI
ctcgaggccggccggggtatccccgtcgccttccttgggcagttgggctgagtcctcccgtctctcgccccagatatagttgcggcggggtttccttcttcgagaaagttctgaaccagggggagccgcgccgaaagccggagacgacccttgctgctggcaggtggtaattttgtagtcttgctaacttcagctgatggttaatatgagggacaatgactcatcaagcgacgcacaattggacgagcccttaggacgggtatcgatactctcttacggatctgggcatatgctcaacgacatcacatcgtcttgttggtttacctatttgcttgtgttcttgacagatctgggacttagtccaggtgatgccgctattgtgatgctttctggacaattggcggatggcttcacaacaatctttgttggggaattgatggatcgctttggacatttcaaactgtggcatgcaggaggatctattttagtggcaatttccttctcttctgtttttggtagctgtgttccttgcaaacttatgggaattaatacatctactttggagactgttgggtacagcacatttgctgctatttttaatgttggttgggcagttactcaagtcgctcacatgtctatggtaaactgcattacatcaaatccaactagccgggtttcacttgtaagctgtcgtaatgccttcacgatggttgcgaatcttagcctgtatggcgttgctttggtgatatttactctatcgcagtcagtgaacgtactagttcagtatcggtggattgcttatgtgtccatttccctcggatcttgctttgttgtcatcttcttgattggaaccaaagagccaggatcgattcgacactgtttggataagagtccttccagaatttcatgggactactggttcaagagagtattgtactaccaagttgctctagtctatactctgactagattggtgaccaatgtttcacaggcatttcttgctttctatgtaataaatgatttagaaatgaatcaatcctccaaagcattggtacctgctattatctacatctgcagtttgatagtatctgtaatattacaggagactagatggtcaagttggcgtcttaagctttactttccagctggagcagtgctttggatattgtcaggtcttggaattgttcttctaccgagcagaatgcacaacctcatgtatgccatttcaatcgtaataggagctgcgaatgcacttatgacagtgacaagtattagcatggaaggtgttctagtaggagaagatctaaatggttgtgcttttgtgtatggctcattaagttttgttgacaaagtttcatgtggaatagctctctatgttctcgagtcctatcaaggaagtacaaagatcagatcaaatttaggaacggcatttggctattcagttacaagacttggcttgggcttagttccagctgcttgttcgctgctttcagctatagcagcttataccatggagctccctgatactcagaaaggacctttggtggaaccccttctagcataacttcactggtggcagtgttacagtttcaccgtgagccttcacagtaattgctcgatggaatgacactgctgctcgagcctgaagatgttagcgacctgatcaattcgttttgacttcgtatatatagtctgaataaattatgacggaggggatatactgagacacgtttgaatagggattagaagtgacataggggggctaatggcaagaagatctgtgttgatcatactgagctttacaagtcattctgcaatccaatgtaaatataacttagcttcatttcgaaagcgtcaaaactgccaactaggcacatgtagcgacgatgggcaaggaaaagaatatctctggtccttgttctacgctctaatttcattgtatatgtagcatcatgattgaaaagaaatatcttatatttatattgatgggtgaaatagtgtcgcctatgctcatgtaaattgtttctgacatttagaaattaaatatgcttgagaagagagcactaatctgtct

SEQ ID NO: 26701 - DNA, 1034 bp, Zea mays
  Clone ID: LIB4571-006-F10_FLI
atcgaggccggccgggggggaggagaggaaaggagacgggaaacaaaaacacagcgcaggcagagagagacgtaaagccgccgcttcgtgcgcgtcgacgtcacctcgccgccggggggccagggctgtctcaccgcggtgtcccgtagggctcccttccctcgccggactgggcgggcgccggacggatcgggaggcgacgacctgaggggactggctgggatgaccgggaagaagcgcaaggcggaggcggcgcgcctggaggagacggaccaggcgctctacggggccttccggggcgccgcaaactcgctctcgcagctctacactctcgccatgggtgcgcagaaagcctcctttaacgccggcgaacgccacgccatggaaaaactttatgaatggatcctgaggcagcacgaaaatggtttgaggctaacagttgctgatgtagcttcccgtatccagcttgagattcagtatggaggtgacaatgcatcagcctctccaaggccacaataccctagccaaagcactgcacctacagtgcacatccccaacacaagcaaccagcaaccatcgccaagcttatttgctccaggaaaccctggtctgacacaatccaagaattccatggtcttttcaaacgcattatccagccccatccggcggagcctgcagccttaccacctagaacaggacggagacacagggtactttgtgaacggcgcaagccgcgacatggaccccacggcttcgaacgattcatccatggacatgcactcggacagcccagttcatgactcctactgagcagctcccttcacggaaccggaagaacagcatttccagtcgaagaagtgccaggcctagtaggaatattcaatttaacaccttccgtagcctcttacactaagcgtgtgatgccttgtggcgttgttgctactacttaccacctgttgctttgccagaatactgaaatttgcatgtactatactgtaccatttgatttatctgtgcatattactagtgttggc

SEQ ID NO: 26702 - DNA, 2132 bp, Zea mays
  Clone ID: LIB4571-007-A8_FLI
gctgtccgattgtgcgctgtcgcagcctctgccctctcccagcccgctcctccatctccggtgagacgcgaattgaatcgcatcgaatccatgggcagctcctcgaataccaacacgagcggcggggccagcgacaaggaggagaagaagaaggaggacaagatcaaaggcaaggactcgtcggggccatccttcaaggagaacgaaagggtcctcgcctaccacggccccctcctctacgaggccaaggttcaaaggatcgaaaaccatgaagatgaatggcgctactttgtccattatctcggttggaataagaactgggatgaatgggttgcaaatgaccgcttgttggaattgacggaggaaaacgtgcgcaaacaacaagagcttgataagaatcaggtagttgacaaaacaatgaagtctggacggtcaacacagcataaaccaaaagtctccaatgcggatgcaaaagctgataaagatgacactaagagtctcatttcagtgaaggggaagaaacgtaaaagtcagcttgggactgagattcaggacaaggaaaaaagatcatcacatagtctactagtgttgcagtttcctttgccactgaagaagcaacttgtggatgattgggagtttgttacgcagatgggtaagcaggcccaagtggcaagctcattagctcattcagaaaaagactttgcaactccattctcattcagaaggaagactttgtaactccatgtattccaattatttttaatggaaattcagcaatctgtcaacccttgtggtagtcacttgaatattacagacatttgctgaattggcagttaaataagaaatgccgtccatgcaataggatccaaagaatgcggcaaacattttccatatatttatttatttctccaaaacatcaaacctcaagacagatttgtccgtgcaatagggtccaaaagaacactaatatttgagtttgtatttttttctggacccactgataaatagggaaactctgtatatcattatcatctcaaagagcgaaagggcctctagcgtaatggttaaggcttccgagtagcacttccaggccctgagttcgatccccctcgggagtgaattttggatttagttaaaaaaatcccttagttgagccccgcccgctctcggggatcgatatcctgcccgtcatcctccgactgggccgttgcagagtgggcagttgatcggcccgttagtgatgggggccagggttcggggttttttcgtccgggaccatgtttcagtttcttcttaatataataccgggagggcggtctttccctcgccggccgagttttttttattatcagctcaaagaaaacaagctaaccttagtgataaactgatccgaacaccagatgaaagtcttctttgaaatagataaccatattcgcctcactttttttgttcaccacaactacctgagatttccttggcctgcagcttgtgaagctaccacgatcacctactgttgatgatattctaaagaagtacttggaacaccgggcaaagaaggatggcaagataaatgactcctacgctgagattctgaaaggattacgctgctactttgataaagcattgcctgcaatgcttttatataagaaagagcgagatcagtatgctgaagaagttaaaggtgatgtctcaccatcaactgtatatggagctgagcatctattgcgcctttttgtaaaattgccagagctacttgcttctgtcaatatggaggaagatgcgttgaacaagctacagctgaaactgctggacgttctcaagtttcttcagaagaatcagatcaccttctttacctctgcgtacgatggttcttgtaaaggtgcagatgaggataaaaccaaatgattgcatgtgaacgttttatatcatgtaacatctttcgatggacttgtctggcactattgttgatatgaatgtcgcttaggacaacaatcggtttatgtaggatagatgctgcagattcctgaaagacggtacttgaactgcccggagcatgttgtattttcttaagatgctggaactaagacggcttagtcgaattttcactatcaagtgagtctcggtcttgcccc

SEQ ID NO: 26703 - DNA, 1440 bp, Zea mays
  Clone ID: LIB4571-007-F10_FLI
aggccggccgggattccactctcttctagataataataataaagcgaaaggttatcccacctcttttctattcttttttccgcccgaagacaacgtaacaaaccaacgataatcctccctcttgctacaaaaaaggaaaaaaaaacatcaataataatccactgcggtcgctcgtcctcctcccaacctcctcccaagttgcctcgtgctctgcttcttcggttttcaggagcgtcggccattgctgctggaaaagcagaccattgggactccctcgtgcgttttccaaatcaggttgatggcgatggagggaccagttttatgccgccctgcaatgcaagccaaatcgcctgctgctgcgctggtcaacaactccctgaccagattcgggcagcttgggaccatttcaaaatacaggaacgtttcaagattcatttctcccatctctcagccatctacgaagaacataggtccatgctgtagcttcagctcgtcttctgatggcaatggatacatggctggaaactttagcgacagtgatgaagattatgttaattctactgtgctagaagcagttgaggtgagaagtggatcggaaggatatgtgataaagatgcgagatgggaaaaacttgcgttgtgtccataacaattctcaagggagaaatattccagagagtgcaccccaacctgctattgttttgaggattgaagatggaagcgaaactttacttccaatcattgttttggagatgccaagtgtacttctgatggcggctattcgtaatgtccacattgcacgaccaaccatatatcaagttgtcaaggaaatgattgataaaatgggctatgaggtaaaacttgttcgggtaaacaaaagaattcaagaagcgtactgtgctgaactttgtctaacaaagattgatgattctacagacagcatcaccttcgatcttcggccttcagatgccataaacattgctgttcgttgcaaggttcctgtacaagtccatagaagtcttgcatacagtgacggcatcagaccagtcgagccagcaagaatggcagtagcagctggcctatcagatgggttgttatttacagagcttgacagacccgatggacaggcatctgttgaggctcaagagtttggattggtgaagaacatgctcattgcagccgtagaagagaaatacaaggatgctgcatcatggaaggacaaactgatgcggctgaggtctaagcggaagaactgggcctgacagcgttgcatgtctggatggtgtaaataaagatgatgcccagctgaattccagtacgcattccagataattgatgctgggttatggctatgtaactagctgtacatattgtatggacccgaggatggtcttctgtaaattcagactaagctttgaagtgaaacactaatccttcggag

SEQ ID NO: 26704 - DNA, 1223 bp, Zea mays
  Clone ID: LIB4571-007-F3_FLI
ggccggccggggtgcaaggggcgagccgccagctactgctggccttttccctcacacaagtcacacgcacacccgctagcccccgtcccccgtcccgcccgtaccttcctccgccgcctccgtcctcgttccaaccgtgggcagcaggcaggcccaagtatctgcagtagattggtggagaggaagaagacggcaggcacccacgcagatcaaacgtgctccgccacccttggtttcggcgaatcggcgccgtacgccgtaaatcgagccgtctccgagcagatcgacgcgctgcatagcaattcgacccgtctccggccaaatcgacgtccagagctgcaaattgacccatctccgcgctgacctccgcttgtgcctgccgaggagcgccgaagttacgcccttctcgtgaagacatccttgataaacctgatggctatcgcggagagctgtgttgatgcggtggtcatggagatggtggctgtctactgcggtggcctctatgccgccaagccagagcttgctgcccgccgcattgaggccatcggctttcaggttgggcaccagctctctgagagatataccatggagcgtccacgatttagtgatcatcttgaagcaatcaaatttatctgcaaagacttctggtcagagctgttcaagaaacagattgacaatctgaaaacaaatcataggggtacctttgtccttcaagataaccgttttcggtggcttactcgtgtttctctagatccatatacagagaacagagattcaactgaaaatgattctgcagcattgggtgatacagcagcccaaacaactaccatgcttctgtatttcccatgtggattgataagaggtgccttgactaacttaggaattccgtgttctgtctctgctgacatgtcaaaccttccagcatgttcgtttgtggtgcgcataaagacatgaactgtgagaaacgatacaagtacagcatgaagatctgacagtacctgcttctggttcaagcgggttgaacattgaagacagcagtatttgggcatgcattagatgtatcgtggtactgcatttagccccgtttgttttttgttttcttttcctccaggaattacttgttttcactatctcaaaatgactttcccgcaacctcctcatgagagcatgtacaaccccatttaagggctaagtgaaaaaatacaaaatacgggctcttcgcg

SEQ ID NO: 26705 - DNA, 1406 bp, Zea mays
  Clone ID: LIB4571-008-F12_FLI
ctcgaggccggccgggaacccatactagaactacagcatttcacaagacacaacataagcaatagccatgggagctgtgaagcatacattgaaaatgctttcatggctcctactcttcgcacaattggctgcggccaccacctccaagtgcacaaatgccacaaatgggactgagactgacagcctgggtgcaatgaaactgaagctgattgccattgcatccatcctcacagctggagcagctggtgtgctagtgccagtacttggccgctccatggccgcgctacatcctgatggtgacatttttttcgctgtcaaggcatttgcagccggtgtcatcctggccacgggcatggtccacattctgccagcagcatttgatgggctgacatccccatgcctctacaaaggtggcagtggtgggaacattttcccctttgcaggactcattgcaatgtctgctgcaatggccactatggtgatagactcactagctgctgggtactaccgccggtctcacttcaagaaggcacggccaatcgacatcctagagatccatgaacaaccaggagatgaggaaaggtctgggcatgcacaacatgtgcatgtgcacacccatgcaacacatgggcattcacacggagaggtggatgtcatcagttcaccagaggaggcttcaatagctgacacgatccggcacagggtggtatctcaggtccttgagctcggaattttggtgcattcagtgataattggggtgtccttaggtgcatctgtgaggtcatcgaccataaggcctcttgttggtgcccttagcttccatcaattctttgaaggcattggcctgggtggttgcattgtgcaggcaaatttcaagttgagggctaccgtcatgatggcaatttttttctccctgactgcacccattggcattgcattagggattggaatttcatcaagctacaatggccatagcattacagcgttcattgttgaaggagtgttcaactcagcctcagcagtaattttgatctacatgtcattagtcgatcttctggccacagatttcaataagcccaaactgcagacgaatacaaagcttcagctgatgacatatcttgcacttttcttaggtgcagggatgatgtccatgcttgctatatgggcatagattttcagaccatcaaaggatggctagagttgaagaaataagtttatttgtccaagagttctccattttctcaaacaagatgcccttggtgaagggttcatcatattaatccacgagttctccatcttccgtacgatatagcctcagatagtccttttgtacttcataatgtgagattacatgatttgtcatttgttggcatagtccattatcctaaagctatgatagtcaaaat

SEQ ID NO: 26706 - DNA, 1023 bp, Zea mays
  Clone ID: LIB4571-010-E10_FLI
ggccggccgggccccatttcgaagcccaccgaattccctgcgattcctctcccctcgcctcctcgtctccccctaggggatcgtcggagaggaatcgcaaagagggccgtctcatccgagttaaggaagccatggagcacagggaggctgggtgccaggcccccgagggacccatcctctgcatcaataactgtggcttcttcggcagcgcggcgaccatgaacatgtgctccaagtgccacaaggagatgataacgaagcaggatcaggccaagctggctgcctcctctatcgacagcatcgtgaacggcagcgacgccgtcatggagccggttgttgctggcagcaacacggtagtagctgttgcccaagttgagttgcaaacaatgaacgtgcagcagcccgctgatgttgccggacccagcgagggggtggcggcgatctccaaaggggggaaggtagggccgaaccggtgcagcgcctgcaggaagagggttggacttacgggattcaactgccggtgtgggaacttgtactgcgcactccaccgctactccgacaagcacgactgcaagttcgactaccggactgctgccagggacgccattgccaaggctaatccggtggtgaaggcagacaagctcgacaagatctagggggggttccctacggttgggtatcaggaagattgtaaaccgcggtaactcgtcatgcggaactgctgccttgccccccgcgcctttctcttccatgtttgctgctacaatcttgttgttgggcattgcagtgcacggtgcacacttgtgtagcccgcctcgagaattcctgcctctgcatctggtcagttctaaaatgatttgcatgttggctatgttgtgtaagctctatttatggtggtctcgctgagacgggtatttggcttcgcagttatctagctatgtgatgtactgttgtcttgtccctgggtattatatggtacactgcagccagtaatagtaatctgcaactgtgcgttaaatggtc

SEQ ID NO: 26707 - DNA, 1414 bp, Zea mays
  Clone ID: LIB4571-010-E5_FLI
actcttccgatcccgaggaggtaaaaacaccgtcgctcaccaccaacacaacgccaaccaacctgccccctcacccccgctggccgctgcttaacaaaccgccgccacaggacaagacaaacttattacagctccacctcagtgctgcagagactgagggccagccaaaccgctcaccgcacacgcggaattcaagcagcatgtacgccgacgccgggttcgccttcgccttcgccgccgcctactcccccaccctcacttcctcgcagccccagccgccgccgccgccgttcgactacgccttctcctccgagccacccctcctctccatgcccgccatggaccacgacgcctacctggggaacttggtacagccatccatggtatcagaatatgacctgggaggagaaggggacctgttcaaagctccagaagccatcatcgaggaaccgctgctcagcctcgatcctgtcgcagctgccttttcaatgatggctggcaatggaagtgctgtcatggatcaaactattaaggacgcaggcaccggcaccatccaaaatgaccccctcctgagtgaggtgctgtacgagtgcgagaaggaactcatggagaagtccacaatcgaagagacaatttctgaacttatggatgttaagattcctatgctgcaagttgaagaaatcccaagccaagctgaacaggttcttatacagaaccagcagctcccggccatggagaaagagaagcaatccgttcctgaatgctcgctccaaaaaagtgttagttctggatgcctcaactcagcagattggatgaatggacctgccaggccaaactttctagacttccaggggctggactttgaggcagcatttgggctgaggagagcttacagcgaaggagacattcagaaccttggagccaacacgcctcgaccagcagcaaatgtttgtgtgaccatcagtgacctcaagaccgaagaaaggaagcaaaagctttccaggtataggaagaagaagatcaagcggaactttggcaggaagatcaagtacgcgtgcaggaaggctctggcagacagccagccaagagtgcgagggagatttgccaagatcgaagaatgcgacctgctgaagccaagcaagtagatccaagtatgcttggttttggcttctagctaggcgccgctccatcgtccttaccttgtgcgctggagaggcgccgcgatgcccgtcggaattcattcaattgacctctcctgtttctctcgggcagcatgctgtgtaataataatctcctccgggcccttgggtgcgagtgaagagctgaaaatttggtatggtagtctagcccccctgtactgtacaaaaggcttgaagatggtaataaaactcagctcccctcttgcttgcttggt

SEQ ID NO: 26708 - DNA, 1274 bp, Zea mays
  Clone ID: LIB4571-011-A2_FLI
ggccggtccacctgcaaccgtgacggttcttgttcttcttcccacccagccgcgctccctcttcctcttccccttctctctcggcgacgactgggtggccgtagctgcctccatacgcctggtgccctggtcttcttcgggccattcgccggccgcgagcaccaccaagtacgcccacctcatgaagggagagcttcccaggtagagaaacagtttctccgtactctagcagatggcaaggataaagcctaagcaattgctaatccaaagcaaaacaaagaaggctccatctcgaatcagctactctactatcatcacatggaacttgattgtcatattggttgtgctatctctctatgctacctacagccattggcatcaaaggtctacccaagacttcgaaatggagcttcatgaagctgagcttgctgtgagaccggaggatccaaaaatgataagtagaccaagatatgcggtaatgaacaccgcaaaaggcccaattactatagaaatatacaaagatgcttctgctgacgttgtggatagatttatcaacttgtgcaagagtaatcatttcaaaggaatgccatttcggcatatcataaaaaattttgtaattcaaggaggtgattttgatttcgatggagcttcccaagaatggataaccaaagctaaagctagtggaaaaaatgatctcagtccaaaacatgaggcatttatgattgggactgcaaagaatcctaataacaaaggatttgatttgtttatcacgacggctccaattcctgacttgaatgacaagcttgttgtatttgggcgagttatcaagggagaggacgtcgttcaggagattgaagaagtcgacactgatgagcattaccagccaaaggccgccataggcatcatcgatatcgtgctaaaacaggagccttgagcctggatgcacatgatgacgttaaccacatgccgacggacttttctgtagttggaaaatctatctcatcgagttggtttttgttctggtgccttattatgtgttgttgcgtgggaagcagttgtgacgcttgttccaggagtcgttgcagcagcgtttgtgtataaaatatattcacagggtttttggctgtcagcatgcgcgagcatatgctgctacaccttgtatcgtggttgtggtaacagtaagcaggctattctctgctattgctaccagtaatcggtttgggccttacgatttgcgaatgaatccaataaaatcagcgcacgtgcttctggtg

SEQ ID NO: 26709 - DNA, 1913 bp, Zea mays
  Clone ID: LIB4571-011-F1_FLI
gccggccgggctatgcgacagtcacacagcttgtctccttcctcctctccaccccggccccttgatctcatctcttccatcctagcttgctcgccgctgccagtctctcctccacctgcaactcccatgtctcagtcttctcctctcttctccgtcgcccgagcgcacgccggagcaggagggcgagccgtggcagccgctctcctgctccgtcgtcgccccattgcacagctgccgcacagcatccatggcctacggtgtctctctccagccagagcgacaccttccaagacgctcctcagcctcccccgcgccacgctgtcctccttcgccgaccccgacggcgacggcggctccagcgcgaaagccagcgacggcggcgccaaggccggcgccggcggggaggagcaggtcggggaatgcgagatgtcggagatggccagggcgttccacatctcgccacgggtggcgacgtccatctccgtgacgatcgcgttcgccgccctcaccgtgccgctggcgatgcgctcgctggtctgccacgggaccttcaggatgaacgcgctggcgtacttcacgctcctgtcggggttctacatggcgtggaacatcggggcgaacgatgtcgcgaacgccatggggacgtcggttgggtccggagctctgacgctccggcaggcggtgctgaccgccgcggtgctcgagttctccggcgcattcctcatggggacccatgtcaccagcaccatgcagaagggaatcctggttgcgtctgcgttccaagggaaggactctctgctcttcgctggactcatatcctcccttgctgctgccggtacatggctgcaggttgcttcgtcatatggctggcctgtctcaactacacattgtatcgttggggccatggttggtttcgggctggtgtatggaggggtggatgcagttttctggagttctttggctagagtatcttcatcctgggtcatctctcctttgatgggtgcagctgtctcttttcttgtttacaagtgcatacgcaggtttgtatacagcgcaccaaatccaggccaggctgcagctgctgctgcaccaatcgcagtcttcaccggtgtcactgcaatctcgtttgctgcttttcctctcagcaaggtgttctccattgccatcctgcaagcagtgtccagtggggcaataggagccatcattgtctcccgagtgatccaaaagcagctaggtgacttgctgtcttcagaagcagagaagatcgcgtctgctgagaagtcaagtgcccagcaggctggatttctctcggacattgctggccctacgggagctcagctgcagatcgtgtacggtgtgtttggttacatgcaggtcttatcggcatgcttcatgtcatttgctcacggagggaacgacgtctccaatgccatagggcccctggctgcagctttgtccatccttcaaggtgtggcaagcagcgctgagatagtcatacccactgaagttcttgcttggggtggttttgggattgttgcagggctcacaatgtggggatacagggtgatagcaacaattggcaagaagatcacagaactaacacctaccaggggctttgccgcagagtttgcagcagcttcagtagtcttgttcgcatcaaagctcgggttgcctatatctgccacgcatacacttgttggtgcggtgatgggtgtcgggtttgcaagagggctcaatagagtcagggcagagacagttcgcgaaattgtggcgtcctggttggtcacaattccagttggtgctgtcctatctatcttctacacattgatcttaaccaaaattctggcgtacttcatgtgagtggattgtaaaataaaagggctgcttttaagtggtacagcccattgtcactt

SEQ ID NO: 26710 - DNA, 1010 bp, Zea mays
  Clone ID: LIB4571-011-F3_FLI
ctcgaggccggccgggacaacagcaggccaccgctgctataaaaccctccgcctccaccggcggctcgccaaactccgtttcgaattctagggttttgctgctctccgaccccgagctccgaaggccgcagcatcaggcgaggcccccctcgcgtgtgaccgagatggcgctgccgaatcaggggaccgttgattaccccagcttcaagctcgtcatcgtcggcgatggtggaactggtaaaactacatttgtgaagaggcatctcactggagagtttgagaagaaatatgaaccaaccattggtgtggaagttcatccgttggatttcaccactaactgtggtaagatcaggttctactgctgggataccgcagggcaagagaagtttggtggcctcagggatggatactatatccatggccagtgtgcgatcatcatgtttgatgtaacctcaaggcttacttacaagaatgttcctacgtggcatagggatctgtgcagggtctgtgaaaacatccccattgtcctctgcggtaataaggttgatgtgaagaacaggcaggtcaaagccaagcaggttactttccacaggaagaagaatctgcagtactatgaaatttctgccaagagcaactacaactttgagaaacctttcctgtaccttgcaaggaagctggctggtgatccgaaccttcactttgttgaagctgttgctcttaagcctccggaagttaccatcgacatggctatgcagcagcagcatgaagccgagcttgctgcagcagctgcacaacctcttcctgatgacgatgatgatctgattgagtagaaaggatcatgagtcttggacttgagcaggagttgtgccttgcacgatttaagttgttctagggtggactctctcttgagttatcattgtctggatcatctttttctccttggacttgttgcaacttttgagtgtggaaatggattggaatagtcgccatgaatttgctggctactttgt

SEQ ID NO: 26711 - DNA, 1894 bp, Zea mays
  Clone ID: LIB4571-012-F1_FLI
atttccatcccaccccggtcggctagtcccaaggctgctgccgccgcctgccgctaggggatcgcttgctttcctcggaccactctgccgaccacatctacaccgcatcaacggtccttccaagtgagctccaatcccctgtctgtagatggagagggtgctcaaggatgacgccgtcgaggagaagggcgagcgcgccaggatggcatcgtttgttggggccatggcaatctcggatttggtgaagaccacattgggcccaaaaggaatggacaagatcctgcaatcaactggcagaggacgtaatgttactgttacaaatgatggggctaccattttgaagtcacttcacattgacaatcctgctgcaaaggtccttgttgacatctcaaaagttcaagatgatgaagttggtgatgggacaacttctgttgttgttctagctggagaacttttgaaggaggctgagaagttaattaacatgaaaattcatccgatgactattattgcaggttacagaatggctctcgagtgtgccagagattctttgctaaaaaagaccatggacaacaaagaaaatacagataaattcagatctgatctcatgaatattgctatgactactcttagttcaaaaatactttcccaagacaaggagtacttcgctgaacttgcggttgatgctgtcttgaggcttaagggtagcaccaacttggaatctattcaaattctgaagaaacctggaggatctcttaaggattcctttttggacgaagggttcattcttgacaagaaaattggcattgggcagcccaagcgcattgagaatgccaaaattttggttgcaaacactgctatggacacagataaagttaagatatatggagcacgggtccgggtggattcaatgtctaaggttgcagatattgaagctgctgagaagcagaaaatgagagagaaagtccaaaagatcatagcacacgggatcaactgttttgtcaacaggcagttaatctataacttccctgaggaactctttgctgacgctggcatacttgcaattgagcatgctgactttgaaggcattgaacggttagctcttgttactggtggtgagatcgcatcaacttttgataatccagagtctgttaagcttgggcaatgcaaggtcattgaagagattatgattggggaggacaggctaatccatttctctggggttgcgatggggcaggcttgcaccattgtcctaaggggggctagtgagcatgtgctcgatgaggctgagaggtccttgcatgatgccttgtgcgtgttgtcccagacggtaaatgatacccgtgtcttgtttggaggcggatggcctgagatggtgatggccaaagaagtggttgaacttgcaaggaagacccctgggaagaaatcccatgctatcgatgctttctcacatgctctgcaagccatcccaacaatcatagctgacaatgctggtttggatagcgctgatttgatctctcagctacgagctgagcaccacaaagagaactccactgctggaattgatgtcatcacaggcactgttggggacatgcaaaagctagggattcaagagtcgttcaaggtgaagcaggccattcttctgtctgcaacagaggctgccgagatgatcctcagggtcgatgagatcataacctgtgccccgcgcagaagagaggataggatgtgatattacacgctgtttctcgatgtagcgggatgctcatcaccctagttttgaggggtattatggtttaggggcgctcaagttggtcagatttcgagtgtttttggcccctaagcgaccggtacttattatttggttgaaacaatcagccttaggtttgtgttctatatc

SEQ ID NO: 26712 - DNA, 1926 bp, Zea mays
  Clone ID: LIB4572-001-D3_FLI
ttcccttccttcgcctccgcttcctcctcctcctcctcctgcccctcccccacccccacccgtcgggacgcctccccactttcccctcccccggatccgcatggcgcctctgcagcccgcgccgctcggcctcccgtagccgacgcccggccccgtcccaccgcccgctgcgccgagcgctgcccgtcccaggctcatatttgcacagagtcattggaggaagtttgatgtttcagcagtactgtgacctttattagatgtctttccgcagcattgtgcgtgatgtaagagatggctttgggagcttgtctcgaagagggtttgaggtgaagtttctgggccaccgccgaggcagatctcacggtgctgtccatgagctgcgtgatccagccccagtgatccagagcagttgctgggctaatttgccccctgaattgcttcgagatgtgattgagaggttggaggccagtgaagccacatggcctaacaggaagagtgtagtctcttgtgcagctgtttgtcggacctggagagaaatctgcaaagagatcgttaagaatccagagttctctggaaaaatcacttttcctgtgtccttaaagcagcctgggcctcgagatgtaaccatccagtgcttcatcaaaagggataaatctactcaaacctactacttgtatctgtgccttagcacagctgtgcttgttgaaagtggcaagttcctcctatgtgcgaaacggacctcccgcccaacctgtacagaatatacaatatttatgaattctgaaaatttatctaggtcaagcaaaatgtacattggaaagctgaggtcgaatctcctcggcacaaagtttgcaatatatgatacccagcccccatgcaatgcagcagaacccgggaaaacaagccgtcggttctactcccggaaggtgtcgccaaaggtctcctccagcacctacaacatagcgcaggtttcacatgagctgaatgtcttgggtactcggggccctaggcggatgaactgtgttatgcactccatccctacctcgtgccttgaggctggtggcagtgttcccagccagctggacagcatccttgctcgctccactgatgagtcatttggcagcatttccttctccaaatcatctgttgtggaccggtctatgcgtttcagcagctcaagattctccgacatctcaatgagcagcagccgcaggattggagacacggcatcgggagacaatgatgagtgcaaggagaggccattgattctccggaacaaggccccaaggtggcacgagcagctgcagtgctggtgcctcaatttcaggggcagagtgacagtcgcatctgtcaagaacttccagctcgttgctgccacgcagcccgctgctggagcaccaaccccatcacaggctaccccagtgccgccgccggagcacgaaaaggtgatcctgcaatttgggaaggtggctaaggacatgttcaccatggactaccgttacccactgtcagccttccaggccttcgcgatctgcctgagcagcttcgacaccaagctggcctgcgaatgaagccaccagtcatggctcaaagtcaaggacgatctgtctgtttcacgaagacggtggccccaaattttgctgggccaccattctgttgtatgttgttgatgccttcttaacttacctaggaagctgcgtttagacattttgcacctgatctacagctgctgctgtgtttctgtcctgatcgcattgttttccatagctttgctctgtggagcggcaacttgatctgccctgcccttaactagccggcaggtttattaatttggttttccatactatggttgtattaactgagaagagactccgacactttcgttgtgcctacctaagagctctgtctgcctttgccctctgggat

SEQ ID NO: 26713 - DNA, 1289 bp, Zea mays
  Clone ID: LIB4572-002-B3_FLI
ctcgaggccggccggggtccttgcacagggctccgaacacgcgtttccatggctctcctccgactccaagagcagtgctcgctcctccgaatctccagctcccaccacccaaaccccatcgatatcccaagaaatcctcgcaagaaccaacttttagtgcccaatgcggccaagattgccaacgcctccgaaattccggttcctcgcgtccccactagcacttccaaggccgcaatcctggcccggaaggccgcgctttggcgggacgcccttgtccccgttgccgccgccttcgcgtcctgtccgctcccttccctcgcggcggagggcgacgggaaagtgagcctcgagtccatcgtggtggcaatcgacgacttcaacaatcgcaaccctttcttcgtggctggggtcgtgttcgtgtggctagtggtgatcccgctcctgcaggagtacgtcttcaagaagtacaagcccgtgagcgccatcgacgcgttccgcaagcttcgcgacgtgccggaggtgcagctgctggacatcaggcggggcaagagcgtgcggttcatggcgccaccgaagctgaagcttatcgacaagagcaccgtgcaggtcgagttcgacgaggaggacgagagggggtttgtcaaggaggtgctagcgaggttcccagacccggcgaacaccgtcgtctgcgtccttgacaactttgatggtaattcttcgaaagttgctgagctactagttgagaatggttttaaggaagcctatgcaattaaagggggcttgagaggtccggaagggtggcaggcggttcaagaaaactatcttcccccatctgtccatgttttcccgaagaaaaaaaggggcgcgaaattagctcacacagatgcaagcaatgatggaacatacgttcagcaggagggaagcgaggaatcatcggctcctccaagcagtaccctgacttgaagccttcatcatccccaacaccatcaaaaccgacgaattaagagcaatgcaggacaataacatgtgtggaactcaaaaggtcagaagtagttgtctcctgcacaaacatttttgtatacttccaaccgtggatgtccaggagattgactgggatggcatggaagaggaccagcagtggtgtttggagctcttgctgctgttgaggccatggtgaattcttagttgtgtaatttgcgaagcttgtacccgtatgttgtactattaagtgggggcgaaatgacattttgtacctgacttgatacagtttggggtgccttagcgttccc

SEQ ID NO: 26714 - DNA, 1492 bp, Zea mays
  Clone ID: LIB4572-002-D9_FLI
gccggccgggattatgatttaagtaggacagtcagtttaatcctaaggcattcagattctttgggaagttgggaggttaaacaggatgagctttcgtgttctgactgtgacgcactgatgtttcttattcatactccaggattcagacttttaattgagatcctttcaaccgtgtagtccacattaatttgtatggcttgtaaggcatcattgttctagcgtacatgtttttaactcattgggtcaatttttttgtaactttagcccattgtttgtgacctggaagaaggctgccaatggttcagaaccacgcctccggggatgcataggaactctggagtcccgtcagattgtcagcggctttagggactacgccctaactaggtgactattgtttcagtattgaaattatgtctgatccaatgctgaaatatctggtcggtactcaaaatgttgatgggcttatgctgtaataagtagaaaagcaatcgtgcactttgtattggataatgtttagatatacggtaatcttgatatcctcttgcagtgcgctgagggaccgacgctttcccccaatacaatcaaaggaactcccaaccttggagtgcacggtatctatactcactgattatgaaattgcagaggactacctcgactgggaggttggaaagcatggtttaattattgaatttacagctccagactccaacacaaaacacagtgcgacctatttgcctgaagttgcgggccatgaaggtgaaaatttcctttttcatcgatgcgatgtacacttatcgtttctacagagttctttagtttctagaattattgcaggggataataagaagaaatgagttaagaaaatatgtaatttcatctttctaaatcatcatggaccaaatgcattataatgagcaataacggtaaaataaagagtcaactgatcagtacattccaaatctgtattgaatagtttgtaacttaggcttaatcttttggcaggttggacacatgtagaaactattgattcactcgtgaggaaggcaggttaccagagaatcatcactgagtccttgaggaagaaaatcaaagtcactcgctaccagagcaccctgtacacgatgcactatggtgaatatgttgcgtacctcaagaagaacagaggtgcagccccgtcaattagtggggctcctcctgtagttaatggcttcaagccaagccattgatttatcagtataaaaaaaagctcaaagaacatattactataatttatctgcgagcaatttggggggtgtagtgtaaccaccccccacagttcattgatctagcatcattcccttccaaggaaaaggccaaataggggcgtcatgacaagcgcccagaataataatgccttcctggatggatcatggatgatgcttatgtatcttgaaaacacatgtgcttcaagaagttcaaattgtgtggtgaagttaattgattcgagttggcc

SEQ ID NO: 26715 - DNA, 821 bp, Zea mays
  Clone ID: LIB4572-002-G4_FLI
gttcgcgcgaccagaccaactcactaaacatcatgggcctcgaactgtccgtctcggaaagggctctcagccatgggaagcccaacgagaactcgggcctaatccgctcacgcaccattctccgtcttcacgaacgaatcacggggtgccacaactccctgccgatccagtcccccggcaaattcccaaccgccgcacggcaacaccagcggtcggatcgggggagaaacggaagggcaacagcagagcgcgaattccaccgacaaatccaagatttcgagcacagacacaggcgaaactcgatggcggaggggtccaagccggacgtgccgctgttccagctcctcagcgatcttctccagcaggtggagtcaatgagcaatcaggaagaagtagagctgcgcgctaagattgaagcattaggattagaagtcactaaggtaccagagcagcccgctaatcatctcagcgagctagaaatagctgcagagttggacaagctgtcatcgcggcttgataatgtcgacaagatgatatcatctgccatggcctcagatccagaggtgaagtctcttctgagcagcacatctgatatctggatgccggtcataacagcgtctgccaatgagaggcgggggtttgttgggacgagcagcgaaggcagccagaaagagcaggagaattccaagaaatagctggtatatgggctgttaatagtttcgttttgtgggtctgtaccgaccttatctatgttcattcaaactagtgtttccatgccaaaaagtttgtggcgtaataaacaataaaaacccatgtccttc

SEQ ID NO: 26716 - DNA, 1429 bp, Zea mays
  Clone ID: LIB4572-006-G9_FLI
cgccgggaaaaaaaaaaaaaaaaaaaggtacggagctaatagcaccgagcgggctggcggcttgaccgcctcttcgattcactcgcatctcgctcctcgtcggcagtagtttttagcgatcccttgttccgttgccgcaccgatggctccgtgcggcgcttgctgcgaactgcctgctgttgagttgccgaaggccgaaacagaacatggattgcatctcccgtgtccctcggtgggtgcaatgtatgccccaagttgctggtgatgagctctttagactccggatcaaatggcctgactggctatgtgactttgatgtcgctcatggaggagcttatcagtctggaaatgaaggcattccatgtgagggcatcagctcgggttgacaaattctcaaagagtgacatcatcgtgtccccttcgattctgtctgcaaactttgcgaagcttggtgatcaggtaaaagctgtggaggtggcaggatgcgactggattcatgtcgatgtcatggacgggcgctttgtgccaaacatcacaattggacccttggttgttgatgctctgcgtccagtgactgatcttccgttggatgtacatctgatgattgtggaacctgagcagcgagtccccgattttatcaaggcaggtgctgatattgttagtgtccactgtgaacagacatcgaccatccatttgcaccgaacagtcaatcagattaaaagtctaggagcaaaggcaggagttgttttgaatccagcgactccactcactgcaattgattatgttcttgatgttgttgacctggtgctgattatgtctgtgaatcctgggtttggtggccagagctttatcgagagtcaagtaaagaaaattgcagaactgagaaggttatgtgcagagaagggagtgaacccctggattgaggttgatggtggtgttggtccgaaaaatgcctacaaggttattgaagctggcgcaaatgccattgtcgcaggttctgcagtttttggggctccagactacgctgaagctatcaaaggaataaagaccagccaaagacctctagctgtagccgcataaggagctggacgtgtaatcatttactctgtgcaagtttaccagtgatgcaatctgtatagatgtgtgtcttgtccagccatacgtataccggagatgaaaggagacggaggcagtgaagaaatatccttttttttcttctcatttttcacgaggatgcggtgcactgctcccagaatgctgtgtccaatttacaaacgcacaggtggcacatgaactagcagagtagctttatcttgaaaggaaactgtatttggggtcgatgaaccctctggtgttattcttcagactggtaaacgatgtaacatgtttgataatcaataaagtgcgtcgtatggctttcctaaaaaag

SEQ ID NO: 26717 - DNA, 1520 bp, Zea mays
  Clone ID: LIB4572-007-E1_FLI
atcctagcaaacgtccttatccggctacaactttcgcgacgtctgcgacatcagaaaactgagctcgccccctcttgccttccctcctccgccggaccgctgctgtccgcctccaaccctccagttcgacgcaggcggcgacggcggcgcgccgagatgaaggtctccgtgaagacgctcaagggatctagcttccagatcgaagtggagcccaccgacaaggttgttgctgtgaaaaaggtcatagagaatatgcaagagcaggcttcctatccagctgaccaacaagtccttatacatcaaggaaaggtgctcagcgatgacaccacattagaggaaaatcaagtgactgagaataatttccttgttataatgctcagacagaacaagggatcatcaagtgcagcaccggctaagacaactgcgaatcaggcacctcctactcagacagtgcctgttgttccacctcaaacgtcagcagccccagctgcaccagcacctattgtacctgtcagtgcactggctgcaactgctacagcctcagcagctcctgctgttgctgtatccaccgaggcagatagttatggtcaggctgcctcaaacctagttgctggcagcaacttggaaggaacaattcaatccattcttgaaatgggtggcggaatatgggacagagacactgtactacgtgccctgcgggttgcgtataacaacccagagcgcgctgttgagtacttatattctgggattcctgaacaaatggatgttcctacatcacctccgagtatccagccagccaatcctgtccaggctgcacaagcagctcaaactgcagctccatctggaccaaatgctaaccctctagacctctttccccaatctcttccgaatgcttccgccaatgctggcacaggaaaccttgatgttttgcgcaataacgtacaattccaaaacctgcttggtttggtgcaggctaatcctcagattttgcagccattgctgcaagaattgggtaaacaaaatccccaggttatgcagctaatccaggaaaaccaagcagagttcatgcggatgatcaatgaaccacttgagggagacgaagagaatgaaatgatgctggaccagatggcggatgcagctgagaccattgcagtgactccagaggagaacgaagctatacttcgtcttgaagggatgggctttgaccgggcactggtcctggaagtgttcttcgcgtgcaacaagaatgagcagctgaccgccaactacctcttggatcacatgcacgagttcgacaacgatgacgggctcggagggccaccgctatgagggcgctctcgatccctacatcatgcgaacgaaggctgtagggcagtagtaggaaaacgttttgggattcgtcccgtctgttcgctcactctacatattcgtttggctttgctgtttagtacagaatttctagatttacagacttactacttgatatcctgatatagaggtcacggccaagcttacttttt

SEQ ID NO: 26718 - DNA, 1207 bp, Zea mays
  Clone ID: LIB4572-007-E9_FLI
ccgggactttgctcggctgacaccaggtagccgcccctcctctatccaccccttcacttgcttggtcttccactcacccctctctcgttattcacccggtctcctctcctgcaaagagtattcttgggttcatggctgtctgcagattgtcgcccttgctctgcctgctctattcggcctcagttcattctgtcgtaaacctcacctcgtaactgaaataagccatatgcgccgcgcgtcgaagcttagtgtctgatcgatacgctatccctacaattttctgagctgttgaactcctgcgcccgtctcctcgtcgaggacaggaagatgagctcgctacacgccacacgagcggagcttggcctggttgtcctgtacctgaacaaagccgaggcccgggacaagatctgcagggcgatccagtacggctccaagttcgtaagcaacgggcagcctggcactgcgcaggaggtcgacagatcgaccaccttggctcgcaaagtcttccggctcctcaagtgggtcaatgatctgcatgctcttatcagcccgccggccaaagggactccgctcaccctcgttctgcttggcaaatccaaaaacgcgctgctttcgacgttcttgttcttggatcagtttgtgtggctcggacgaacggggatcgtcaagaacaaggaggcgacggaccgcgttgccaggttatccctgtactgctggatggcttcttctgcctgtgcaggtctagttgagcttggagagcttaaaaggctatcgagatcgatgaggaagcttgcaagagagctgagggacacagataaatatgagaacgagcagtaccaggacaaaatgaggcagtcagatgaacggctcctggccctggtcaaggcggccatggacgtggtcgtggccgtcgggcttcttcagctggcgcccaagaaggtcactccgagagtgacaggagcctttgggttcgtcacctcgcttatctcctgctatcagcaacttccttcccgcgctcctgttgccaaagtcaaagtttgagaggtgtcgccgtcctagtaaaaaaaaagaggcgacgctggaaatcgatctctgcttcaacaatggatcgtaatataattttattatgcgaatataaggcaggctagctatgtattttttttattaaaaaaatagtacaacaaaatagaacaccagtgattgcacg

SEQ ID NO: 26719 - DNA, 1842 bp, Zea mays
  Clone ID: LIB4572-008-A6_FLI
atcgaacttcgaagccaagattgccaagtcatttcccccaaattcctttccccttcgatcctcccctgcaaaccaagtctcaacgaccatggacgtctccccctgaccgcgccccactgccccagacgccgtcgcctacatccatgagacttcccgatcttcctgcggccgaggatgtcccagcgcgacgtcgactacagttgcggattctgtggataccctctaaacctttcatcttctaaccgaagcacgtctgaagtaggctcctcatataagaagtctctgaagaagggattgatttcattcatttctgttgatctaagccgatttactcaggtggacaaggtatcttgctttcccctcacctggcgcagttacaggccaaaaactaagcttctctgccgaaaatgcggagcatcgatcggctatggatacggtgagccagctgctttgtgcagttttgatccagcaagttcatcttcctccagtacatcccagaagtatttaataaagatccaagcactccaaccttcagacgggacccagtaagtcagatatggaaagagagacaatagatgccagcttacagaactccatcagttacctatctgacgactgcttgctttctatatttaacatgctagaaagcgagtcagagaggagtgcttttggtttgacctgcaagaattggttcaaggttcggaaccttggtcggaaatcactaacattccattgttgttttaaccctgcaatagacaaggagcatgccaagtgcatccctaaggtactggctcactcaccttggcttaaccggatatcccttgctgggctcacagagctacctgactcagctctgagcacgctgagaatgtctggatcgtctctaaaatccctttcattctactgctgttctggtataacagacgatggcctagcacaggtggcaattgggtgccctaatttggtggtggtggaactccaaagctgctttaaaattacagatgttggcttggaaagcctttcaaaaggctggcgtgcccgtgctttgaagagtctaaaaccttggttcttgcatgggcatttcggaccaagggatctctggagtctttagcaactgttcaatcatttgcacactaagcattacaggttgcaggcgtctgtctggtgctggattcaaaggctgttcgagttcgttttgttgccttgaagctgagtcttgcatgctttctccagatggtttattggtaaccttgcttttgctaaaagcctctgcgttctgaatctcaggatgtgtcgctacctcacagatgattagcaatagccagtgggtgcccactgcttgaggagtggaaccttgctgtttgccatggtgtccatttacctggctggtctgcaatcgggttgtactgcaataagctaagagtgctgcatatgaaccgcggccggcacatctgtgaccagagtttgctggccctcggcaatggctgtctgtgccttgaggttctgcattaaatggttgcgtcaagatcaccaacaatggcctggctgatgaagtcatatccattggcccttccattgagaacttgttccggctgcattgaggagaaactgtagttaggttttctaagcctggggctaaaagtttagtagccccgtcccattacagctgattatgtgcattgtgtttgctctagtgtatacataacaagacccaccctactcatgtgggaaacatgggcactgggccagccctttaacaatagtgaatcgtaatatacaaatgaactgagcttatgtaaggtgtatttttttcctaatatgctctggcttgctctggtttac

SEQ ID NO: 26720 - DNA, 1587 bp, Zea mays
  Clone ID: LIB4572-008-C9_FLI
aaaaagtgtactactggattctcacaccgcagcatccgttcacgtgtcttcaccccgagtgctgtctctctccttcctctctgctacggctgggtgaggcggggggctactgccgccgcctaacgccaggttccgaggccttcgtcggtctatttgccggcgatgaacatccaccagggatggttgcaacaatttgggcatagcgttggtatcagtggttcgaagatggttctccatatgacccacaatgtattcagttttcgatgctttgctgccaatgggcgtggcttcagtgcggattctaccaataagagaaaaattaaaagcaagaagaggcgaaaggatgttgcactggaatcaagtgaggtaatatctggaaatccaaggaacagggaccaatgggtgccagaattaagaactgaaagtgaaaacaaatctggtaaaaaagtcatggataagaaatttttggaaaaagtggaagcggttcgaaggtctgctcttgagaaaaagaaagctgaagagaacaaagattatcaagctattgattatgatgctccaattgagtcagataaaagtactattggctttggtactagggttggaattggtgttgcagttgttatatttggactagtcttcgcttttggggatttcctgccttatggaagtgttagccctagcaaagaaagtgcagtagttaaacaaaagctttctcaagaggaagaagaaaaatttaagaatgcactgcaaggctttcaagcaacgctgagtaagtcgcctaatgatcctactgctcttgagggtgcagcagtatcgttgtccgaactaggtgagtatgagaaggcatcaacattccttgagaagctaattaaggtaatccctgataaagcagaagcataccgtttgcttggtgaagtaaagtttgaactcaaggattatgaagggagttcatcatcatacagaagtgctttatcttcatcagataatattgattttgaagttctccgtggactgacaaattcattacttgctgctaagaagccagatgaggcagttgatataattctgttatgccgtcgaaagttgaatgaaaagagtcaaacaggactagcagatttggaggctacaaacgacaatggtcgccaaaagcctcaagatattgacccgatccaagttgacctgcttttagggaaggcttattccgattggggtcatatcagtgatgctatttctgtctacgataagctaataactgatcatcctgaagacttccgtggttatttagcaaagggaatcatattaaaggaaaatggtaaagcaggtgatgcagaaagaatgtttattcaggcaaaattcttcgcctcggaggcagcgaaggcactagttgatcgctatgcgcaaagatagtcgataagagattgaatggtgttgttttaaaccaatgagatcattcggattccagaaaaacgatcaacatgtttggaacgtcttgtatgatagcaacattatgggatctgggacattttgaattgtattgttttagaacaggcctgacgcagtatcgaaaaaagccttcccactgagact

SEQ ID NO: 26721 - DNA, 1386 bp, Zea mays
  Clone ID: LIB4572-009-D5_FLI
ggcttgccggggcacgcacgcaatggccatggccgccccgccacccacggctctctgcgcccgccgcttccggccccaccacttcgcatactcctcccccgccacgctccgcctacccacggcctcctcctcctcacagctccggcgccgccgccggctagccgtctccccgcgcgcggacgcggcgaccgggacgggggatgtggaggcgctcagggccggggtgtccgtgtacaagccgcggtcctacgacgtgctcgtcaccgacgcggctcgctccctcgcctgcgccatcgacgacggcaagacccggctcgagatcgaattcccgcctctgccaagcagcatctcttcttacaagggctcctcagatgagttcatcgatgccaacatccagtttgctctcgttgttgctaggaagctcaaagagctcaaggggactaggtcttgtatagtgtttcctgatcaacctgaaaaacgtagggcatcagagttgttcaagacagctatagacacgattgagggtgtaaccatcagctccctggatgatgtacccactgaccctgtcaacagcttcttcaaatcaataagaaacaccctggattttgacttctcagatgacaatgaaggtagatggaaatctgatgaaccaccatcgttatatatcttcatcaacagcagcacgcgtgaccttgcttctatagagaagtatgtggaaaagttcgccacatctgttccagcccttctattcaatctcgaactagatacattgcgttctgacctggggcttctcgggttccccccaaaagatctgcactaccggttcctttctcaattcaccccagtattttatatcagacagcgtgactattccaaaacaatcgcagttgctccatacatagtgaattatagtggagctgtattccgccaatacccagccccctggcaggtcatgctgaagcaggctgatggttcctatgcatgtgtcgctgagagcgaagctcggttcactttgggacaggcgaaagaagaactattgagagttattggtttacaagaagaagagggaagctcccttgaatttctcagaagaggatacaagaatgctacctggtgggaagagaacgttgatcaggagacgtcgtctgcctggcgaacttgagatgctatacttgctggatggatgcttttctaacctggaactgggaatggataatttggccaacgagtgtccatgtcttgttgtatggaactaaaaaatctgaaattacagaaagagaagtccatgtacagcgtaataacattgcctgtgatgatcgtattattattattgttgttattattatgcgagtacacagagcttgtgagcactaagaatgttttttt

SEQ ID NO: 26722 - DNA, 1781 bp, Zea mays
  Clone ID: LIB4572-009-E7_FLI
tgatgtcatagctatcacaattcactcctttcttcttctcctgcatcaggatcatcatcaggttctccgttccactccatggccttccctgctgtgcccctcctcgccgctctgctcctggtcgccgccacgcggctgtgggactacgtcttcgtgcgcctcgtatggcggccgtacgccatcaccaaggggttcagagagcaagggatccatggaccctcctacaggttcttcaagggctgcaacgaggagatcaggagcatgaaggagaagaccgacggtctcgtgctggacgtcggcgaccacaagtacctcccgcggatcgcgccgcactacctcgaatggagggctcagtacggagaaccatttctatattggtacggggcacaagcccgaatttgcatatttgactacgaactagcaaggcaaatcctttcgagcaagtctgggcatttcgtgaagaacgatgcgcaccctactttgttggctctggtcggcaagggactcgggttcatggaaggctctgactgggtgcgccatcgcagggtgatcaaccctgctttcaccattgacaagcttaagattgtgaccgagacgatgctggacttcgccgatagcatggcaggtgagttggaagctgaagcatcccagaacgagaacggagaaacacaagtggatatatacaaacatttcagcgatctgacagttgacaatatcgcctacgccatctttggaagcagctacaagttaggcaaacaagtgttcgaggcacaaactgagctgctggggatcaccatggctactttccttgacgtgcccataccaggatccaaataccttccaacccaagcgaatcggcgaaaatggatgctggagacgaagctcaagagcttactcacgcggatcatacagccacggttagcaagcggtgagcacggaaacgatctgctgggcgtgatgctggactcctgcactgagaccaagcaaggagggaagcagcagcaagtggatcgtctgcgtctcagcttgagcatggaggagatcatacacgagtgcaagctgttcttcttcgctggccacgagaacacagcccttctcctcacgtggtccgtgtatttgctcagcatataccccgagtggcaagaaaggctccggaaggaggtcttgagggagttcgggagggacgctcctaaccccaacgcgctcaacagattgaaagagatgacaatggtgttgttcgagaccttgaggctctactcgcctgctctcttcatgcaaaggaagaccctggccgacatgaccgtggggccaataaaactgcccaaaggcactgcaattgtgatacccattccgatcatgcatcgagacaagcaggcatggggcgacgacgcagacgagttcagtccgatgagatttgcgaatgggatcacgggagcagcgaaagttcctcacggcctgctggcgttctcgatggggccaaggtcttgcatcggccagaacttgtcgatgctggaagccaagtcgacgctggccctgatgctccgcaagttctccttcgctctctcccctgactacgtgcacgcgcccgtggatctcttcactctcaaacctaagtttggccttcccgtcattctgaggccactggataatgttttgatttgagttgggcatatagtacaacaggaagtaacttaggtacatatcaaatttgctagctggtcaaaacgttatatgatgttctcaaccctccgttgttctatatcgttgaaaacaagtattcc

SEQ ID NO: 26723 - DNA, 1204 bp, Zea mays
  Clone ID: LIB4572-011-D4_FLI
ctcgaggccggccgggaggcctacggtctcgcggtattgcgctcctcgtcttctctaatcctcttctgctccctccactaccagtccaccaccaccactgctaccatcggttccccaaaccctagccaagggacacggtggccagcgatggacggcgacagagaaggcgctgcggcggtgcaccaccacgcgcgctcccccgaggacgtcttccgcgatttccgcgcgcgccgcgccggcatcgtcaaggcactcaccacggatgtggagaagttctatcagcagtgcgatccagagaaagagaacttgtgcctttatggtttgccaaatgagacttgggaggttactcttccagctgaggaagtacctcctgagcttccagaaccagcactgggcataaactttgcccgtgatggaatggttgaaaaagactggttgtctctagttgcagttcatagtgatgcgtggctcctgtctgttgcattctactttggagctcgctttggatttgataaaaatgcaaggagaaggctcttcaccatgattaataacctgcccactgtttatgaagttgtgaccggggttgctaagaagcaatcaaaagcccccaacggcagcagcaaaagcagcaaatctaactctaaaccatcaaaacagatcaattctaacagtaagcctgtgaagccagcccacccaaacgaagaggaggatagcggccgtgaggacgcagaggaggaccaggcgtacctgtgtgggtcctgtggggaaagctatgcgaatggggagttctggatctgctgcgatatctgcgagaagtggttccatggcaagtgtgtccgcatcacccctgcaaaggcagagcacatcaagcagtacaagtgtcccagctgcagcaccaagcggagccgggaatgacaggcgccctggggcaggactcgctcccacttgacgaagcatttagaatcattaggagcagtgaaagtgtgaaactgtgtcattagaatcacttcttctgtttagtggaccagtgcgtgtgctggctgttgtatttttctcgtcgtgtgttgtacactggtagtaatggacatggtagctagtggtgacgtgttgtgttagcaagcaggctgactgttgtcatcgtagagtcggatgaactgctggagtttggaaacacatgttcagtaattcagtgatgtttagcgtg

SEQ ID NO: 26724 - DNA, 1642 bp, Zea mays
  Clone ID: LIB4572-012-B7_FLI
gggagcttcgactggctcgcagtggcaactggcaggtaggcacacgcgaagcgataaggtcggctaagccgcaacagtcgttgatgtcgccgccgccgccgtccctcgtggtgctcccgctcctcctccccctcttcctcgccgctgtatcccacgctacggctaatgcggccggtgccggcgcccctcccccagtgccgacgccgtggccggagcagttccacgcggtggtcttcaccaatctcaccgagagcggcggccggctgcagctgatcgacctgtactacgactggcccaggggccgcaacctcaacctcatccgggaccagctctccagcgacccgctctacgacgtcgagtggaccaacggcacctcctacttcttcgactccgggtcctgccgcaccatgcgtttccccgtggggatcctgccgcctgactggctcgccgccggcgccgtctatctcggccgcgagcacgtcgacggcttcgactgccacctgtggaccaaggtcgacttcgtctggtactacgaggaagtcgccaccggccgccccgtccgctggaatttcttcaatggtagtatacattcaatctatactttctttagactcatgatggagcatcgtggatttttggcgattcgcacccgtctcgggtgttttgatctaaccaatgcgtgcgattttgttctgcagtttgtagggatgcagtctaaatttctaggaacgcttcccagttttgtgcttttgatgcaacactataatggttaatggcgattctacaatttcggtgtgcgggacgggagtgctgtatgaattactctgaatagtttagctcacttctcctaatttttcttgcaataatagtcgtttgaaaaagaaaactaaaattcaggagcaaacctcactctttttttatcctgacacttggaactctgcttgtttttttttgcagtcttaacatttctgcatttctccagtatacaattacgcgattttcttgtgcacagatgcagtccggaattctccaattgctaagttcttagctggggaaatatctgtcctgctgcagtctcctttttctgaaacgcgaaaaatcttattccagtctcagtgtctgcagggtagaagcgctcggttgatgcaacagggtgattactgatgacctgtgtgttcttgtacctcagggatgcagcagcatgtgatgagctttgaggtgggaggagtgctggaagactccaagtggcaggcgcccgctcgctgcttcagtggcggcaatgccgacaccgccaaggcggctgcggatggagttcatggcgaggaagccggtagtgttgatgtgatggacagcatgatcaggttcgccggggctccggctgcagcagtagctgcatcatttgaccaacggtgatccacgcgtcctggtgattctgctacgctctgttgatcacattgtgctttgtataaccctggctgatttgtggtaacactgaaagtaactgtacatttactggaactggaaatttgatgagtcagtgtcgatcgtagctgctactattttcctggagaatgcaggctcggtactgatccactgaaccatggaacatgaggggcacaaatagacttgcatttttggttgt

SEQ ID NO: 26725 - DNA, 1569 bp, Zea mays
  Clone ID: LIB4573-001-E9_FLI
ccgggacccgaagcacatcccgtcgcatcccatccactaccacccatctcgtcgtccgccgattcgatccggttcctccaacccaggggcagtgatggcgacgaagaggagcgtgggcaccctcggcgaggcggatctgaaggggaagaaggtgttcgtgcgcgccgacctcaacgtcccgctcgacgatgcccagaagatcaccgacgacacccgcatccgcgcctccgtccccaccatcaagttcctcctcgagaagggcgccaaggtcatcctcgccagccacctgggtcgtccaaaaggtgtcaccccaaagtacagcttgaagcctcttgttccacgcttgtctgagctccttggagttgaagtcgtgatggccaatgattgcattggtgaagaagttgagaagttggctgccgctttgccagaaggtggagttctgctcctagagaatgttagattctacaaggaggaagagaagaacgaacctgagtttgctaagaagctagcatctgttgctgacctttatgtcaatgatgcttttggcacggcacacagagctcatgcttcaaccgaaggagttaccaagtatttgaagcctgctgttgccggcttcctcatgcagaaggaacttgactaccttgttggagctgttgccaacccaaagaagccatttgccgctattgttggtggatccaaggtctcaagtaagattggtgtcattgagtccttgctggcgaaggtcgatatcctcatccttggtggtggtatgatctacacattttacaaggcacaaggatattctgttggaaaatctctcgtggaagaggataaacttgagctcgcaacttctcttattgagaaggcgaaggcaaagggggtttctcttttgcttcccactgatattgtagtagcggacaagtttgcagctgatgctgagagcaagattgtccctgccactgctatccctgatgactggatgggtcttgatgttggccctgatgccaccaaaacattcaacgaagcattggacaccaccaagactgttatttggaacggccccatgggagtgtttgagttcgagaagtttgcagctggcactgaggcgatgccaagaagctagctgagcttacaaccacgaagggtgtcactaccatcatcggcggcggcgactctgttgctgctgtcgagaaggctgggctggccgacaagatgagccacatttcgaccggcggcggtgcgagcttggaactcttggaaggcaagactctacctggtgtccttgccctcgatgacgcctagatccgctgctgctgctgctactcaggttctgccagctttgcgtgtcatcttgtttcggaccttggtgtagcactgcaaggctaaggtttactcctccgcacatggacttttggggataggcttgccaccgtgttttgctagatgagtcgtggaataagcttttacttcctcgctgctgtgggtgaagtgactggaattcggaaatttggaactaacaaaaccccccgtggatttgtatgatatgttttgttcgacagtttgcgtccc

SEQ ID NO: 26726 - DNA, 1881 bp, Zea mays
  Clone ID: LIB4573-001-G6_FLI
attattattacatgtacttcttttggctaaaaaaagatgagattttgattaatccccgcgcatgttttttttttttgtttttcatctctgtttcttgctgtatttacgccgtaccatggcgctgatgaattggtttccatgtgattgtgccggctgtgggcgcagacgaaggctacgggcctacttgggacagcgacgacgaatacgacaacttcatacgcaagatgaacccgccaaggatcgtcatcgacaacgagtcctcggcggaggccacaattgtaagggtagatagcgcgaatgaatacgggatattgctggaagtgatccaggtcatgattgatctcaaccttgtcataggcaaggcatatataacctcggatggtggatggttcatggatgtcttcaatgtgaccgataaggaagggaagaagatcaaagatgaggcaaccctcacacagatcgaagactacatcagaaagtccttgggcgcagattcaagatacattccttcccgccggagatcggtagacgtcgccgccgcagctgaccacaacatcatcgaactgacagggacagacaggccaggactgctctctgaggtcagcgctgtgctcaccagcctcaagtgcaacgtggtcagcgccgagatctggacccacaacacccgagccgcggccgtgatgcgggtcactgacgaggacactgggctggcggtcacggacgccgagaggctggagaggatcagggagaagctgtcgtacctgttccgtggaggcaatctctctcgaggtgccacagtgtcgtcgaggactgccaccacgcacaccgagagaaggctgcaccagatgatgctcgacgatggcgactacgagcagctccagcggcaagctccaggacagtctcagaggcctaacgtcaccgtgaggaactggaacgacaaggactactcggtggtgaccatcagatgcaaggacaggtccaagcttctgttcgacacggtctgcactctgacggacttgcagtacgttgttttccacgcgaacatcgatgccaaggacaatcaggcttaccaggaattctatgtaaggcatgtgaatggatcgccaatgaacactgaaaccgagaggttgcgagtcatccaatgcctggaagcagccatcgaacggagggtatctgagggtgtgaagcttgagctgtgcaccaacgacaaggtcgggctgctatccgaggtcacccgcatcttccgcgagaacagcctgacggttacgagggcggaggtgaccacgcggggcaggatggccgtgaacacgttctacgtgcgcggctccgcgggagaggccgtcgaccagaaggcgatcgactccatcagggaggccataggccacagcctccaggtgaaaggacaggccgagccgccggagccgcagaagaaagagtcccctacgtggttcctcttcgccaacctgtttcgccccaggtcgctctacagcttcgggttcatgcgctgatcgcgccgccgtcctgtcctggccattgcttccaagaaccgccgtcgtgcagtaagttcaccaccgttcacacgaagcaatccaggacatggggggatctttttcagaaggtggagaagccttcgttgggccctagcagtgcaggtttggcatgtaggtagagcatggcatgggtggtgttcatatatccttcgtcgccgtcgtcgtcatcaggatcatcatctgtgtcatcagcatccgcgtctgtaaatatgacagcatttgaccatttgtacatataacgtgtaaactaaaggacgtaaatataagctgtacagaatatagttaaattccagatttgttgcgacgtcgtaaaagccggcgcctttttctc

SEQ ID NO: 26727 - DNA, 980 bp, Zea mays
  Clone ID: LIB4573-002-D11_FLI
ctcgaggccggccgggggctctctcgccgcctcatcagctttcagctgcatgcagtgcagcgtgtggtgtgcccccgccggcattattccttccctcctcttgtcctagctagctccccccactctgatgagatcgatgatgcgccatggtccacctccctcttcgttcatgactccatgtccatgaggcctgccgccacggccacttcgtcttctataaatagcagctcttcccacacctcctcctctcatcagctcagcatacacaacatcatcatcatcatcttctcgctagtcgagcgagcccttatagttaattaagctagtcgatcgatccaagagaagaagaagcagcagacaggaatggcgtcgctctcgatgacgacgagcgcagcggcccgcgcgcagtggacgcctaggcagaacaagctgttcgagcaggcgctggcggtgtacgacaaggacacgcccgaccgctggcacaacatcgcctgcgccgtcggcggcgggaagtccgcggacgacgtcaggcgctactacgagctgctggaggaggacgtcggccacatcgagtccggcaaggtgcccttccccgcctaccgctaccccgccggctacggggccgccgacaggctgaaacagctgaagatctaggaggtcaattgaacatataggacgaacgatcgatgatccagaagatgcaaacatgtgtgtatataggattaatgggacagtatcagtatgcatgcaatggtccatgctgcaagtgcatgcaagtggtgtgtgaaagcaagaatcagattagatgcatgcatatgcatgtgttaatttagtagtaataattgtagtatgggatgagtcctatactagccagtcacgcgcgatcgaccgaccgacccatcgatctccaatgcttctgttccctctccctcctacttgtccacttgtgtgtatatataaatattatgtatttttattac

SEQ ID NO: 26728 - DNA, 1860 bp, Zea mays
  Clone ID: LIB4573-004-F5_FLI
accctgccccgtcccgtccgtctccgtcccaatcggatccacccgcccgtcgtcgcctataaactctccctcccatccgtctcttgagggcccggcttcctcccaactgccaccgatttgtttgttcggcttcggccccatcgccagtcaccccttcccacttcattggtcgctgctccctccctccacggccgatcccgtgccggcgagagggaccatggcggggaaaggggaggaggtgtacgtggccgccatcgaccagggcaccacaagcacccggttcatcgtctacgaccgccacgccaaacccgtcgcatcgcaccagctcgagttcaagcaacactacccggaggcagggtgggttgagcatgatcctatggagattatagagactgttaaggtgtgtatgaaagaggcagttggcaaagccaaagatggtaaacacaatgtggttgctggtttgaaggccattgggatcacaaatcagagggaaaccactgttatgtggagtaaatccactggccgtccactgtataatgctattgtgtggatggatgctcgcacaagccctgtttgcaggagattggaaaatgagctgtcaggcggtaggacccacttcgtggagacatgcgggttgccaatcagtacctatttcagtgctctgaaattattatggttgatggaaaatgtggatgctgtcaaggatgcagtccggactggtgacgctttattcggcacgatcgacacctggttgatttggaaccttacaggaggtgttgctggtgggcagcatgtcacggattgctcaaatgcatctcgtacaatgcttatgaatctaaagacacttgactgggataagccaacacttgctgtgttaggagttcctgttgagattttgccaaagattatcagtaattcagagaaaatcggtgtggtcgccaaagagttcccgtttgcaggagttcccatctcggggtgtcttggagatcagcatgctgctatgcttgggcagctgtgccagaagggtgaagcgaaaagcacctatggaactggtgccttcatccttcttaacacaggggaagagcctacccaatcctcccatggccttcttagtaccattgcttacaagcttggtccagctgcacccactaactatgctcttgaagggtccattgcaattgcaggcgcagcagttcagtggctgagggacagccttggaatcattcagtcagcagctgagatcgaaaagttggctgaaacagtgccagattcaggtggagtgtactttgtgccagcatttaatgggttgtttgcaccatggtggagagatgatgcgaggggaatttgcatcggaatcacaaggttcacaaataaggggcacattgctcgagcagtgctcgagagtatgtgttttcaggtgaatgatgtcctcagctccatgcacaaggatgctggagaggcaggagaagtaaagagcgcagaaggagagttcttattgcgtgttgatggtggtgctactgttaataatcttctaatgcagatccaggctgatttattaggcagccctgttgtcagaccagctgacatagagaccacagccctcggagctgcatatgctgctgggttggctgcaggagtttggaccaaggagaaggtttttgcaggtttgcacaaggagaacacgacagtcttccgcccgaaactggatgaggcgcacaggaaaaagagggcggattcatggtacaaggcggtttcaagatcattcgatctggctgatctttctctgtaaatttatcctgccagcgctcctctatctggttttggaagctgcaaatgaataaattggtcttcgctgggact

SEQ ID NO: 26729 - DNA, 1250 bp, Zea mays
  Clone ID: LIB4573-005-B1_FLI
ctcgaggccggccggggacagttgtccaaaccaaatacattgaggatagcacgagaaaggggcgccaagcaaaccgggtcggccagcagacactgccatgaggactctactaccggtggccgccggccgcgggaccgtcgcctgcgcggccacgcccgtcccccggaggtcgctgctcctctccaccgctgccgcaggtgcggcgctgcagccggagcaggtggctggaacgaggccgttgaggctgaccaggagcgaggccagcgccgtggcaaagcccaggaccttggccgacgaggccatctcgtgggcgaagaaagacaaccgccgcctcctccacgtcgtctaccgggtcggcgacctcgacaagacgatcaagttctacaccgagtgcctggggatgaagctgctcaggaagagggacattccagaggagaagtacagcaacgcgttcctcgggtacgggcccgaggaatcgcatttcgtcgtcgagctcacttacaattacggggttgacaaatatgacataggcgaagggttcggccatttcggcatcgcagtcgaggacgtggccaagacggtagagctcataagagcaaaggctggaaaggtcatcagggaagccggtcctgtgaagggcggcgagaccgtcatcgccttcgtggaggaccccgacggctacaagtttgagatcatcgagaggcctggaactccggaacccttgtgccaggtgatgctccgcgtcggcgaccttgaccgtgccataagcttctatgagaaggcctgcggcatggaactgctccggaagcgagatagccctgagtacaagtacacagtggcaatcgtgggtttcggccctgaagacaaggacgcggtgctggagctgacctacaactatggtgtcaccgagtatgccaaggggaatgcatatgcccagatcgccattggcaccgacgatgtctacaggaccgcggaggcggcgaagctgtccggaggccaggtggtgcgggagccggggcccttgccagggatcaacaccaagatcacagccatcctggaccctgatggctggaaattggtcttcgtcgacaacatggacttcgccaaggaactggagtagccacgccaacgacctcagacgccctgcaacaggattaactcgcactgctgttggtccgtaattaaaatgaaagctactagtgaaacctcaaattttcatcatgcataaaatacagaaccacctttatact

SEQ ID NO: 26730 - DNA, 1102 bp, Zea mays
  Clone ID: LIB4573-005-B3_FLI
ctcgaggccggccggggtctcctctcctgcacccagactcctctctctctctctctctctctcccctctgtgtgcggtgtgccctggcctcctccgccgccattgcagcgagcaagatcaatccctctgctgccattcatgagtcaagctggggcattccctcctgggaagaagatcacggtggtgtttgtcataggcggcccaggcagtggcaagggcacccagtgctccaagattgtcagacactttggattcacccacctgagcgctggcgacctcctgcgccaacaagttcagtcagatactgaacacgggtgacacctgatcgctcgccattttccgatatgttgtaggcgccagcttgccatatatccttctgacatgcccatatatctcgtcagtgccatgatcaagaacctgatgcacgaagggaagctcgtgccgtccgacatcatcgtcaggctcctgctcacggccatgctccagagcggaaacgacaggttcctcgtcgacggattccctcgaaacgaggagaaccgccgagcgtacgagagcattattggcattgagcctgagttggtgctgttcatcgactgcccaagggaggagctggagcggcgcatcctgcaccgcgatcagggaagagacgacgacaacgtcgacactataaggaagcggtttcaggttttccacgactccactctacctgttgttctgtactacgacagaatggggaaggtccgacgggtcgatggcgccaaatctgctgatgcggtcttcgaagatgtgaaggctatatttactcagctactgaccactcaggcaagccaaggtggcaatgcgagcagcaggcggagcaatccgccgctttgttcagtgctctaggatgaagcaacatacctccagctccaaataaaaaaaagaggatttcagaaaacacacacttgctgtgcgtatgtggtgtgttcgtgctgtgctgtgctgtgctgtgcagatttaatggcttgttaaaaagaaacagagaataatggccctccccagctgcagctggtatggttgttcgctcagtggcagcactagaggctgcgagcctgctgcaaac

SEQ ID NO: 26731 - DNA, 1674 bp, Zea mays
  Clone ID: LIB4573-005-B5_FLI
ctccgcctcatcgccccctgcacggtcacggattactggtttcttattgccaccagatcgaaaaggggggaggaattaaattgtggagtcgggtggtgagatctgatttatagattatttgattagcccggttggtagcagcagtcggtggtggtggtggtagtggtgcaagagcaagaccctgaccgacggcctctgcctccttgcatctctgttcgggtttgtgaagcgcgggctctataaatacgactcagatctgagaggccttctcctcgtccgccccagtctaatccgattcaaaccgcccgttccccgtgtccgtgccaagcaagccgagcccaacccccaagagccagctgctcggtgctccacgcgatggcgcagaaggagactaatggcagcaacggcgatcacatctccacccgcccgccgccgaccccctcgcccctccgcttctccaagttctttcaggctaacctgcggatcctggtcactggtggggcgggcttcatcggctcgcacctcgtagacaagctcatggagaacgagaagcacgaggtcattgttgctgataactttttcactggttcaaaagacaacctgaagaagtggattggccacccaagatttgagctcatccgtcatgatgtcaccgagccgcttcttgtggaagttgaccaaatctatcaccttgcttgccctgcttcaccaatcttctacaagcacaaccctgttaagaccatcaagacaaatgttattggtaccctgaacatgctaggacttgcaaagagagttggagctaggattttgttgacatcaacctctgaagtttatggtgatccacttgagcatcctcaaactgaggcctactggggcaatgttaacccgattggtgttaggagttgttatgatgagggtaagcgtgtagcagagacgctgatgttcgactatcacaggcagcatggcattgaaatccggattgccaggattttcaacacctatgggcctaggatgaacattgatgatggccgtgttgttagcaacttcattgctcaggctgtgcgcggtgagcccctgactgtccagaggccaggaacacagactaggagtttctgctatgttgccgatatggttgatggtcctattaagctgatgaatggaaacaagactggaccgattaacttgggggaacccaggtgaattcaccatgctggaacttgctgagaatgtgaaggagttgatcaacccagatgtgacagtgacgatgaccgagaacactcctgatgatccccgccagaggaagccggacatcacaaaggcgaaggaagttctgggatgggagcccaagatcgtcctgcgggacggcttggtgctcatggaggatgatttccgggagcgcctgaccgtgcccaagaaaaccaaggcctaaattgccctgcagttggggaagaatatccacacggggaagcatactcatagtcgggctcgtcattatttgtggccacatttcattacggaatttgagttccaataaacttaatattcctttgtcgttcaccttgaaggattgtattattagaattttcatacagggctggccattcgagtctctgcctacgcagatcttgtggtacttgtgtttgtagccaatgtgtgagtaaaagtcgattatag

SEQ ID NO: 26732 - DNA, 1391 bp, Zea mays
  Clone ID: LIB4573-005-D8_FLI
ccccccgccgagaagctactcgaatcccctccaaaattcggaggcgagagccactgatctatcgcaaaacccatcaaattacacaattcaaatcagccaaccccacctacagccaccaattcgtgcgcatcaagtctagccccctaccccttcgcaatcagtgaacccccaatccacacacagcctgcgaatcgctggatcaaaatttggtctcggactctcgatccaccattccccgaggaaggagatctcagtcaaccgaataagtctcgggaagctctgtgttggaaacatggggaaaccgctgatctacgagatactggagaagccggcgagcagcagcgtcatcggcatctgctctctgatctggtggctcatccagaagcggggcatcgggtacgcggacgtcgggctgagctacgaggccgcggtggacagcgggcagtactggcgggtcatcacctccgccttctcgcacgtcagcgtggtccacctggtgttcaacatgagcgcgctgtggagcctcggcgccgtcgagcagctgggccagatcgggctcggcgtcgagtactacctgcactacacgctcgtcctcgtcgtgctgtccgggctactggtcctcgggttctaccacgtgatgatccagaggttcaaggtggagtacttcaggagggtcaccgcggtcgggtactcgtgcgtcgtgtttggctggatgacaatcctggccgccaagcaaccgtcgtccaagctgaacatcttcggggttctctcactgcccatcagcttcgcgccgttcgagtcgctgatattcacatccatcatggtgccacaggccagtttcattggccacctgtccgggataattgttgggtactcgattgcctggggtctggtccatgggatgaacaactactgggcagtcaccatgcttggctggactgcacttgtgtttgtcttgagcttgaagcgcacagggtctatggagctgagttttattgagatcgagccagtgacggacccctcgctgccttctgttggtgtggtagccaccagaaatggtagaagtagaactctgcaaatggatgccttgtctggaagaagagttgcagacattgtataacacgcagagaggaaatgtttgaggaatcctgagtttttgttctgaaaactgtatcatgtcgacacaatgatacgtattgggtttggaattctggtgtcgctgatgtctttggtcattgctggtgtaaaggaattcttcgtcttggccttccagatgcatgttcattttgaatagaaatgaattctttgcgctagttgcctagttaccatgtaatgtaaagagattttttttccagtttaactggattccttcagtgctgccctcttcatgc

SEQ ID NO: 26733 - DNA, 1633 bp, Zea mays
  Clone ID: LIB4573-005-H11_FLI
ccgggatccttcctggtgctctgtccacctctctcgctctgggccgccgccgccgccctaagccacgtgctgaggctttcgttggtctcttcgccggcgacgagcacccagttctgtagaaatggctgatggtgaggacatccagcctcttgtctgcgacaatggcactggaatggtcaaggctggttttgctggcgatgatgcaccaagggcggttttccctagcattgttggccgtcctcgccacactggtgtcatggtagggatgggacagagggacgcatatgttggcgatgaggcacagtccaagagaggtattcttacgctcaagtacccgattgagcacggtattgtgagcaactgggatgacatggagaaaatctggcatcatactttctacaacgagcttcgtgttgccccagaggagcaccctgtgttgctcaccgaggctcctttgaacccaaaggccaacagggagaagatgacccaaattatgtttgagactttcaatgttcctgccatgtatgttgcaatccaagcggtgctctcactctatgctagtgggcgtactactggtattgtactcgactctggtgatggtgtgagccacactgtgcccatttacgaaggatatgcccttcctcatgccattcttcgtttggatcttgctggtcgggacctcacagactccctcatgaaaattctcactgagaggggttactccttcacaacctcagccgagcgagaaattgtaagggacatcaaggagaagctagcatatatagcccttgactatgagcaagagttggaaactgccaagaacagctcttcggttgaaaagagctatgagctacctgatggacaagtaatcaccattggtgcagagagattcaggtgccctgaggtcctcttccagccgtcgatgattggtatggaggctgctggaatccatgagacaacatacaattcaatcatgaagtgtgacgtggatatcaggaaggacctctatggtaacattgtgctcagtggtggttcgactatgttcccgggtatcgctgatcgtatgagcaaggagatcacttcccttgcaccaagcagcatgaagatcaaggtcgttgcaccgcctgagaggaagtacagtgtctggataggagggtcgatcctagcctcgctcagcactttccaacagatgtggatatcgaaggaggagtacgacgagtctggcccggcaattgttcaccggaagtgcttctagggtttcacaagttcctcgtcgttacctagtctcaaattatgtcccctccatttctcgagatatgtgtggcagatttgcatgatacgtttgtttgtttccatcggacctgaagtcttcttggggataggctcccccctttgtatgttgtggctccaatccatgtgcgagcacgctgtgtctgtcgtgacacctggttcgtgagatgggttgtcaaacttgattggtttgttgtgcgtggctggaagagctgatagttatatatttggcttggactgtgccgcttgtatgtatctgaattctgaaagcgttgtaatctgagcatccgtgcaaagtatgaatggcccttttatatgggctggattttccggtttctatacc

SEQ ID NO: 26734 - DNA, 778 bp, Zea mays
  Clone ID: LIB4573-005-H4_FLI
ccagcgcgagcgataaggcacactgacatggccgccacggcgtactccaccgcgctccccggcggggcgcgcctccccgctgccggagccgccgcaccgccctctgccctcctcctcccgcggcgtaataaactgtctccgctccctctccggctccaagatgcgccgaggctgtcgttgctccgggtgaaggcctcctccgacgactcctcggccgcgagcggggacgagctcatcgccgacttgaaagccaagtgggacgccgtcgagaacaagagcactgtcctcacctacgccggcggcgctgtcgtcgctctctggctgacgtccgtcatcgtcggcgccatcaactccgtgcctctgctccccaagatcatggagcttgtcggcctcggctacaccggatggttcgtctaccgctaccttctcttcaaggaaagcaggaaagagctcgccgacgacatcgagtcgctcaagaaaaagattgctgggacagagtaaaacatgttgttctcgtgaaactttttttggacgattctttcgggaacacgttgtctctggagagctttgtacgacgatggagaacaacagtgtacgatcgaactggacgccatcctcggggattgttttcttaaaatgaaatagggtgtgtatccgggttttcttttcatcacttcattttgcaatccgtatgtctgtcaggacctggcacccagttcgtaatccttgacttgccatcgcgactgtgatttgtttaagatcaatagcgatttgctcg

SEQ ID NO: 26735 - DNA, 1498 bp, Zea mays
  Clone ID: LIB4573-006-B12_FLI
actcatcactcccctgcgggcggccacgcgcacgcacccataaaagtcctcgctccaccccctccaactcccgtcccctccccctccctccttccccgccgccgccgccatccaccaggtcagctccagcggacgacgtctcaacagtctcgcgccactgagatctcgccgagggagggagagcagcaggcagcagcagacatgtcgtcggggcggtacatggcgtactcgccctcgccgtcgaccaccccgcactccccccgcatccacggcctccgcaccccctctgccgccgtcgccgagcaggagaagtacctttccgaactgctcgcggagaggcacaagcttaccccgttcatcccagtgatcccacatagtgtacggttgctgaatcaagaaatttttcgtgtttccacactattggagaacgcgtctcttttaaatcaaagtggccttgaacatggtagtccactaacaacgggaggattatattcaaacggagcagctactgacatgaatgggtggccatcagcatttcaatcagaaagttctccagcttatagctggcttggaggatctcaaggcagctcctctggactcattgtcaagaaaacaatgaaggtcgatatcccagtagacaaatatccaacatacaattttgttggccgcatccttggtccaagaggaaattccttgaagcgggtggaggcaaatacggattgccgcgtgctaataagaggtcgtggcagcatcaaagatccagcacgggaggaaatgatgcgagggaagccaggatatgagcatctgaatgaacctctccatatattggttgaggcagagctacctgttgacatcattgatgctcggctgatgcaagcccgcgagatccttcaagatctgctaaagcctgtggatgaatcccaggacttcttcaagaagcagcagctccgggagctcgcgatgcttaatggcaccctgcgtgaggaagggatgcagaggttcggttcagcgtcccctttccacaacggccttggaatgaagagagccaagacaagggggtgatgaagaaagtcgcaagcatcatgaagggagaacttaaatcatcatctattctgaggccaatcctgtgtacgaatggggggttgccttgctggctactggcccaatacggtctcgcgccaccagcatcgcggcgcgggcggccgtgcacgataaaacatatatctggagttgtgtctactgggggagttgagtttggttatgcgccatgggttgttacgctatatattgggctgtgcaggcttttgtagcaatgtggtttgtgtaaatgctcatttggagcgtttggaagctctcggcttgtatttctttcttatcgagatagtattcaaggacgctgtttgggatttgaagcaatgctctaaactgcgacaagcatggaggcttgatctgtttcattcgaatctcttgtttgacactatcaataaccagtgcatat

SEQ ID NO: 26736 - DNA, 2007 bp, Zea mays
  Clone ID: LIB4573-006-E5_FLI
agtctgcgcggtgatccgtcttccctggggtgttccgccgtcctgcagcagaggcagggggttgccgctctcgccgcctgatccttcctgcggcccttgttttttcctctcgtttcaggtggccagccttggttttgcagaactcattcagtggcctctgctgaaaagtgttcaatggcgtcaggagccaccttaagctgggttaaaaccccatttgacacccgaagatttcatgacctatctaatctaagtttccgctgccgaaacccttttggatcaattcagccctggtggctgcaaactgatcaagactcatccctaatcaaggttcgcgtggctgctgattattcagactcaatgccagattcaaagtacacgagagatcggggttatcaccctcttgaagaagttaaagaacgtccaaagaagaaggacctgttgctgacagatattgaaacagctagaacagtagtagaggcaaatagcaaggggttgcttgtatttcctgctagggtacacaatgaacctcatggacatgtttcttggtcggagtttcaatatgttgttgatgaatatggagacattttctttgaagtacctgacagtgagaacatcctggaagatgatactgcaaacaatcctgtgacagttttgattggaatggatggacccattattggagaaagtagtgtggcgattagtgatttcagtgattacatggatggtgaaaattttatggacgttcctgatgagcaccacaccaagattgatacagaaataactgatattctcatagagtgggggatgcctgcaacaatgcgtgcaatacatccgatttactttgccaaatgtttgacaaaggccattcataataataatggggagaagatggatagtccatcaaacggtctctctattgtaggatatctgagacctgctttcatagaggaagagtcttacttgaggagcatgtttcatggtgacaatggtggttattcatctgactggaaagtaaatgaaaccgatgaatacaacagagaaactcggccagtttctggaaccaatcgcctcattgatgatgataaatcaagatttgacttcaatcatgctgaaactagaactgattcaatgatctacaagctggagataatgacaattgaactgttttccatgtatggaaagcagtttaagattgatccacaagattttcaagattcagaaccagatattcttgcaaattctgcttcatcgataatagaacggatcaaagaaaacagtgatcagtgtgccgcggctctcaggtcgctctgtcgccggaaaaagggcctcactgtcgaggaggcaagcttgattggtgttgacagccttggtattgatgtaagagccttttctggcttggaagttaagactgttcgattttcattcaatgcacaggcgctctctgaacgttcagctgaaaagaagatcaggcgaatgcttttcccccgttaccagcgtaaaaacgtgaaagcctctactgaagatgagtcttaacctatcagctgtttttcctgagaaagcatgcaaacacctggttcaaagacaaggtgtcaagggaatcaacacaatatcatcttatgcgagtttgctaggagatagcgcacaacctgtcgactatgagaatgaccaaaaacatcagagtaataaggtttgccatgcatggtctctaacatgcttccaagaatatagtttggtttctgacagataataaaaaaaaaacgaataaggtgccagttcatgtataaaagatgaactgcgactttatgctggcggaaactgattagctgaccaagctttgtcagctacaaattcccagtaataataacgagctgcgaggtgaaagggcagagtaataaggtctcgttggcctaaatcagttcttagtttcttacccacaacctgtaactaactttgttgtctcttttcatgtagacataaatgtcatgcaacgcaactgcgattatggcg

SEQ ID NO: 26737 - DNA, 1695 bp, Zea mays
  Clone ID: LIB4573-006-G2_FLI
aaaaaaggtccccctctcctcgcgtctcgttgtcccatctagcccatctgctatcagcgaggacgaaggcacaaacccctcacctccctcaaaccctagccctcgctctcccgcttgttcccgtcaccgccatcatgggctcagatgcggacatggaggactacgggttcgagtactctgacgaagagccggaggagcaggatgtcgacattgagaaccagtattcaactccaaaggtttggtcgagacagacccagagggtgcacttgctggttttgatcaagtggtcagtatggagcctgaaaaggctgaatggggatttaaagctcttaaacaaactgtcaagctttactataagctggggaaatacaaagaaatgatggatgcatatagagagatgttaacatacataaaatctgcggtcacccggaactacagcgagaaatgtataaacaacataatggattttgtttctggatcagctagtcagaattttactcttctgcaagagttctaccagacaacactgaaagcgcttgaagaagcgaaaaatgagagattatggttcaagacaaacttgaagctttgcaaaatttggtttgatataggcgagtacggtcgcatgagcaagatattgaaggaactgcataaatcttgccaaagggaagatggttctgatgatcaaaagaagggcacacaacttttggaagtctatgctattgaaatacaaatgtacactgaaacaaagaataataaaaagcttaaggaattgtatcaaagggctctttccatcaaatcagcgatacctcatccaagaatcatgggtataattcgcgagtgtggtggaaagatgcatatggctgagaggcagtgggctgaggctgcgactgatttctttgaagctttcaagaactacgatgaagcaggcaatccacggagaatccaatgcctaaaatatcttgtccttgccaatatgttgatggaatctgaagtgaatccttttgatggacaagaggccaagccgtacaagaatgatcctgaaatccttgcaatgacaaacctgattgcagcgtaccagaagaatgacatcatggaatttgaaaagatcctgaagagtaatagaagaacaataatggacgatccttttatccgtaactatattgaggacttattgaagaacatcagaacccaagtgctgctcaagcttattaaaccatatactcgaatcaggataccattcatttcacaggaactcaattttccagaaaaggatgtcgagcagctgttggtgtcactcattctggacaaccgtatccaaggccacatagatcaggttaacaagctgctagaacgtggagaaaggtccaaggggatgaggaagtacaatgctatcgacaagtggaatactcagctgaagtccatttaccaaacattgtccaacagagtttgatgagaaggatcgctgctgctgcgtgcattgcacacctagcattgttgatagcctgttttgcggatttgagggcaactgcaaagaactgtctggtgacgcttgcgatagaatcctggatctgggtaaagttaatattgactacgaggtcgtctctgaattgaatctggtgttttgatagtgcaagactacttgactggtcaaaagccaaatatacgacgatgcccttctggttggtctttgattgc

SEQ ID NO: 26738 - DNA, 1277 bp, Zea mays
  Clone ID: LIB4573-007-A12_FLI
accaccaccaccggcaccgcgggacagtctgctctcgtcccgctgcagcccgtccccgacccggaaccctagcgactgccattgcccacgcgccgctcgcccgatgaacggcgggggctctgggctggcgcccaacgccgcgcacaccgcggacgaggtcttccgcgactacaaaggccgccgcgccggcatgatcaaggccctcaccactgatgtggagaggttcttcaaactctgtgaccctggtgagtgcgctcgatctctttggttcctcgccccaggatgtggagtgatagccgaggaggcttccgtggtttttctgcttgggcttcgttgcttcgaaaaggagaacttgtgcctttatggctatcccgatgagacgtgggaggtgaccttgccagctgaggaagttccccctgagatccctgaaccagcattaggaatcaactttgctagggatggcatgaatgagaaagactggctggcgctagttgcagtccacagtgattcctggttactgtctgttgcattctactttggtgcacgctttggatttgacagagaaactaggaggcgactctttagcctgataaacaacatgcccacgatatttgaggtagtgacaggagcagccaagaagcaggcgaaggagaagacacctaatagtagcagcaagagcaacaggcctagttcaaaagtgcagtcaagagcagagtctcgttcaaaggctaaggtcccccaagacgaagaagagagcggtgatgacgatgaggatgaggaggcagacgagcacaacaataccttgtgtggaacttgcggaactaacgacagcaaggaccagttctggatctgttgtgataactgcgagaagtggtaccatgggaagtgtgtcaagatcacgccagctcgagctgagcatatcaagcagtacaagtgcccagactgcaccaacaagcgggccagggcatgagcggcaaacatcggcatcgggcgacctttgataggaaggaagaaaccacctcctggcttcaagatccctagatatggcgtaggtccctagtttacgaagtctgcattttcatgtgttcattaatatatctgctgattagctgttcgacctagcagtgtctaaaacgtgccgtgtgtcttctgtgctgagtgttgacatggggcctcctccctccagcctgtaaacgctgtcactgaaggtacctctcaactgaccatccttcattgttggtgtcgtgcagtgagtagtggccgtactctttgttccc

SEQ ID NO: 26739 - DNA, 1589 bp, Zea mays
  Clone ID: LIB4573-007-C1_FLI
gattcctctccggccgtcccgacgttatccaactcctgaacacctctctctcgccacctcacctgaacacctgctcgccccacccattccctccgcatggctggcctccgccctcgcgccgccgtagcttcgaattgcctccgaccggcaattcggcgaggcgcccgtcacgcatcgggggcagcgtttggatactacacctgctggcagctacagggaaatattttgaattggagatctatatccgcaactaaaaagctctggagtacagtagctagtgcaaagcctgatgattctaaatttgaaagtgtggatgcaccacttgagccccaaacatgtgaaggcagcttcttgtgtggtctgttgaagaacctgccacacatttttctagctgcagcagagaagcagttgcaagaactgtcttaccaaagagaagagagcttaaaacgctgggagcatagtattggttctaaagaggattgccttcacaggaggattgctgaactcaaggaacacgagtgtcagagagctattgaggacatcatgtacatgttgattgtttataagttttttaagattgaagtaccaatggttcccaatctatcgaaactcatcagcaacagaaggttacagttatggccaccaagggagacagatcttgaatccattcatggacctgaggtgctagagctaattagggaacacttgaccagcattatcagatgggtgcacagaaatggtcccaagatcaatcgttcaacacttcgcattaaaagactgcaatttgttcggatatattctgcttcaataatgtacggatacttcctgaaatctgtcagcatcaggcatcgattggagctgacccttactcgctcagaaggagtgcctccgattcaatttctgaatgctcaactcacaaataaacaagagcaggaaggggccattggaggctctagtgaagcttcgtcttctttgagaccaagttctgtggtcaacccacacgacttgaggggctacataatgggattcgatccaaagaccttgcagctttgcgcgaagctgcgctcatctgaagcttctaatctcatcgagaggcacagctgggctctttttgggggcgacatggaactctcccaggagaatgatgaagcggttatacttgatccttcatccctgaaaagactactgcttgaagccattgcattcggttccttcctctgggacgtcgaggattatgtggacgagatcttcaagttatcggatagctgaagaaactgctacagaaagctcctacagcctttgtggttgtggatagatgaagccagctgaaaagaggagctgcagctcttttctctagatttgtatatatggctggctgttatgtacatgcatatacatcttcatctcaagtttgctttttggagggtacacaagtttttttttgtaagttatgtcatcttacactagtacacaatagcatcagcctatcaacgcagaggacgtgtgacataattttatggtcccaaaataactgggcattttgctaatctagaacgacattattttggaatgaaatgagttgtatcagc

SEQ ID NO: 26740 - DNA, 1329 bp, Zea mays
  Clone ID: LIB4573-007-D2_FLI
ctcgaggccggccgggttcgtgtccctcctcctcctccatcctcgcgcgcgtttcgttttcacacgtactgctgctgctgcttctccaatcgtcgtagggtctcaagacactgaggtcgcagctctactccgcggcagagtacttcgagcttgcctacacgcagcaggacgaaaagcaggcggtgacgaacaacctcaaggagtatgccgtgaaggccctcgtcaacaccgtcgaccacctggggtccatatctttcaaggtgtccagcctaatcgatcagaggttcagtgaggccaccgatgccgatctccggatctcctgcatccaccagagaactcaggccagccaagcctgcgtcgacagagagggcatttcgcagcagtccttgctggtcactgccccaaagtatcacaagagatacatcttgccagctcaaggccagtcaatgcccagtgccatgcccaacttcagggagatgaacaaggtggtcgtcacaggcagggcgtctcagatgcatcaagtattcagcgctgaaacaagagctaaagagaagaagcagccttcactcaggtcagtgtcccgccggccggatggacagccaaaagctcggactgcctccccctcgttctttccgttcgaagcttaggttgacaaccaaacaaataaacaaaaaaatctctactgtttgcagaaagttgcaatccatcgctcgcctaccttcgcagcgtgcacgttcagcgtcgccagcacagcgtgcgcatcccatggcaccagctaagaacgctacacccaccaacagagataagcgatcggaatcaccagttccttcgacagctcctccactgacaaggtccgcgtcgctctcaaagaaggcatccttgctcaagacatcaagcgtcagggctcaggccgtctcacagccacagcccaagaaactggcaccactgaggacgcaggtggacaggagcgacgattcgaaggacggtgagcgtaccccgaagaagagcaagaagttcctcaagtccatcctcagcaggcgcaagtccagaaaagatgagccgctgccgagttactttgacgactactgagccacaggatttttcttctccctccgttggacggcaccgcggtctctccgcgtactcctacttcactgtgtttcactttcatcatccaagtgttatgttctcaatataaatatcgtcttcgtatagaaaatagcttaaagtttacatgaatgtagtgggaagtttcagcaagagatgtcatcgccccacttgcctgtttctataagagatgctcagatcaaagagtaaacctgtaacagt

SEQ ID NO: 26741 - DNA, 1706 bp, Zea mays
  Clone ID: LIB4573-007-E11_FLI
atgccagctctctagctaccttgtgcccaaagtgccaaacggccccttaagtcttaaccacctgctttatcatctcccgtgcgcgctctcctcggtctctccctccctccctctcgctcgtggccacgactgggcgactgcctccgccgcatttcgctaggcgccacacggcccttggccggcgacgagcacccacagaaaaagtgttgctcctacgactagttctttttatgtgtaaccttcaatgaaggattctcaggatattcagagcacgacggagttgcagtcaccagtgcaaggtactaatgaagtgcaaagtcagcaaccaaactcaatggccgctgatgctcctgctggaaattcgggttccttgtctgtagctagtaatgacaataagaaggtgtctcgcgaagatattgaacttgttcagaatttgatagagcgttgtctacagctctacatgaacaaaggagaagttgttagaactctttctactcgtgctagaatagaacctggcttcactactttagtatggcagaaacttgaagaagaaaactccgagttctttagggcttactatatacggttgaagttgaaaaggcagatcatcttgttcaatcatttattgcaacgccagtacaatttgatgaaatatccagcacctccgtatattccattggctccaatacaagatggaattcatcatatgccagttagcaatttaccaatggggtatccagtacttcagcagcctatcatgcctgctcccggccagcctcacatggatccaatggcctgcggtctgtccagtggtcatgtggttaatggaatacctgcaccaggtagttatcatcccatgcgcatgaactccggaaatgacatggttttggacaatggagcgcctgaagcaccacatgctggtgctaccggtagtgctatgtcgtctgagatggctgtgagtccctcgtcggcagcttcaagcaaccatgctccttttacgccgtcagatataccaggcatgaccatggatgtatcggccctagactcggcatttgggtgtgatgtggggaatcctgaatctctgcaattgggaccagatgggtcgtcaagagactctattagatccttagggcagctctggaatttcagcctctctgatctaacagcggatttgacgagtttgggagcagatctggacgtgctggagaactacactggcacccctttcctgccatcggattcggacattttgcttgattccccagaccaagatgatatagtcgagtattttgctgacgccatcaacgggtctccgtcagacgaagagaaaccctagtttttccggggtggcgttcaggttcatcatcaggcagggctgtcatctcatctcatgtagtgtaaagcagccaatctaactgtgtattcggctcgcgcgcggtgatccggtaatcgggcctctgccactaaaagaattttgtagcggttaattgaaatcctaattctttggaataagtagctgggactgggatgtccagagagtagcggtcgttgttggcttagggattgctgctggtggatgcaaacctcacagctagctggtgactctgaaaccacaggaactccttttcttttctttttatttttacttgtatttgtatttgctgctacataagtaaacagaagtggggtgtacctagttttctggt

SEQ ID NO: 26742 - DNA, 2039 bp, Zea mays
  Clone ID: LIB4573-008-E4_FLI
ccgggagcttgtgctcgttcgagactgagacaccccaacacgcctccctcagcgcagatctcgccgccgccgagatgctccgccgcggcgtgcttcttctcgcggccatcctcatcgccgtcgcacactcgcccctcgcgtacgcctcggaggccgagcacaagtataaaacagaagaacctgttaagctatgggtaaacaaggtccttggtggaaatgagctgattgatagtcagatcgatataaagttcataaaaaatgtggacaagggggccatttgcacaattgaacttgatgttcaaaaggttcagcaatttgctaatgccattgaaaactcatattggtttgagcttttcatagatgatctgccattgtggggttttgttggggagactgacaaaaacaatgagaaaaagcactacctttacactcacaagaacattgttgttaaatacaatggtaacaggataattcatgtgaatctaacacaagagtcacctaagcttcttgaagctggcaaaaagttggatatgacttattcagtgaagtgggtgcaaacaaatgtggcatttgcacggcgctttgaggtttacttagactacccgttctttgaacaccagattcattggttctccatcttcaattcattcatgatggttattttcttgactggtttagtgtcaatgatattgatgaggacactaagaaatgattatgcaaaatatgctcgtgaagatgatgatctggaatcacttgagcgagatgttaatgaagaatccgggtggaagcttgtccatggtgatgtgttccggcctcctcgtggccaggtgtttctttctgccctagttggtattggcactcagctggcggctcttatcctgcttgtgattgtgttggccattgttgtcatgttatatgttgggcgaggggctatcatcacaaccttcattgtgtgctacgctcttacatctttcatctctggatatgttagtggtggtctctattcaaggaatggtggaaaaaactggataaaggctatgatccttacagcatcactttttccattcttgtgtttctcgattggattgttgttaaacactattgctatcttctaccgatcattagcagctataccatttggcacaatggttgtcatgtttattctttgggctttcatctccttcccgttggttctattggggactgtagttggtagaaattggagtggtgctcccaacaacccgtgtcgtgtgaaaacgatcccgcgcccaattcctgaaaagaagtggtaccttacaccttctgttatttcactgatgggtggacttctccccttcggcagcatcttcattgagatgtacttcgtattcacttccttctggaactacaaggtgtactacgtctatggtttcatgttgctggtgtttgtcatcctcataatagtcaccgtatgtgtcactattgtgggtacttatttcttgttgaatgctgagaactatcattggcaatggacatcattcttctctgctgcttctaccgccttgtatgtgtatctatactctatatactattatcatgtgaagacaaagatgtcaggatttttccagacaagcttctactttggttacaccttgatgttctgtcttggattgggaatactttgcggtgctgttggatatttgggctccaccctatttgtgaggaggatctacagaaatatcaaatgcgactaaacttggtctaggctgctagcatgtcttgtcacaatatggtgcagagtaataccttgagcttctgattgacttcggaaattacacaggaggttgctctccctttcgttactcttttcatcttttttggcctatcttcctggacgtgtggaactgcccatgataaatgtatacctagttggagaattagtcagagtactggaaagtacatgtaggtttttttggtgcggcctctctcggtcaattgtaggagtacattgatgaatattactgcagtgcagattccagtgggctagattcgcccctctt

SEQ ID NO: 26743 - DNA, 1688 bp, Zea mays
  Clone ID: LIB4573-008-H3_FLI
ccgggaccttcctccccaactcgccgtcgtcttctgcggttctgccgtctacgcctccaatttggcctctctcccttgcaagtttaagcttcaccttcaaccatgggtaaggagaagtcccacatcaacattgtggccattggccacgtcgactctggcaagtcgaccaccaccggccacctgatctacaagcttggaggcattgacaagcgtgtaatagagaggtttgagaaggaggctgctgagatgaacaagcggtccttcaagtatgcttgggtgctcgacaagctcaaggctgagcgtgagaggggtatcaccattgatattgctctgtggaagtttgagaccaccaagtattactgcaccgtcattgatgcccctggacaccgtgacttcatcaagaacatgatcactggtacctcccaggctgactgtgctgtccttatcattgactccaccactggtggttttgaggctggtatctccaaggatggccagacccgtgagcatgctctccttgcgttcactcttggagtgaagcagatgatttgctgctgcaacaagatggatgcaacgactcccaaatactccaaggcgcgttatgatgagattgtgaaggaagtctcatcctacctcaagaaagttgggtacaaccctgataagattgcctttgtccccatctctggttttgagggcgacaacatgattgagaggtccaccaaccttgactggtacaaaggcctgaccctgcttgaggctcttgaccagatcaccgagcccaagagaccttcggacaagcccctgcgtctccccctgcaggatgtgtacaagattggtggtattggaactgtaccggttggtcgtgtggagactggtgtcatcaagcctggtatggttgtcaccttcggtccaactggcctgactactgaggtgaagtctgttgagatgcaccacgaggctcttcaggaggcccttcctggtgacaatgttggcttcaacgtgaagaacgttgctgtgaaggatctcaagcgtggttttgtggcctcaaactccaaggatgaccctgccaaggaggctgccagcttcacgtcccaggtcatcatcatgaaccaccctggccagatcggtaacggctatgccccagtgctggactgccatacctcccatattgctgtcaagtttgctgagctgattaccaagatcgacaggcgttctggcaaggagcttgagaaagagcccaagttcttgaagaacggcgatgctggtatggtgaagatgattcccaccaagcccatggtggtggagacattctcgcagtatcctccccttggtaggtttgctgtccgcgacatgaggcagacagttgctgttggagtcatcaagagtgtggagaagaaggacccgaccggcgccaaggttaccaaggcagctgccaaaaagaaatgatgcaacctgtcgttaatcctgtatctgcttttgcaatacctgacttgtcactccatcccgaagttttgtatgcggttgttactgttattgtgtactgttaagctctgctgcggcgtgccctgttgtttgggtagcgtcaacgtcgagcgccacttgcgggtgtgcctttgtctgctatcagtagcggcaaaaattgaaagctctcgagacttatgtcccttttgggcgccgttgaactgatt

SEQ ID NO: 26744 - DNA, 1308 bp, Zea mays
  Clone ID: LIB4573-009-G10_FLI
tcgaggccggccaggaccgggctccgtcccgtcccgccgcctgcatcacccaagggaagtacagccgagcccccactcgcgttccctgccgcgcgacctgatcgtacggccggggaggctgccgcgcctcctgacctcgcttccgcctcgcctccccgaccggaccagcggcctccgtctgaagatgcagggcggcgtctccggattccagaacgcgccctcggcatctcataccaggacactataacgaattttcgtttatggaagatattcccatctgtatttgcttttcagtcaacaccagagttaatgtttggactgtaccttctgtattacttccgtgtgtttgagaggcagataggctctaacaaatactcggttttttgtctcttcactatcacagcatcatcgctcctcgagatcctgtcattggttatcttgaaagatacaaattacatcagcacgcttgcatcagggccttatggtctcatatttgcctcttttgttcccttctttcttgacattccaatcacatcacggttccgtatttttggtctgaatttcagtgacaaatcattcatttacttagctggttttcagcttcttttatcttcttggaagcgctcccttattcctggtatatttggtctggttgctggttctctctatcgtctaaatgtgctcggcatccgcaagatgaagcttccacaggttatttcatcattttttgcaagatatttcgccccttccccaggaagcacatctcgcccctccaggagtcttgttggaaacacaccgtcccatagaggccgtgctgttcagaatcagccatcaactggatttgcacctatcatggagcctccagagtcctccgttgctatgctggtctcaatgggctttgatggcaataacgcaaggcaggcactcgtgagggctagaaatgacatcaacgtggcaacgaacatcctactggaagcacagtctcattgaactaacgcactgcaactttctggtggtaaattagagggaagaactggttatattccaagatgaacaaacaatatgagcacattggactacagatcggtagattagtgcctcatttcatctaccttgaactgcaggccgacagtttagtaaatcagcgtatacatttgcggcagttagttttatcgtgtcaatacttagatgccttacatacagagaatgtaatattccaatttcagcttgtaggatagatgatataagcattcatagtgtacaattcatccgatgttttacagctttagaacttgttccagcaaaaag

SEQ ID NO: 26745 - DNA, 1637 bp, Zea mays
  Clone ID: LIB4573-010-B8_FLI
accacccatcccgaaagagccccagcccgcagggagtcaagtagtcaaccgttctgcccgctccccctcacacaaaaggcaaaccacccgccaccgtcggcagacggcaactactttcatttcgtcgtcgtcgcccgcccccacccgctcctccactccaccaccaccggacagatacggatgtctccgcccgcacatccgcttcacaaacgaaaacccgcagcaaacgctagcagcggcggcgccggcagttggtagccgcgaccgagacacggcgggtgacctgccccgccgcagtcggggtgtatgtattaccaccgccagaattccaggagacgaggatcgaggaggcaccgatccgtagcggcgatatcgtagagccgctggtctcacgccgcaccgagacaatggcagaccagttagggtcttacactattagatcccatggaatgatattggcaaggttgcacatgtatgactggataatacttctcctccttgctgtcatagacgggctgttgaatataattgaaccatttcaccgttttgttgggaaagacatgatgactgacttgagatatcctatgaagggcaatacagtgccattttgggctgttccactgattggaattatactgccttgggccatctttgttgggatttacttcaaaaagaagaatttttatgatttgcaccatggcatactggggattctatactcagtgctgataactgcagtgattactgatgcaattaaggatggtgttggacggcctcgtccagattttttctggcgctgtttccctaatggaaatgatgtttatgataacattactactggtgttatatgcaatggagtgaagagcgtaatcaaggaaggccacaagagctttcccagtggacacagttcatggtcttttgctggtctaggcttccttgcatggtacttagctgggaaactcacagcctttgaccgcaaagggcatattgcgaagctatgcattgtgttcctgcctctccttactgccgcacttgtggctgtttctcgagtggacgactactggcatcattggcaagatgtatttgcagggggtcttataggtcttacagttgcttcgttttgctacctacagtttttcccatatcctttcgatggcgatgctttgtggcctcacgcatacgcggtccggttagccgaggaggggaacagcagaaatgcgaactcatacagcgtgagaccaaccgaaatcgaaacagtcgatattcctgggcacggtgggatcatcaccctaagagatactctaaacgatgtggagtctggcagtgccaggagattgtgagatgggtctgcaggtgtggagattgatgtctcagataccatgggagttgcttgcatatgtgtacaggtagatctattgtagagctgttgactgctgccaccgtgataggggagggttgtttagacgggcctggcagtaaatttacttggtagggtgctgtttcttctgagaacctttggcttttgtttgtatatatgctcttatcaaagtgttgagttcagagttgtggttaaagtttgtttgctgacactctttgtaaccagtttggtcgctgcattcagcaactatgatctgagc

SEQ ID NO: 26746 - DNA, 1549 bp, Zea mays
  Clone ID: LIB4573-010-D7_FLI
aatccgcctcgcccgcagcgcccccccccccacttcctttccctctctcacggcggcggcgagatgaaggtaacggtaatgaccggcgacgagcagatcgtcaccctcgacgtcgaccgcgacgaatccgtggaaaatctcaaggcgctactcgaagtggagactcgggtgccgctgcggcagcagcagattcacttcaatgggaaggagatgcagaacacggagaagctcagcgccgctggggtccaggacggcgaccttgtcatgatgttttccaccagcgaaaggccatctcaggatggcttaagggtaaatcctgatggaactgctgtgaatcctcaagcttttcaacaacatgctcgaggtgattcacaacttatggcacagctccttcagaatgatcctcaactagcacaagctatccttggggatgacaccactgagctacagaatatcctgcggtcccgccaccaacaaagaacagaactaaaacgtaaacaagaagaagagcttgctttattgtatgctgacccttttgatgtggaagcccagaagaaaattgaagccgcaatccggcagaaaggcatagatgaaaattgggaggctgcattagagcacaatcctgaagcatttgcccgagtggtgatgctatatgtggatatggaggtcaatggtgtacctttgaaggcttttgttgacagcggagcgcaatcgactatcatatcaaaaagttgcgctgaacgttgcgggttgctgaggcttcttgatcagcggttccgagggattgctgttggagtcggtcaatcagagatactaggaagaatacatgtagccccaataaagatcgggaatatattctatccttgttctttcaccgtattggatgctcctaatatggaattcctattcggacttgacatgctgcgaaagcatcagtgcatgattgacctaaaggacaatgttctcagagtgggaggtggcgaagtttcagtgcccttcttacaagagaaagacatccctgcacacatacgcaatgaagagaaactgtctaagttagggtctctcagccaagcaactggagagtcatcaaggacacgtgagggtactcccaatgcgctacaacaaacccctccaggagctccagctgcaaaccctccacagggaggagattttgaagcgaaagtcacgaagcttgtggagctcggttttgacagggcgtcggtgacacaagcgctcaagttgttcaacgggaatgaggagcaagctgctgcgttcttgtttggtggttagactggtgggagcagccgttcctggctttgtgttcgctcaaccctttccagggttgagtacttgaatatttgatacgaaagtgattaaagtatttggatactgtttgtccagtgaaaggacttacttttagaggttttatgttttctcttgtttctgagaacaaacatttgttttctgtacctgatacatagactgatagacaccagaatggagacagaactgtgaagatttttttttattaagagtgtttatttgagcc

SEQ ID NO: 26747 - DNA, 1729 bp, Zea mays
  Clone ID: LIB4573-010-E3_FLI
gggcccccgtggcagccgttcgatcaagcacagagctggtgcttactagtatcgccactagagacgcctccacccgctcccactcgtcttctccctccctagtcgctccccaaatcggatctccaggccggcagaagttgagcggactgactggtcactgtagttcgatcgaatccgagtagggctgatacagttcgattcggcgggaggcatggcgtccgaaaagcacttcaagtacgtcatcctcggcggcggcgtcgcggcggggtacgcggcgcgggagttcgccaagcagggagttaagcctggggagcttgcaatcatctccaaggaggctgtggctccttacgagcgtcctgccctaagcaaaggttacctctttcctacgaatgctgcaagactcccaggattttatgtatgtgtgggaagtggtggagagaagctattgcctgagtggtactcagagaaaggcattgagctgatccttagtacagaaattgtcaaagctgatctttccaccaagactctgactagtgcagctggagcaaactttacatatgagatcttgctcattgctactggctcctcggtcataaagctcaccgattttggcacataaggagctgattctaacaacattctatatctaagggaaattgatgatgctgacaagctggttgcagctatccaggcaaagaagggtggcaaggcagtggttgttggaggaggttatatcggcctcgaactgagtgcagccctgaagatcaatgactttgatgtcactatggtgtttcctgaaccttggtgcatgcctcgcctcttcactgccgatattgctgctttctatgaggcttactatactaacaaaggtgtaaagatcttgaagggcacgctagctgttggttttgatgctgatgccaatggtgatgtcactgcagttaagctaaaggatggcacagtacttgaagccgatattgttgttgtcggtgttggaggcagaccattgactactctcttcaagggtcaagttgctgaggagaagggtggaatcaagactgacgcttcctttgaaacaagcgttcctggagtatatgccattggtgatgtggctaccttccctttgaagatgtacaatgagttgaggagagtggaacatgttgaccattctagaaagtctgcagagcaggctgtaaaggcgatcaagggcaaagagtccggtgaaccagttccggagtatgactacctgccatacttctactcccgatcattcgacctggcgtggcaattctacggcgacaacgtgggcgaaaccatcctgtttggcgacagtgaccccacctccagcaagcccaagttcggctcgtactggatcaaggacggcaaggtcttgggcgccttcctggagggcgggtcaccggacgagaacaaggccattgccaaggtggcgaaaacccagccgccggtcgctaacctcgaggagctcaagaaggatggcctccagttcgccagcaagatctgagacgctcccgttccatgtaaaattccgtgtcatcgtgaaggttcttctggagctctggtcatgattgagaaatgttctgctacagatgttatactacatacgtgactacactacatgatatattcggttttctgattgtgatatctgtacgtggctacactcacatgtgagatttgaataagtcctgcagcctcagggctcagctagcac

SEQ ID NO: 26748 - DNA, 1179 bp, Zea mays
  Clone ID: LIB4573-011-C3_FLI
ctcgaggccggccggggtggcatgtctgcctccacccctccgccaccaccacagccgttgcctttgccgcgagcgaccgtagcgaggtgattgcaatggtggcctccactgcttcccgcctctcgcccccgcgcttcagcaccccttccccgtctcttcatcctccaaaccgccgctcgcgcttctcccctgttcgcgcagccaagttggaagctgtgctgtctattggtgctcatctaatcccacacccaagaaaggctgcaagtggcggagaagatgctttctttgccaatagcgatgctggcggagtatttgccattgcagatggtgtctcgggatgggcagaaaagaatgtcaacccagctctattctctcgagagctcatgagaaacagctctaatttcctcaatgatgaggcggtcagtcatgatcctcagattcttctcatgaaagctcatgctgcaacttcttctattggatctgcaacagtaatcatcgccatgcttgagaagaccgggactctaaaagttgcaagtgtcggagattgtgggttgaaagttattcgtaaagggcaagtaatgttctctatatcccctcaagaacattattttgactgcccataccagataagctcagaggcagagggtcaaacatataaggatgcattggtttgcagtgtaaatctcatggagggtgatataattgtgagtggttcagatggactttttgacaatatctttgaccaagagattgtctccataatttctgagtcgccaagcgtagatgaagctgcaaaagcattggcggagcttgcaagaaaacactcggtggatatcagattcgattcaccctactcaatggaggcccggagtagggggttcgatgtcccctggtggaagaagctacttggaggcaaactaataggcggtaagatggatgacatcacagttgttgtcgcacaagtgaagacagtagtggtcccagaggacgaggttcagggtggcgacacagaagaacaaaaggggaatgagcagggcgctgcagctgtggttgcatacaaaatgaatgatgaagaagtcgcttgagttttgggaccatcctcattttacctttttgtgatgactgtattatactgcacataaaggatttgaagcaaaataaatttgtgtgattgtgtct

SEQ ID NO: 26749 - DNA, 1618 bp, Zea mays
  Clone ID: LIB4573-011-E11_FLI
ccgggggtgcgcttatcctcttcctctccctcctctgtcggcgcttcctctgcccttcccatggccgcctgctccatatatagatggttgtgggccatgatgtgcctggtttgcatctggactggtaggtactacaagaggagaagactacccacgaactgagggggagaaaacagacatcatcatcttccttctttctagttatatcgtcctcctccgtagcttcctcatcgctagctagtctagggttagagttcccttaatcttctacttccttctacttagattgctactgatcttccccattcgagatcgtgtgtatcagcttgtactcccggttatcgtcaaaccagttgtgttccacgcgttcaacttcatccatagagtggggtgctaacaattggtatcagaggccactgatctttgcgtccatggagcctaacctgcagtccgcgatggaggaacagttgaagatccttcgcgagatcagtgaccgcctcgctgcccaggaagcgcggtggcgcagtcgggagtcgacagtggtgcaacattcgaggtcgatccacgacctggaggtagcgatggcctctgcgccttccgcgacgttgagggcggagctcgacgctccggtcgctgtgacctacgagcggctcgacgcgacggaagcggcctcggcagcacgcgttagcgccctggagtccaccacggcaaccttcgacatgctgttcgacaactccgacgttgttgagaagttcgatgctgaggtggttgccgacgattggggtgggctgttcggacagcatgctcaccctctggactctggaggagcacgtcttctacttccctccgccgctcttcccttcgcgtccgcgaccgatactaccttctccagcatctacggcatcgagtgtggcacgatccacacctacacggctgctctcgcacgtcctgctgcacttcacgatcccttggtggtggcgcacgccaagtgttcgacgccaggccacaacagagtgtgcgctgaaacccaacgccagggacctcggcaggctcgacgccaatgtcgactacgcgtgcatgttcgccgactgcacttcactgggctacaactccacgtgcgtcagcatggtcgtcgtcggcaacacgtcgtacacgttcaacgcgtcctaccaggcgccgaaccagacggacgaggcctgcgacttccatggcctcgggttgcccacggagaccgacccttccgcgcccacctgcaacttcaccacatagatccagacgggggcgggggtggcggacatggcatcactccgccggagcgctggcttagccgagcaggtgcttacaacgctgcaactcctaacgaggccgacgtcctgcactgggcgttgaagggcgtgctctggcctagggtcacgtactgcattgctgggtggatcgacctcggggacggcgtcgccgaaggggccgaccatgcggtgcgcgttcgcttccgcgtggacgacggatgcgtcgttgagggaggcaccgtctgcgccgagtctggcagctggacagagatcaagggcgtgttccggctcaagaggaatgcgcgtgttatggaggtgtacgtgcagggcgc

SEQ ID NO: 26750 - DNA, 1344 bp, Zea mays
  Clone ID: LIB4573-011-F5_FLI
ggccggccgggacaccgcgcacaccatctcctccacttccttcctgggctctgggctacgtattatccatccgtctcagtcacctcgcctcctcctcctcctcccccagtccccctccctcatcctcgattgcgcccctcactcgccatgtcggggctctacagccaggggttctcccctgcgcgaaacctctcccctcagattagaagcaatccggacgctgatagtcagtacctggccgagctgctcgccgaacaccacaaactggggcccttcatgcaggtgctgcccgtatgcaacaagctgctgagccaagagattatgcgggtatcaagcattgtgcacaaccatggatttggcgatttcgacaggcatcggtttagaagtcctagtccgatgtcttctccaaaccctagagctaatctccctagcaatgggttcagtccttggagcggactacaagagagattaggttttcctcaaggaaccagcatggactggcaaggagcacccccaagtcctagctcccatgttgtaaagaagattcttcgtctggaggttccagttgattcttatccgaatttcaattttgtggggcgcattttaggacctagaggtaattctctaaagcgagtagaagcatccactgggtgtcgtgttttcattagaggaaagggttccatcaaagattcagggaaggaggacaaactacggggaaaaccgggctatgagcacctgagtgatccgctgcatatcttgatagaggccgagttccctgccagtatcatcgatgcaaggctgagacaagcacaggagattatagaagaattgcttaaaccagtggacgagtcccaagatctctacaaaaggcagcagctcagggagctggcaatgctgaactcaaccctgagagaggacagccctcatccggggagtgtctctccattcagcaacggtggcatgaagcgtgcgaaaacaggacagtagagaaaacaactatgctcccatatctggcctcgtcgtcatgggaacgccatgggcatgcgtgaaggaaggccatgcgccttcgctggcggagtccggtatcttctgctagctttcacctccggacaggggaaagatgagatgagatgagatagtcgcggacccttggttggatccggcgttggttgttgtatggtctagaacattcgttctatttgttattgacggttaaccctagtatgttggtgagctgcaacctgcaaactgcatggtaaactagctagagaggcctgctgagtatgtgagctttaggtcttttattgacattgtattataacctttttaacattatggagttgc

SEQ ID NO: 26751 - DNA, 1930 bp, Zea mays
  Clone ID: LIB4573-011-G3_FLI
taacccaagccggtcctccccgactcccggcgacgaccaatttctccctggtattgcatctctctgtgtctctgcaccttatcgctatccatttccttcgttcaagcaatcctgctccagcacggcggcgttctgggccggcgattaggcgatgctaggttcccgtgttagtccgtgtcttagttggtggtttcctgcgttaagtgatttccctgagctggataagcatccatgatggggtggttaggtgtacttttgccgtgagttgcttggccactgtgaatctagtctggctggaggttaactgcttgttggccatgggtggccgcatcaggaaatagcagaggctgaattttcgctcttagttgtatgtagaaacaggaattttgtctgggaatcttagacatcgaatcttggtattctttctaggtgggtcatggatatacttctctttgcaatttatgcttccagcttccttgcaaagggaatttgtgttcatgagcacatgcatgtagaacagtcaaatatggcaggcgcagttctcctggattcctgatatatctgaataggggattacaatatgtaaatcatgaaggaaacaatatgatgtttaatgcaatgtattgatggtactttgcagaagcagattagctttctggtgcatggttcattgattggtggagccatagagaatcaccaattacttttgaatataactgaacttcataagtgcttgacttggagtccaaaccacgttagttcatctaattccttactggccagaaacgagaaacttttatttgtcatgcacacgctgggtcatacatgctgcgcaatacgacagacagttgcatgtcattttcggtatatctcggcttgagtagtatgatttgtttggataattggttgtgaggtgatgacttcagcattaattattgtatctgatggagtgtcgcgacccatgcagatgccctggaggcatcaattgcgttgagagctgactgttttgatgctgagtggttgagttgcgcattctgggtggttgtttctagagggatatagtgagctgcaagctgttagacctgcgaataattgctttatttgatggtgtgtctaaacttgaacggatacactatagctactaatcatcttgagtgctgagtttttatggcaaagtggaagtttgtcactactcactagatgttcagccaaacagccacgtatttgcggctgtgcagcctcatgcagagttacagagaagatgagataacagtaaattctgagattttgtatgtgactgtgtttcccactgatatgcgtggcagaaggtgatgtcatgtccccctaacggcagattgttgctgtgcatggttgttaagcttctgatggaactgaatcaaagtgatagtgtttctttcaagtagagtatgctagctcttaaatcttagatagtacacttacatctgatcagtaatcttgatttttcttttgcagttctcgcccctccaacccttcatgatgcttagataatatacagtgctgggttttagcactgttttgagtttttaaattgagctaaggcttcagtgttagtcttgaaagatgaacggttcaagtggttcccaagggcatcatgtcagtggagagaagaagcaagtgtgtcatgttagccggcccattcttaacaatggaccaaagcaccgtccattgacccccatgaggcgatgccgtggtgtagcatgtgtagtgattatactgtcaacagcattcctgttggtagtttacttggctcctattactacttttgctgtgcggctgttcagtgtgcattacagccgaaaggcgacttcctttctatttggaatgtggttatctttatggccgttcttgtttgagaagataaacaaaaccaaggttgtcttctccggcg

SEQ ID NO: 26752 - DNA, 1259 bp, Zea mays
  Clone ID: LIB4574-001-G12_FLI
ctcgaggccggccgggctccccgtcccgtccaccgatacacaacccaactcccgcacgcatctacccccaccaccagacgacctcccccctcccccgcattctctcacgccgcctgcgctctccccctcgcgagatagacaaccctagctcccgtctccttgcttaccctcctctccaacccctctccgatctctataaaagacccgaatttcgaattccccctcgaacccgcgatccgcgctttccttcccgcccatttcggtctctgattcggcgcggattcgctgcgcgggagcccccgaggttgcgtgcgtgattcggatggcggagccggggctcgagggcagccagccggtggatctgtccaagcacccctctggcatcgtccccacgctccagaatatcgtatcaacagttaatttggattgtaaacttgacctcaaggcaatagctttgcaagcacgaaatgcggagtataacccaaagcgttttgctgcagtcatcatgagaataagagaacccaaaaccacggcattgatatttgcatcgggtaaaatggtatgtactggagcgaagagtgaacagcaatccaagcttgcagcaaggaagtatgcccgcattattcagaaacttggttttccagctaagtttaaggattttaagattcagaatattgttggctcttgtgatgtcaagtttccaattaggcttgagggccttgcatattctcatggtgccttctcaagttacgaacccgaactctttcctggccttatctatcggatgaaacaaccaaagattgttcttttaatttttgtttcaggcaagattgttttgactggagcaaaggtgagggaggagacctacactgcctttgaaaacatctatcctgtactgtcagagtttagaaaaattcagcaatgatgacatgtgatgtgaaggtcacgttcttcaaattacaagcttcctcgaggattctcgtgtgaccatgaattctaaatgtacataaaagtctggcggaacttatagcatcttgtaatctctgtgagccgcggtctgtcagtattgggtgggcttgctgtggtaactggtggacatgtcgagttcatccatttgggtaggccttggtgaacacggacgccccacatcatgtctcagtttgagtagtttgtgtgaactgaagggtacgtgcttctcccatgtggttgcagcgttaacttgagtcaagtgctaacaagagtagataaaattttgccgc

SEQ ID NO: 26753 - DNA, 1361 bp, Zea mays
  Clone ID: LIB4574-001-H8_FLI
ccgggatgtctgcctccacccctccgccaccaccacagccgttgcctttgccgcgagcgaccgtagcgaggtgattgcaatggtggcctccactgcttcccgcctctcgcccccgcgcttcagcaccccttccccgtctcttcatcctccaaaccgccgctcgcgcttctcccctgttcgcgcagccaagttggaagctgtgctgtctattggtgctcatctaatcccacacccaagaaaggctgcaagtggcggagaagatgctttctttgccaatagcgatgctggcggagtatttgccattgcagatggtgtctcgggatgggcagaaaagaatgtcaatccagctctattctctcgagagctcatgagaaacagctctaatttcctcaatgatgaggcggtatctcttgctaaacctcaacactatttataggcatcattttctttactctatgtgcttgtaacaaattcatgtcacatggaagttgcaggtcagtcatgatcctcagattcttctcatgaaagctcatgctgcaacttcttctattggatctgcaacagtaatcatcgccatgcttgagaagaccgggactctaaaaattgcaagtgtgggagattgtgggttgaaagttattcgtaaagggcaagtaatgttctctatatcccctcaagaacattattttgactgcccataccagataagctcagaggcagagggtcaaacatataaggatgcattggtttgcagtgtaaatcttatggagggtgatataattgtgagtggttcagatggactttttgacaatatctttgaccaagagattgtttccataatttctgagtcgccaagtgtagatgaagctgcaaaagcattggcggagcttgcaagggaaaacactcggtggatgtcagattcgattcaccctactcaatggaggcccggagtagggtgagattgaaacatctcttatgatactctcttctacatgtcattctttacatcgtcaatgatggaacatgttgcactccggatatgcaggggttcgatgtcccctggtggaagaagctacttggaggcaaactaataggcggtaagatggatgacatcacagttgttgtcgcacaagtgaagacagtagtggtcccagaggacgaggttcagggtggcgacacagaagaacaaaaggggaatgagcagggcgctgcagctgtggttgcatacaaaatgaatgatgaagaagtagcttgagttctgggaccatcctcattttcattctcttcattttacttttctgtgatgactgtattatactgcacataaaggaattgaagcaaaataaatttgtgtgattgtttcc

SEQ ID NO: 26754 - DNA, 1586 bp, Zea mays
  Clone ID: LIB4574-004-C9_FLI
gacataaccaaggagcagcatcaatggcaagcccccggtgctggtcggtcgtctgtcccaagccccggcaggtcgcgagcgagagcgtccacggcgcgcagctcgctctacagcggttgagcaggcgctgtgagacctgcgacggtgaggccagcacgccatgcagctgccgaaaggaagccgttgcccgggacactgaggaggatagtagcgggccgaacagctcctttgcacactccgtcatcaacatggttgggatgctcatagggctggggcagctttccactccatatgccttggagaacggcggctgggcctctgtattcctcctcatcggcctcggcgtgatgtgcgcctacacagcccacatcatcggtaggtgcctcgacgaggactctgctggttccaaaacgtaccaggatatcggcaagcgggcgttcggcgtcaagggccgcgtcatcgcctcaaccttcacatacctcgagatcttcttggccctcgtctcctacaccatctccctcagcgacaacctgccgctcgtcttcgctggcgttcacctccatcttccgtggctccacctcagcgcgacgcagctgctaacaatcatcgccgtactgctggcgctgcccagcctttggctcagggacctctcgtccatttccttcctttccttcgctggcatcatcatgtcgctgctcatcttcggcagcgtcgtctgcgccgccgcgttcggcagggtgagcctgggcaagcacatccccgtgctccagctggagaagatcccggcggtgtccggcctgtacatgttcagctacgcagggcacatcgtgttcccaaacatctacgccgccatgaaggacacctccagcttcaccaaggtctccgttacgagcttcgccgtggtcacggctctctacgtagctcttgcgttcgtcggctcgagcctcttcggcgcggcggtgaactctcagatcacgctcagcatgccgccgcatctcgtggtcaccaaggtagcgctgtgggctaccgtgctcacccccgttaccaagtacgcgcttgagttcgcgccgtttgccatccagctccagcaccacctcccagagggaatgggacctcgcgcgcgcatgttcgtccgaggtggagtcgggtcggcggcgctccttgtaatcctggcgctggccctctgcgtgccgtacttccagtacgtgctcagcctcacaggctcgctagtgagcgtggcgatcagcgtcatcttcccctgtgcgttctacctcaagatctactggggtagagtgcccatgtccaccgtcactatcaacgtggtgttgattctgaccggcgtagttctcgcggtggtgggcaccatctcgtcggccatgtcgcttgtgcagagtatccagagaggccatgctgcgtaagagtatcaagatgccacctacaccgtaccattagaattccatcaatgtaacacattacactcttgttctatatataattattgcatcaaatattgtaacactccaaaaatattgttttggagttctaataaaataatacaaagatttgaaccatgatattattttaac

SEQ ID NO: 26755 - DNA, 1519 bp, Zea mays
  Clone ID: LIB4574-004-E7_FLI
gcaggcgtggtcgcgtgtagtcagctcgccttgcccgctctaatcggtcaccactgacctccgcccatggcgaccatgtctgcagccctcgccatctccttaccgtcgctaactcgcgttgccgtcgcaagtacgccctctgcttcctcgcgcatcaagagagccacacaattcaggtgctgcgcggattcttcttcccaggagcaggagatctccggcgcccctcccgccccaccgctggacaaatctgcaagatcgcccccttcctctctgctgggcatttccacgagcacctggtctgcgggtgtcgctgggctggggttcctggagactggttacctcacttacctcaagctcacgggctccgaggcgttctgccccatcactggcgcaggctgtggcgacgtcctcgacagcgactactccgtcgtctttgggatacctcttcccatagttggtctggtggcatatggtttagttaccgcactttctctgcaaaaaaatggaaaggacttactccaaggatcagatgacctggatgttagattgatattgcttctggttgctacttctatggcgactgcgagtgtttattttctttatattctaagcactaaatttattggggtgtcatgttcgtactgtttgttctcagcatttctctcattcactctactcttcatcagagtaaaggacatcggttttgaacgtatccagaagttcgctggcattcagttagctgtagctgtcattatagctcttgctttgacaaactcatatagttctgctactactcaattgaaaggcacagatgatttcgtattagagccgtatgaaacagagatatcaaccgaatcatccccatttgccattgcactggctaaacatttgcactctataggtgctaagatgtatggagcattctggtgttctcattgcaatgaacaaaaacagatgtttggtcatgaagctacaaaaattctggattatgtggaatgtttcccaaatggagctggtaagggaaagaaaatgaccgctgaatgtgccgctgctggtcttgaaggttttccaacatggttcatcaacggaaagattctgagcggtgaccaagagcttgaagttctggctgaagcatcaggcttcgttggtgagggcacagaacaacccaagggaatatcgcagaattgatattaaatcattctgaactgaagctggcaggttcttgaaccaataatctggatgcagtctttagatagcaatatcccaaatgttcactagcacagttgcatccgaaggttgcttaccctacttacaactaaccactataatttgtagcgactgtacatgctctacgagaagggagaacaaaccccaagacagcgtgttgtataaccatttgtagatctagtttgtactgtaaatgtgtaatcctacgaaaacggtcttgttcattcgcttgtatacgatgtattgatgtttaatgatataaaaaaactctggtgggtccttatacccgctc

SEQ ID NO: 26756 - DNA, 1103 bp, Zea mays
  Clone ID: LIB4574-006-C12_FLI
ccgggatccatcgccgctcactcccacgatcagcgtcgtcgcttatccgcaaatatctctcttcctctttgcagtcggcaccatgggttccgacttcaaatcgatccccttgatcgatatcggcccgcttgtcgaaaagattgatgatccaagcatggccaacgataaggatttactgcaggttgtccggttactggatgatgcttgcaaggaggccggattcttctatgtgaaaggccatggtattgatgagtcactgatgagggaagtcaggaatgtaacccgtgaattctttcagcttccttatgaggaaaaattaaaaattaagatgacacctcaaagtggatatagagggtatcaaaggataggggaaaatattaccaagggtaagcctgatatgcatgaagcaatcgattgttatactcctattagacctggcaaatatggagatctcgctaaaccaatggaaggatctaacttatgacatttcaagaaagataatgcgaggtatagccttggctttgggaggggcaattgatgcttttgaaggggatacagctggagatcctttctgggtgttaaggttgattggttatcccgtagatattccagaagagcagcgcactgatactggctgtggagctcatacagattatggacttctaacactggttaaccaggatgatgacatatgtgcccttgaggtgcaaaatcgttctggtgagtggatatatgcaacgccgattcccggaacctttgtttgtaacatcggtgacatgctgaaggtttggacaaatggaatatatcagcccacccttcacagagttgtcaacaattcccagcattaccgtgtatctgttgcattcttctacgagtccaacttcgatgctgcagtagagcctgttgagttctgccgggagaaaaccggcggtgctgctaagtacgaaaaggttgtgtacggggagcatttggttcagaaagtattgacgaacttcgtcatgtaaatttgctaagtacgacaaataaatctgcattgcagcatcagaactccagacctatttggtgtgtagtgctgtaccagaaaggtagtaacggactaaagg

SEQ ID NO: 26757 - DNA, 1564 bp, Zea mays
  Clone ID: LIB4574-006-D10_FLI
ccgggactcgcctcgacgcgcctctgaaagttcggagccgccggcccgtccgcctccctctccgcctcccgtccccaaggccaatagttttcaagtggcaatggcggaccaggctaaccaacccactgtccttcataagctcggtggccagttccacctgcgctcgatcatctctgaaggtgtacgggcccgtaacatatgcccatctgtctcatcttatgaaaggagatttgccacaaggaactacatgacccagagcctttggggcccttcaatgtctgttagcggtggcatcaatgtcccagtgatgcagaccccgctctgtgctaatgctcctgctgagaaaggaggcaagaacttcatgattgatttcatgatgggcggtgtttcagctgctgtttcaaagactgctgctgctcccatcgagcgtgtgaagctgcttattcagaaccaagatgagatgattaagtctggtaggctatcagagccgtacaagggtattgttgactgcttcaaacgtaccattaaggatgaaggtttctcttccttgtggaggggtaacactgctaatgttattcgttacttccctactcaggctttgaactttgcatttaaggactacttcaagaggttgttcaacttcaagaaggatagggatggctattggaagtggtttgctggcaacctggcctctggtggtgctgctggtgcttcctctttgttttttgtgtactccctggactacgcgagaacaaggttggctaatgacgcgaaggctgccaagggaggaggtgaaaggcagttcaatgggcttgtcgatgtctaccgcaagacactcaagtctgatggtattgctgggctttaccgtggatttaacatctcctgtgttggaatcattgtttatcgtggtctgtactttgggctctatgattccatcaagccagttgtccttactggcaacctccaggacaatttctttgccagtttcgctctgggttggctgatcactaatggtgctggtcttgcatcttaccccatcgataccgtccgcagaaggatgatgatgacatctggtgaggctgtcaagtacaagagctccttggacgcgttccagcagattcttaagaaggaagggcccaagtccctgttcaagggtgctggtgctaacattcttcgtgccattgctggtgctggtgtgctttctggctatgaccagctccagatcctcttcttcggaaagaagtacggctccggcggtgcttaaatggagaaatatgatgacgaacaagagcagtgtgtgttcccggtcctttccaatcaggatctggtgaagtttttgcctttcatatcgaagaaattaataattcatgtagagggaggattcttccaacaatttgttttggatggagacttagatctccaaacactcgtaactatcctactaggtggtgacatcggtccccaaaaacatttatggtcatagagtctgcccttcgtttgtcagtcgggcaatttttcttgcatacaatgccttcgtttaagtatcggatgagttgctgcgacc

SEQ ID NO: 26758 - DNA, 1085 bp, Zea mays
  Clone ID: LIB4574-007-C12_FLI
ctcgaggccggccgggaaaccttgctaccatataaaccttttcactgctccagccgccgccgccgccgtttcttcgtcttcctcgcagcgccgccgctccatcttccgctgatccgctcgctcccgcctctcgccacgcaggcggcggcgctcaggcccgtgatttcagcgacggcgtcagcggcttcccctcccgtctcttcccagtcgcctcgcgccctcgcctccggtcctccgcacaccggccggtgaccctgcatccaccatgactggtgtcagcactggattgttgacgggcttgaggagggtcatggaacagcaaaggatttcaaccgctttctgcagacaatcacgagtttcgagctctactgtttctttctctgacctcgatgagaagggtgacatggaatatgatgataactctccaaattcaaagagggagttacgaccccaaggtgtagatcccaataagggctgggaattccgtggtgtgcacagggccatcatctgtggcaaagttggacaagtccctgtgcaaaaaattttaaggaatgggcatacagtaaccgtttttactgttggaactggtggcatgtttgaccagagggtaattgggcctaaggatttgccaaagccagctcagtggcaccgcatagctgtccataatgactacttaagtgcttatgctgttcagaagctggtgaagaattctgctgtctatgttgagggtgatattgaaaccagggtctacaatgacagtgttaatgatcaagtcaaaaacatacctgagatatgtgttcgacgtgatggcaagattcaattggttaaatctggggacagtgctgctaacatatcattagatgaactaagagaaggactgttctagctatagtgaaagatgtcaggagtatgcttctggcttgaggcaagtttgagtatgtttgtgcttcttagtctcagcactactagtattagagtgatgcttcatgcttgcgtacccctctggctgggttttcattcgtttgaactctagcttatattgccaaatttacttatctgcagaatatttgagccctcaatgaaac

SEQ ID NO: 26759 - DNA, 1217 bp, Zea mays
  Clone ID: LIB4574-008-D8_FLI
actcgctccatacagttctcctcgcaattaacacctccgttagcacgagctgcagggagggagttgggaggagaaacagagctaccggggcgatgggcaccgtgctcgattcgcacttcctggcgctcaccgccatcgttactgtggggtaccagctgctgttcttcatcatcacagctctcctccggttcgataaggtcactgatttcgcaggcagtacaaattttatcataatcgccatcctaacattagctttgaagggagcatggcatttccgtcagattgtgctgacagtgcttgtcaccatttggggtcttcgtctaggattatttttattgatgaggattttgcaatggggtgaagaccgaaggtttgacaaaatgcgtgataatttggggaaattggcagttttttggattttccaggctgtgtgggtttggtctgtcagcttgcccgtcactgttgtgaatgcaagtgacagaaacccctcgattgaagccagggatataatcggctggataatatggttggtcgggatatgtgtagaagcaacagctgatcagcagaagcttgtgttaaaaaattctccaagtaacaggggaaagtggtgcgacgccggtctttggaagtactctcgccacccgaactactttggggagatattcctttggtggggagtatttgtagcatcgaccccagttatctcagatgccgaatggcttgtgattcttggacctatattcctgactcttctgcttcttttcgttagtggaatcccactcctcgagtcatctgctgataagcgctatggacgattggaggaataccgtgcatacaagaacactacaagccctcttatcccattgccacctgctgtgtatggttccctgcctgcgtggttcaaggttgccttcctccttgagctcccgctctacaatcctgggccgggaggtgatccaatcagttgagtggtgcttgcaaactgttctgctgcccttcagtgatgaacttgtatagaatatccctgcagtatgtttacgttttttgtttttgttttggtttgacagaactagaatgagcccattgatgggtcagcctgatgtttatgttgctattgtgtgcgtggcagttattccaccttcgattccaaggggttacagtggagtttggcccctgatttatcgctcgcgaggctcaaacatgtatcttgttggttg

SEQ ID NO: 26760 - DNA, 1432 bp, Zea mays
  Clone ID: LIB4574-008-F5_FLI
taccctcgaggccggccagggagctctggcccgcccaagttcactacccgacccgccgcgccgcagtctagaagcttctgccggccgtctgcggcccgcccatccgcaacccatggctgtcgtcgaagaagacgctgcggcgtctgcagatcccgccgccgcgtccgatcccgccgctggctccagcgaaaacgagatcacagtagaagaggcttctttcgtgcattctgaacctccccaggatggcagcgccccacccgtggtttcctctgacatggaggcccttcacgacaaggttaagaagcaaatcatcaaagaaggccatggcaggaaaccgctgaagttcgcgacgtgctttgtgcactatagagcatgggttcaaggatcatcgcataaatttgaggatacctggcaagagcaacatccaattgaactagtacttggaaaagagaaaaaacaaatgtctggtttaggcatcggtgttggcagcatgaaaagcggggagcgtgcattgttgcatgttggttgggagctaggctatggcaaagaaggaagtttttcattcccaaatgtccctccaatggcagaccttgtttatgaagttgaactcattggatttgatgatgttaaagagggtaaatcccgaagtgacatgacagttgaagagaggattgcagctgcagacaggagaaagattgagggcaatgcatatttcaaagaaaagaagcttgaggaggccatgcagcaatatgaaatggcgattgcatacatgggagatgatttcatgtttcaattatttggaaagtacagagacatggccttggctgtgaaaaatccatgccatctcaatatggctgcatgcctgatcaaactaaagagattcgatgaagctattgcgcagtgtagcattgttttgacagaagatgaaagtaatgtcaaagcgctgttcaggcgaggaaaagctaaatctgaacttgaccagacagaatcagcgagggaagatttcctcaaagcgaagaagtactccccagaagacaaggagatcattcgggagctccgtttgctcgcggaacaagacaaggcactataccagaagcagaaggagctctacaaaggtctctttgggccaagtcctgaagcgaaaccgaagaaggcaaagtacctcgttgtgttttggcagtgcctggtgtcatttatcctttatctggctgggatgttcaaacggaagaacgagtaggataatttaccagaaaattgtgtagaactggtggcctaattgaccaaccttgtattataaggagtgttgaattttctgtagaactgtcggccggtccggatcaattagttgttatgaactctatacgatgttgttcactattatgccatagtttcatacagtctttcaactggagctcaaagggccttttatgcc

SEQ ID NO: 26761 - DNA, 1212 bp, Zea mays
  Clone ID: LIB4574-008-F8_FLI
ctcgaggccggccgggaacaccattcatctcagattcagaagccttcaacttcaaatccttgcattttgaagttttctgactcttgaggatggaggctattcttgaaagaccgaagtacgagtgcttgctgtttgatcttgatgacactctgtaccccttcagtgctggcatcaatctagcttgtcgcaaaaacatacaagattacatgcggcaccacctgcatattgaagaaagccaagttgcagacatgtgcctggacctgtacaaggaatatggcaccacaatggctggccttaaggcattaggctacgaatttgacaacgatgagttccatgcaactgttcatggtaccttgccatatcacaacctgaggcctgaccctgttttgaggaccctcctactttcaattccacagagaaaaatagtattcacaaattctgacaaagctcacgcggaggaagctctgtgcagacttggtttacagggttgcttcgatggcgtgatctgcttcgagacactgaatccttgctgtggtccgagcgcgttccgagacggcaacggcatgctgttcccagatgaaacgtcccccgacttggctgatctgaatgaatccgatgggctcagacccatatcacccatcctctgcaagccctccattgaagccatggaagctgtaactcggattgcaaacgttgatcccaagaaaacaatattttttgacgacagcactcggaacatagcttcgggaaaggcagcaggcttccatactgtgattgttggcaggccgacacttgttccaggggctgaccatgctttggagagcattcacaacatgaaggaagctctacccgagatatgggacggccaggatcggtctgagtctgatgctcttctttctcccactgctgtcgagactccggtggctgcttgaatctgggggctatgtatccttcctgcgctaccatgagacctgctaccaatagttttgagtttggatagtggatgcagaaggtgcaccctaccttcttcattaatgagaaatagcattgcactcttatgttagttccaaatattaatggaactgtatcagttacattacagcagcgtgagctcaagtcgctgaacaagcaatatgcagtcagtattctgcagatgttcgcaccattctctatgtaccatgattgtacctcagaataaactgacagtactcc

SEQ ID NO: 26762 - DNA, 1066 bp, Zea mays
  Clone ID: LIB4574-009-E1_FLI
ctcgaggccggccgggaagatagccctaccgcctcgcctctctcgttccccctcatcgccacgccagtcgcctccactcccagtcatctcccatcaccgacgacgtgtcgaggcgagagaagagggcgagtccaagtctagggttcccgccgcatcgacacgggcatcgcaccgcaccgcgaggggcgggcacggaggaagatggcaccgcgcgggcgcgtggagctgcggcggatcgaggacaaggcgagccggcaggtgcgcttctccaagcgccgcgcggggctgttcaagaaggccttcgagctggccctgctctgcgacgccgaggtcgcgctcctcgtcttttcccccggcggcaagctctatgagtactcctcctccagcatagaagatacatatgaccgctatcatcaatttgcgggagcaggaagaaaagtgaacggacataacaacgataaccgggatgtagctgcttcagatttacagtcgagacttaaggagatcgcaacatggtctaaacaaaacaacgctgaggagtcggatgccaatgaacttgagaaacttgaggaactcctgacaaatgctttgaggaatacgaaagccaaaaagatgttggcaaaagaaaacaatggtggtgccggtgcaagtacaagcagccagatgttgctttactcggcagagcgtgcaaccgacaaatgaaacggggcgtgcatctgttgctaacggggcggtgccggtgccgcatactattgttgtgtagctgaggtttgtcaaggtggctgctggcaaggttagccgaggaagtggagttcaataacaggatgcggaaactgtgccgctccttgccgaacttaagccccgttacgttgtcgcacaaagtttatttcctagcactgtgcttgctgcttatgtttgtttggatgtgccaacctgcagtgaccctcgtggagcctgggtctcacgctcctcttacctagtgtgatgtgcagaaaaagtgtgatgctgtaaaattatgtgattgcctagcagatgtcaaattttcaatcagtagctaactcctttt

SEQ ID NO: 26763 - DNA, 1902 bp, Zea mays
  Clone ID: LIB4574-009-H7_FLI
ctatagaatcctgctcctgctcctgcctgcgcccgtccccttttcatgttgctttccctttcctcctcctcctcttcttcctcctcacctcacctcctatttagccgtccgaattgcttgtcagcatcttcccagcttcttcttcttcttccaaccgcgctacgctctcttgtccccggtgctcgcttggattcttctctcttcataggaaggaaggattggctaccgagatattcctactagtccagggctgtagtgcatcctgcgcgcttggtttattctgcagccagtaccagtaccagtaccccagctgagccggtgaggagaggagatagagagagcgagcgggagcgggagcgggagcgggagcagaggaggagggccatggaaggcgacagcttctccggcggcgccatggccaacggcggcggcggcggcggcggcggcagcgggcaggtggtggacgggaagctgatccacacgttccacaggagcttcgtgcaggtgcagagcctgctggaccagaaccggatgctcatcagcgagatcaaccagaaccacgagtcccgcgcgcccgacaacctcacccgcaacgtcggcctcatccgcgagctcaacaacaacatccgccgcgtcgtcggcctctacgccgacctctccgcctccttcgcgcgcaccatggaccacgcgtcctccgagggcgactcctccggcaccggcaataacggccgcgccggcgccggcgccggccacaagcgcgtccgccccgcctagagctagcttttagtttttttcttcttcttcttctgctgggtctagcttggcgtggcaatcctaggtgttgccattgccactaggaggcgtatttagtcttttctcttgcggttcttcttgttcgccttcttcctttgtgctcgctagctgcgacgaacgccggtgattagtgtatggtaatttagtgtcaaacagagagctgccatgtggatgttgctcctatgaccacgattaagacgatgaagaaacaccagagaagcggcacacggtaggcagccttgctgctgcgcttagctagcaagcatcttgaatggaaactattttgcagcgtactaggacacactcatgtcatggtggagcgaatgcgttggaggcgaggctggctgctcactctattatgtcactgcagatgggtcaggtcaggtagtaggcagttcatgttcatgttcagttcggcagggcaggacagatcttgagagggcaatgtttaccatctgacactacccctcgccctttccatccacctgcctacctacctgagctccgaatcgaatctggtgaagtgcatggccactttggagacgcgcatgggtcggtcggtcgatcgatcgatcgatctccccaactctgaatctgatgattgagttgcaaaatggtgtctagtactggcagtgcaaagtgcaatgctttacagctttacaaaacctgctcctcgctcgctcgctggctcgactcctgccgtgtctttccttcctgtcctgatgagttatcatgaaaaaaagctcagcaacatggccaagctagctagtacgttgttgtaccctgaaaattttctagtagctttttttctcccctctttctgttcctgctactaaactgaacagtatggtttggatgagggcaggctctccttttctttctgaatgccaaaacggtgaaagaaagaaagaaagaaaagcagggtctgtctgtctagtggccgtctatctgcgagatgcatgctgctgggcagcatcagcattcagcaggagcaggacgggagaaagcttcgatgattttttttttctggttggttggttgccaatcatggcgtgccacaccatggcatggccagaatcttactcctag

SEQ ID NO: 26764 - DNA, 1617 bp, Zea mays
  Clone ID: LIB4574-010-A3_FLI
gacaaccacgacgccatctcgcacgcgtgcttccacccaaccacacaaatcttctctcccaggcctaaccttcctccccgcgagctgcctctactgattttgcactggcatgccgtgacgcggaaagatgtggagatccatcttggactgatttcttccttactcggttattcgccctctgccggcgcaagatccattttagtttgcccccctcccccaaattggactacccaaggttgaagataccttggtagtcagagcatagaataagggtggactgttattaattttccataggatggaatccttgtggaagctgacctacttgctcgagccggcatcacttgctctcattgccacagctatctctgtggcctatgcatccgcatcgcgtgctctagattatggcaaagagatggagagaaacttggatttttcagaggcttccattacattggatcggtcacaggcactaatgattccccttgcaagctcatgcagtctgttgctgatgttctacttgttctcgtctgtctcacatcttgtgactgcttttactgctgtggcctctgcgatggcactgttcttttgcctgtctccgtatgtcacttatctcaagatgcagttcaatctaatggacccattcgtgtccaggtgttgttcaaagccttttacacggttgcaaggtttgctgatgctcttctgcatagccacagtcttagcctggttggtttctgggcattggttgctaaataacctactgggaatttccatatgtatagcgtttgtcagccatgtgaggcttcccaacataaaaatctgtgcgctgcttcttgcctgcttgtttgtgtatgatattttctgggtgttcttctcagaaaggttctttggagcaaatgtcatggtttctgttgccacccagaaggcatctaatcctgttcacacagtagcaaataagctcagcctgcccggattgcaattgattacaaagaagctggagcttccagtcaagcttgtatttccaaggaatttgttgggtgggattgttccaggaagcaatcctggtgactacatgatgcttggccttggagacatggccattccagggatgcttctagctctggtactcttttttgataatcggaagttcaaggatgtgaattttccaccagatgtgtctcccccaaaacggcggaattatgtgtggtatgctgtaacaggttatggtattggcttggtagctgcactagctgctgggatcttgtctcagtctcctcaaccagccttactgtacctggtgccatcgacactgggacctgtcatgtacttgtcatggttacggaatgagctatgggagctatgggaagggtctgggacgattctgaacgagaaagctcatttgttggaggtctgagatccaagtggacaataagaaggatctgaacccaccgtgattgaatctaattaaacaatacttgacctcctcataccgaaggagagtatttataagctagaatgttcagtcatgtaagccatcacctagtttcgctcgcaagaggaaacacttacaaatcatgtaactgtttgtaatagaagttcaatgcatttcagcttttt

SEQ ID NO: 26765 - DNA, 1762 bp, Zea mays
  Clone ID: LIB4574-012-B2_FLI
acaaccggacatcccaatcgaatcagatgagaagctggaggctgctctacgatctccttcggcgcctgctcaaacccaccgatactcccggccaaatccgcccggcatcacacctttccacaaaatccggccaggctgcggcgcaatccgctgccgccgacccaacccgcgcggtgtcgctcctggccgagcgggactggttcgctcggatcaactcagagttcgccgccccactccggcagctgggcccgcgcttcgtcgtccgcgcgctgcagcacgccgccggcgagccgctcctctgcgtgcgcctctacgtctgggcatcgaggttcggtcagcacttcgcgcgggaccggtccgtgcggcgcgcgctcggggacgccctgttgcggcgcgggcccgtggtgctctccgcggcactggtcgccgacgtacggagctgtggctgcgaggtctcggaggagctgctgtgcgcgctggtggagagctggggcaggctcgggctggcgcactacgcgcacgaggtgttcgtgcaagtgccgcgcctgggactgcggcccagcacggccatttacaatgctgtgatcgccgcatcggtgagggcaggcgcggtggacgccgcgtacctcaggttccagcagatgcctgcggacgggtgtcggccggactgcttcacgtacaataccctggtgcacggagtctgccgacgcgggatcgtcgacgaggcgctaaggctggtgaagcaaatggagcgggcagggatcaggccgaatgttgtcacatacaccatgttggtcgatgggttctgcaatgctagcagagttgaagaagctgtttgtgtgttggagaggatgaaggagaagggagtgtcagcaactgaggctacatacaggtctctggttcatggtgcatttcgttgccttgaaaaagaaagggcatacaggatgctgagtgagtggattgagagtgatcctactctgcattcaattgcatatcatactttgctgtattgcctctcgaagaatgatatggacaaagaggcagttgaacttgcgaagaagatgagcaaaaggggatatctccttggcagcacaacattcagcattgtgatcccttgcgctgtgaaagtcttggagtcaagtgatctgtgtgagttggtagatgatttcatcaagaaaggggggaatctgggatttgatatgtatattatgattattaaatcctttctgaggtgcaaggatatctcaaaggcaaataagtattttagtcagatggtttcagatgggcttttgtctagtgtggaatcttacaacattgtgatagattgctttgccaaggcaggtgaagtggaaagagcactggagaccatcaaagttatgcaagagtcaggtttctctcctaatcttgtgacttttaacacattgataaatggatatttgaaactaggcaatgtacatgatgcaaaagcatttcttaaaatggtcatggaacatggtttaatgccagatgtcattacttttacttcccttattgacgggctatgtcatacccatcagctggatgatgccttcaattgcttcagtgagatgtctgagtggggtgtcaggccgaatgtccagacgtacaatgttctaatacatggactttgttcagctgggcatgttagcaaggccattgaacttcttaataagatgaaaatggatggcattacacctgatgcatattccttcaatgcacctattttgagtttttgcaggatgag

SEQ ID NO: 26766 - DNA, 1420 bp, Zea mays
  Clone ID: LIB4574-012-F10_FLI
gagtgccccagccccgcgccccctagaccaaagcagaccagaatccgccctaccaatcgcctccccagatcggcggcgatggcgtcgtcgcaggcgaacctcgacaagatgcagctccgccagggctaccgcaacgtctggcacaccgacatgacgaacgccatccaggccgacttcccctactgctgcctcgcgctgtggtgtggaccttgcgtgtcgtacatgcttcgcaaaagggctctctacaatgacatgtcaagatatgtctgttgcgctggctacatgccatgcagtggaaagtgtggcgagagccggtgcccagagttctgtcttgcaactgaggtgttcctttgctttggcaattcagctgcatcaacccgcttcttgctgcaagatgaatttaacatacagaccactcagtgcgacaactgcatcattggcttcatgttatgccttcaacaagttgcttgcatcttctctatagttgcagctattgttggtagcgaggagctttcagaggcttcccagatccttaattgtctgtctgatttggtctactggacggtttgtgcatgtatgcagacgcagcacaaagtcgaaatggacaagagggatggaaagttcagcccacagcctatggcagtgcccccggtgcaacaaatgacacgcatcgatcagcctatgccgcctcctgctggatatgcaccgcaaccagcatatgggcagccttatggtggctatccatctcctcctggccaaggttatccacctcctcctggccaaggttatccgccagctggatactcccagggcggtgcataccctccacccgctcaaggttacccacagggtggtggatatcctccacctggtcaaggttacccccagggtcagggtggtgcatatcctccgcctggttcttaccctccacaaggttcctaccccccagcagagggctcctacccagcacaaggttcctaccacccagcacagggctcctacccagcacaaggttcctattccccagcacagggcccctacccagcacaaggttcatatcccccacccccagcacaaggttcatatcccccagcacagggctcgtacccagcacaaggttcctaccccccacaggcttaccctggcaagtaaagatcacacgacaggtgaaccaaatatcgtgaacatgtaaacagtaggaccgctttagcgctataggttattttgataaaattctttactgttcagggtggcattcggtgaacaatatttctattttatatggtcaacctgtcaacatcttgtgttgatcatgtcgtgttgagtctatcctcttttttttttcctgaataaggaatgacattgaactggaatgtatttgaatttggtgacaactcacgtggatattgttttggttctg

SEQ ID NO: 26767 - DNA, 1563 bp, Triticum aestivum
  Clone ID: LIB4600-012-A1_FLI
catcctcctcctcgtctccgcgcctggacctcgcgcgcatctcgcccgcccccctctcactcgcccaggtctagggttccggcgcccgattcgggccgaattggacggcgccgcggcggatcgggggtcggaggagcgcgggcgagagatgacggggaagaagcgagggagaacagagcagagcggagcagagggcgatgaagatccagtgcaacgcgtgcggcgccgcggaggcgcgggtgctctgctgcgccgacgaggccgcgctctgcgccgcctgcgacgaggaggtgcacgccgccaacaggctcgccggcaagcaccagcgcgtgccgctcctccccgacgccgccgcgccgcccaagtgcgacatctgccaggaggcttctggatacttcttctgcctggaggaccgtgctctactttgtagagattgtgatgttgctatacacacagtgaattcctttgtttcagcacatcaaaggttcctgctgacaggagttcaagttggcctcgatcctgccgatcctgttccacctgttgctgacaagcacgttaacacttcaggtggatcagtggattcactaccgaaacacttgccaaagaaaaatcctacagccctattttcaggtgaaaacagtgcatctattcccagccaaaatgtaatcagtggagattattcaaggcagatttctgctccaaataccaagacaggaatgaccaattggactatggacaacagtgcacttagattggcagagcctccacctaagtacctgtcagatggaaattcaaaacttctgctctctaatcagaccaccacagctttatccaaccaaatgaacagagatagtggccgggcttacaacttaccattctcaggcggcaatgggtcagacagtttacctgattggcctgtggatgaattcttcagtaactgaatatggcccaaactttggcttcactgagcatggttcttccaagggtgacaatgctaagctggggactgctgggggatctccacagtgccgtctagctgaaggcctgtttgcagaagacctgctaggccaggtacctggattagatgctgaggatccatgggtggtgcccgaggttccctccccaccaacagcctcgggtctatgctggcaagggaacttgcattaccctgtgtatgacggcgccatgttcgtccctgaagcaccctccctgcagagctcccaggaccacttcactgcatctgctggtttcaagcgtcgaaggagagagttttgaatacccgaaagaatatagcgttggacatatctgtcgaacaggggatcttgctgtaggtctcttggtgagccaaatcgcatagacaatcattcaaatggatgggttcttcgccggtcggtcaaaaaaatatatgttgtaattgtacgccttttttgggtcttgttgctgaagatcatggttagtgagttgtgagctctgagataacaggtttgtgtatagtgaaataaagaggagcgtcgtcaacaccatgtactatacaggtttcaaaattccattgagatgcatcag

SEQ ID NO: 26768 - DNA, 1822 bp, Zea mays
  Clone ID: LIB4602-001-G8_FLI
ggaggcgtcggcggagcgggccgcgttgggaggcggcgagcggccctcggtcgcggcggggcaggcctgccgggcgaagaagggcgaggacttcgcgctgctcaagcccgcctgcgagcgacgccccggcgcgccgtccacctccttctccgccttcgccctgttcgacgggcataacgggagcgccgcagcggtgtacgccgaggagcacctcctcgccaacgtgctcggctgcgtcccggccgatctgagcagggacgactggctcgccgcgctcccaagggcgctcgtcgccgggttcgtcaagaccgacaaggattttcaaactaaagctcattcctcggggacaaccgtgacacttgccataattgatggctccgttgtaactgttgcgtccgttggtgactcacgttgtgtccttgatgctgcgggatccatctactatttgtcggctgaccaccgctttgacgctaatgaagaggaggttggacgtgtaaccgaatgcggaggtgaagttggaaggctaaatgttgtcggtggtgctgagattggtccccttagatgttggccaggtggtctatgcctctcaagatcgattggtgatcaggacgtaggtgaatttatcattccggttccttatgtgaagcaaattaagctgtctaacgctggaggtcgtcttattatttcaagtgacggtgtttgggatgctttgactgcggaaatggcttttagatgtgcacgggggcttcctcctgaggctgcagccgagcaaattgttaaagaagcagttgaatcaaaaggattgagagatgatacaacttgcattgtcattgacataataccaccagagaaacaaaaatgcactatagaatctccaaaaacgccaggaaaaggccttgtccttctaaaaaatttcttcttaaggaaaacggcatctggttcattgtctctcgctgacaaggataattatcccgagccagatttcgtggaggaggtctttgaggatggatgcccatccctttcgaggaggcttaattctgaatatcctgtccgagatatgttcaagctttttgcatgtgcaatttgtcaaattgacttggagtctggccaaggcatatccatacacgagggttcgtcaaagacagggaagctgcgtccctgggatggccctttcctttgtcacagttgccaggaaaagaaagaggcgatggaggggaagcgtcactcgcgagactcctcgtcaagaaatagcgggtcaagtgaatagtgactaaagccaggagtcatcttgaggcgaccacctagcggtgtgacgagctaactcttgttgcagttgtcattgtagcagcacttcctctatacatggattaccattggacatagacagatgttggaacttggatggtgccatgcgtacatatgttggacctaatgcggtaatggaccgtcggccaaattcaatcgcctctaggtaccacaccggcgacggcgtcttcggcaaggcttgtagcagtagctcatgcaggtagtgatgacaagggactgttagcgaagaatgtcgacagcggccaatggtcatgtaaattgttcatcgtatagaggtgcaagtgacaattagccacggttttgtaattctgagctaggattagctattgggaccctgtaattcgtctgggcagacctcaaactagaggtcaacaacgtagcctggcctattgtagaatgtatcttgccctacagtcttcatgatacaacgctgtaattaggctggtgccggtgtaccatcctctcgttcttctatgttagatctcgactccactct

SEQ ID NO: 26769 - DNA, 1874 bp, Zea mays
  Clone ID: LIB4602-003-F4_FLI
ccgaggtggaggaggaagaggtagagggggcgggccccatcatccatgagccttgcgggctccgcgctggaggcagcgctactggcggtggggcgcggcctcgacgcagctggagaccaccggctgctttactgcaagggagacggaaggctcgtcgcgctcgaggaccgtgcgcgggacctcccgctccccgacggcggcgtcctcccgagcgtgccccacgacgtcgaggtcgagcagtgccgcagagacctcgagcgcatccgccccttcccgtccgggtccggcccaagctccgccgcagcggacggtccctttgtctgcagcttcgataagatggctgagtatttcaacaggaagtcatgtttgtccgagacagtaccgctgggttccttcaactctctcttcagcttcaccggttcttggaagaatgatgcggcgaccacgaaggcccttgcgattgatggctattctctgcctctgtttcgagttaaaattaggaattctgaactgacgctgcttgagagcgttaagcgaaggatcccaaatgtttgggatccatcagcattggcaagctttattgagaactatggtacccatattattatctctgttacggttggtggtaaggatgaggtatacattaagcagcattcattgtcccaattgtcagagctggagttcaaaaattatgcgagggaaattgggagggaaagatttgcagatgtggaaaataagtcaaatgcatcttctatcaattacagtgagaaggatatgacagtaatattcagaaggaggggtggttgcgaccttgttcaaagttttagtgattggagaggaactgttgcctcagcaccagatgtcataggcatcacctttctatcaattgtctctcttgttgacgatataccaggaaagaagcaccttgctcgtgcagttgagctatacttgacctacaaacctccaattgaagaattacagtacttcttagattttcgagtcccactagtttgggctccagctccaccaggtattgctggtcaccataggaaagaaccagtctgcccatcgcttcagtttagcttaatgggcccaaagctcttcattagcacagaacagatctctgttggccgtcgaccagttgttggcctcaaactgattttggaaggagccaaacagaatcgtctggctattcatttgcagcaccttggctcattaccaaaaatattcctacctcattgggactcctatattactattggacctccaaaatggcaaggtcctgaagaacaggacagccgatggtttgagccaatcaaatggaagaactttgctcatgttagcacagcacccatagagtacactgaaacaaatattacggacctatctggtgtttatattgttacaggagcacagttgggagtgtgggattttggtgcaaagagtgttctccaccttaaacttttgttctccagggttcctgggtgcacaattagaagatcagtgtgggaccacagcccatcaagttcctcggtacatagaacagatgaatcttcgtcatcctcaagtgataatgctaaacttctgaagatcgttgacctgacagaaacattcaagggcccacaagatgcgcctggccattggctgatcacaggtgctaagttgggtgtcgagaaaggcaggattgttgtgcgtgcaaagtactccttattgaattattaaccaaatgtttaaatcattcaatcactctgatattgagcactgtgttttaaggtagcatttgttcttttgtttttcatgtatggcttttgttcccccttgtaacatgatgtggatcatgtttcttgttgatgatgccgtgagtgaagcactat

SEQ ID NO: 26770 - DNA, 2172 bp, Zea mays
  Clone ID: LIB4602-005-A6_FLI
cgagagacctcttcgcatcccgaggcggcgcttttggggtcggaagcgacacgggcgccgggcgggtccgcgggtggtggtgctactgctagcaagcagcagcaggcgacgctaggcgagagccccagtcggagcaggccaccatgtgcggcatcctcgctgtcctcggcgtcgctgaggtctccctcgccaagcgctcccgcatcattgagctctcgcgcaggttacggcaccgagggcctgattggagtggtttgcactgtcatgaggattgttaccttgcacaccagcggttggctattatcgatcctacatctggagaccagcctttgtacaatgaggataaaacagttgttgtaacggtgaacggagagatctataaccatgaagaattgaaagctaagttgaaaactcatgagttccaaactggcagtgattgtgaagttatagcccatctttacgaagaatatggcgaagaatttgtggatatgttggatggaatgttctcctttgttcttcttgatacacgtgataaaagcttcatcgcagctcgtgatgctattggcatctgccctttatacatgggatggggtcttgatggatcagtctggttttcttcagagatgaaggcattgagtgatgattgtgaacgcttcataacatttcccccagggcatctctactccagcaagacaggtggtctaaggagatggtacaacccaccatggttttcagagacggtcccttcaaccccttacaatgctctcttcctccgggagatgtttgagaaggctgttattaagaggctgatgactgatgtgccatttggtgtgcttttatctggtggactcgactcttctttggttgcatctgttgcttcgcggcacttaaacgaaacaaaggttgacaggcagtggggaaataaattgcatactttctgtataggcttgaagggttctcctgatcttaaagctgctagagaagttgctgattacctcagcactgtacatcatgagttccacttcacagtgcaggagggcattgatgccttggaagaagtcatctaccatattgagacatatgatgttacaacaatcagagcaagtaccccaatgtttttgatgtcacgcaaaatcaaatctttgggtgtgaagatggttatttctggcgaaggttcagatgaaatttttggtggttacctttattttcacaaggcaccaaacaagaaagaattccatgaggaaacatgtcggaagataaaagcactacatctgtatgactgcttgagagctaacaaagcaacttctgcctggggtgttgaggctcgtgttccattccttgacaaaagtttcatcagtgtagcaatggacattgatcctgaatggaagatgataaaacgtgacctcggtcgaattgagaaatgggttatccgtaatgcatttgatgatgatgagaggccctatttacctaagcacattctctacaggcaaaaggaacagttcagtgatggtgttgggtatagttggatcgatggattgaaggaccatgccagccaacatgtctccgattccatgatgatgaatgctggctttgtttacccagagaacacacccacaacaaaagaagggtactactacagaatgatattcgagaaattctttcccaagcctgcagcaaggtcaactgttcctggaggtcctagtgtggcctgcagcactgccaaagctgttgaatgggacgcatcctggtccaagaaccttgatccttctggccgtgctgctttgggtgttcacgatgctgcgtatgaagacactgcagggaaaactcctgcctctgctgatcctgtctcagacaagggccttcgtccagctattggcgaaagcctagggacacccgttgcttcagccacagctgtctaaccttatgtttatcacccagcaatgcttgaaacagcaaaggttgtccattgcttgtttcagtttccttccgatcatgtttttagttccatcaatcaagcaatggagacatgcttgtgcttcatacttggcagcatcgtgtttgggttttcactgggcagtactgtttaatttttatggactgaaaagactcagttttgtaaatattcgtcactgtgaccaattcctgtggtggtttatgtgatttgcagattgc

SEQ ID NO: 26771 - DNA, 1541 bp, Zea mays
  Clone ID: LIB4602-006-D7_FLI
gatcatcacatgcgccaccactgctcgtcacggctaagccgccgccgccgcgcgtttatctgcttcacctgctgcaggcagcgcgggacgatgagctggagaagagccgccgcaagcccggcggcggcggcaaggcggcggcggtccggtgccacccggtcctggcggaggagcgcaaggcgtccatcaggggcgtggtgggcgacctgctggccatggcgggcggcggccggaggagcctcatctcgctcggcgtcggcgacgcgtcctcccacgcatgcttccgccgcggcggggagttcgccgccgaggccgtcgcccacgccgccttgtccggcgccttcgactgctatgcgccgtccttcggcttccccgacgcccgccgcgcggtcgccgcccacctgtcgaccggcgcggtgcaccgcacgcacgaggccgacgtgttcatgacggcgggcggcacgggcgcgatcaccgccatcgccacggtgctcggcggcgcgccgggggccaacgtcctgctgccgcgcccgggcttcgcgccgtacgaggccgcctgcgaggtggccggcgccgagccccggttctacgacctgctgccgcggcgcggctgggaggccgacctcgccggcgtgcgcgcgctggccgacgccgccacggccgccctcgtcgtcatcaaccccaacaacccgtgcggcgccgtctactccgctcaccacctccgccagcttgctgaaaccgcaagagagttggggattcccatcgtagcagacgaggtgtacgcacacatggtcttcggcggcagcaggttcgtgcccatggcctccttggcgcacatcgcgccggtcgtcagcatcggagctctgtccaagaggttcatgctgccaggatggcgtctcggttggctggccttctgtgatcccaacggcgcgctcaagcatgtcagggctgcgaccgagatgctgctcaacgtgacttctggccctgcctccatagtccaggcggcggttcccaagatcctttcagctgaacaccatgagttccataggaatgttgttcacctgctcgagtctgcagctgatgctctgtacagaagagtgaaccaaatcgaagccctgcggtgctactccaagcctgaaggctcaatgtttatgatggttgagatcaacacttcaattctacatggcgtcgccaacgacatggactttgctcgtgagttgatcaaagaagaatgtgtcctggttctacctggttctgtcattgggttgaagaactgggttaggatatttttcggagcacctgttagtttaatactagaagcttgcgacaggattgagatgttctgccgaaggaggacgctcaagcaaaacaactgaagagctgaaaatgttttgaaaccaggaagtagggtttttgttagcccagtaacatatatatacagcttcgatttattttccaatgcacattctgaggtttgcatatagaaaactgagaacagatgcttgtctatagttaaaatatatgttatacataattccaag

SEQ ID NO: 26772 - DNA, 1345 bp, Zea mays
  Clone ID: LIB4602-006-H10_FLI
tttcaccgtcgctagcgccgacacggggtgccaggaacctccgaatacgctggtggactgggcgctggagatcctctccacagccgatccggacgagaaggcccgcctcggggacctcgccgcgtcgcggtggctgcgcggcgacatcccgctcccctacgacccgtcccgccccgcgcgcccgccgcccgaccgccccgcccggagcgccgaggtgcggctgctcccgccgtcgcggatgccgaagctgggcaagggcggcagcgcgcagagccgtttggccatgctccactcgctggcgcacaccgagagctgggctgtcgacctttcctgggacatcgtcgcccggttcggggcggccatgcggatgccccgcgacttcttcgacgacttcgcgcgcgtcgcgcaagacgaggggaggcactacacggtgctctcagcgcggctgagggagctcgggtcgcactacggcgccctcccggcgcacgacgggctatgggactcggcgatgcgcacctcgcatagccttctcgcgcgcctcgccgtcgagcactgtgtccacgaggctaggggattagatgtccttccaacaaccatatcaagattccgagcaggtggggatgagcaaacagcgagactactagaagatattatttatcctgaagaggtgacacattgctcagctggtgttagatggttcagatacctgtgccttaggtcccacggtaatcacccaacctcatatccagttcctggactggaaccccgttcctctgggctgccgggggatggcactgctgatggtaagacagctagggaggctgaaggtgaacctacacccaaactggcgaaagacgtcaggggtgacgacaagatggtccagcaggtggaagatgaactgccatccaggattgcacaggatgctaatggtcgatctaaggtgaccgaacacgtcgaggacggattatcaaagtgcaaacttgatgacagtattgagaaatacgaagagttggtcattaggactttccacagggtggtaagagagtatttccggggacccctgaagcctcccttcaacacggaggcgaggaaagctgccggctttgagcctgcctggtatgaacccctggcagtgaaggaggcatgcacagagggggagacaattgagtgatgaatttgcactgttgttgtactagtgtctgtgctatgtagcaggctagaaggcatatttgaaaatttgctgcgactagcgttccagtaccattatttgtttagcagatggtgcagcgctgagccttttttctaatcatgtttgtttgtttgcttgccatggagacgcatgaac

SEQ ID NO: 26773 - DNA, 1451 bp, Zea mays
  Clone ID: LIB4602-007-C6_FLI
cttccttcttctccgtctcgtcgtccctttccatttcctctcccatttatgtccccgcttcaggtctgccaaataaacccccgaaaagcaggagagcgagacccggtagtggaagactagggttagggtcccagctccgccgttgtctgggcgagtcgagacatggccggccctgcccccgccgttgcagccagtgccgccgcctcacagtcgccgccgatgcagctgccgtcgccgttcgcggagctagtcaagggttcctccggcctcgagaagatcgtgcttcgcggcgctcgcaactgctgtgccgagatctatctttatggaggtcaagtaacatcatggaagaatgacaatggggaagagttgctttttctcagcagcaaggctattttcaaacctccaaaagctattcgtggtggtataccaatttgctttccccaatttggaacacatggaaatcttgagcaacatggatttgctaggaaccggttttggactatcgacaacaacccaccccctttaccagtaaaccctgctattaaggcttatgttgatctgattttgaagccttctgaagaggatttaaagatctggccccacagttttgaatttcgcttgagagtttctcttggaccttctggagatctgagtctcacatcccgaatcaggaataccaacacagatggaagacctttctcttatacatttgcatatcacacatacttctctgtctctgacataagcgaggtgcgtgtcgaagggctggaaacaatggactaccttgacaacttgaaggcaaaggagcgtttcacggagcaaggcgatgctattgtttttgaatcagaagttgataaagtttatcttgccgcaccctctaaaattgccatcattgatcatgagaagaaaagaacatttgtcgtgacaaaagaagggcttcctgatgctgttgtttggaacccttgggacaagaaggcaaaagcaatgcaagattttggggatgcagaatacaagagcatgctgtgtgtggagcctgcagctgttgagaggcctattactctgaaacctggggaagagtggaaaggaaggcttgtgctttcagctgttccttcgagttactgtagcggacagttagatccatcgaaggtccttcagggttgaaaatcctcactttctgcatcttgtacagaagttcattgcccttgatatttgatgctgggctggcgtcaacgccgcatgttccttttgccatttccaccccctatatttctggtcccttttgtatctagaatttgagtgataggttgattccgaataacagtctgtgatttgagcttaggattgggtcatctcatcgatgaatgataccgctggacaaaatgctggcgtacgtgtcagtttcataaatcattcttctcataaattctttagcatgtacttcgtagttgatc

SEQ ID NO: 26774 - DNA, 1633 bp, Zea mays
  Clone ID: LIB4602-007-C9_FLI
ccctgctcctcctcgttctctgtgatgctgaggctaaaagctctcacctccctgctcctgctcctcctcctcgctctctgctccggtgttcatctgtgcgacgcgaggagtcggacgacgcgaggcggcagcggggcggcaccgtccgcctccgctgctgcgatcgggaggaaagggaaagcgaggagcagcggctcctcccacaggcaaagcggcgaagggagtcggagcccgaccgaaggcgaccccgtgcagggcgatggaagccaggctccagcacaggatacggtcttcagcgtgttggagttcggagccaagggtgacggcgttacagacgacactcaggcctttgaagcagcgtgggcagcagcgtgcaaggtggaggcgtctacggttcttgtaccatctgggctcgagtttgtcgtgggcccgatctcgttctctgggccttactgtaaaccgaacatcctgttccagctagatggaactattttggcccaaaccagcgcaagagcgtggggctctgctggtctgctgcagtggctggagttcacgaagctaaccggaatcgcggtccaaggcagcggtgtgataaacggcaggggccaggactggtggacgtatgcagacccaaacgatgccgacgacgagtctgtggagatgctgctaccacagactaagcccacggcgctgaggttctatggcagctccaatgtcacggtagctgggatcacgatcgtgaacagttctcagtgccacctcaagttcgacagctgcgagggcgtcatggtccacgacctgaccgtctcgtcccccgaggacagtcccaacaccgacgggatacacctgcagaactccaggggagtcgacatccaccacgcgacactggcctgcggcgatgactgcatctccatacagacggggtgcagcgacgtgaacatacacagcgtgaactgtgggccagggcacgggatcagcatcggtggtctagggaggttcaacacgaaggcgtgcgtgtccaacgtcaccgtacgagatgtcaagatgttcaggacaacgacgggtgtcagaatcaagacatggcagggcgggtcggggctggtgcagggcgtgaggttctcgaacatccaggtcacggaggtgcagacgcccatcatgatagaccagttctactgcgacagggcgacgtgcaggaaccagacgtcggcggtggccgtctcgggcgtccagtacgaggacgtcaggggcaccttcaccgtcaggcccgcgcacctggcgtgcagcgacagctcgccctgctcggggatcaccctcgccgggatacagctccagcccctgccgctgccgcagcaccgccgcctgtcgtacgaccccttctgctggcaggcgttcggggagctgtacacccccaccgtgccccccataccttgcttgcagatcggcaggccggcagcagggaacagcgtgctgtccgacggcgacctttgctgaaacgccgatcggttcatcagttaagctaaggcggtcgtcgtgatgcttccgacccctgctttgcacgatgtggattgtggagtgtcagttgatgatgcatcatgcatgcatgcgtacgtgggatacttgaggccgatttact

SEQ ID NO: 26775 - DNA, 1618 bp, Zea mays
  Clone ID: LIB4602-008-F9_FLI
gatgggcatctcggcgaggtggctcaagtcattagttgggctgaggaaggtggagcagcagccgcgtaaggagagtgcagatgttggacgaatgtttcattttcagaatcagcgctctcaagatgacagcagcattgctgcacaagaagaaattccagaggttccttatggaaatgatccacctgaagatgattctaatgcaccttcatgcttggaacccacttatagttcagctgatgtgccactgtttcaaactgaagaggaactgaaagagatctgggctgctacaattattcagacaacattcagagctttcctggctaggagagcccatcgagctttaaaagggttggttaggcttcaagcccttgtaagaggtcacatagtaagaaagcaagctgatacgacacttcgttgtatgcaagctttggtcagggttcaggcccgtgttagagcaaggcgagttcgcatggctttggaaaaccagactgatcagcaaaatacttcaccagagcacacgaccgtggcacgtgtcagagaaattgaggatggctggtgtgatagtattggttctgtggaagatatccaagcaaaacttctaaagaggcaggaagcagcagctaaacgtgagcgagccatggcctatgctctagctcatcagtggcaagcaagttcaagacaaattacagcatttgagcctgacaagaacagctggggctggaattggctggagagatggatggctgttcggccatgggagagtcggttccttggcacttacaccgcagatgggattttcgtagtcaatgaaaccaagcaacctgacagaagtgcaaccaagaccccctacagaaaacctgttaaaaagcatgattcaacccttcaatcaaacatgttgaaccagaagggcttcccatcaaactcagagggtgttggctcctcgacaaaccgacccagtggtttggtatctactaaatctagactcaaggttttacccagagaaggttctgaggaagccccgtctcgtccttcaccacttgtgcggtccgctagtaatccgaaggagaggacttccggtattaattctaaggagagaactggggacttggattgtcaagctcataaaaggttctccttgcctggcattggttcagaagctggtagacacctgacaaagaaaggcacagttaaccgatccctgaaggccacaaaagattcccacatgctggggtcaaggcatcatcttgccagttgcattgatccagttcccactagagttgagctggagacttaacttggatgccattcatgtctgcatggctgcatcgctttactggcggcggcggcggctttcaacaccgaatatgcggtctagatgtgcgcttatctcatttcaaatcagatgcacgtcagcctgtccatacatgctgaggttaccccattgggcctttgagatgtaaattctgtcgttgagtcgagtggtatgcttatcatgtgtttatcggtgaatgatgttggtatagttgtaacttggaaggctaagcgaagttgtaccgttgtattgttgtatttggtattgccgtattgatatatagattgcacatgcgtcttgcagttg

SEQ ID NO: 26776 - DNA, 1506 bp, Zea mays
  Clone ID: LIB4602-009-A7_FLI
ctcctctcgtccatccgttcctcccttcccctgcttcccggctctccctcccccccatccctgcacgtcccttttcatgcgcgaggaggggccgtggggaccaccaccagcacctccatccgcgcgcatctcgcggtggtgctcctcctcctcctccccctgctcccggggcgggcgctctcctgttcctcctcctcctgctgctggtgccagggccgggagggcggcgcggaggtggcgctcatggggctcgccggggacgggtcggcggacaccgccaacctcagtaatagtgaaaatggtcggttcagttatggagttgcaagttctcccgggaaaagagcatcgatggaggacttctatgaggcaaggatagacgacgttgacggagagaaagttggaatgtttggtgtgtatgatggtcatggaggagtcagagcagctgagtacgttaagcagcatcttttcagcaatttaatcaaacacccaaagttcatcactgataccaaggccgctattgctgaaacttacaaccgcacagattcagaatttctgaaagctgatagcactcaaactcgagatgctggctcaactgcctcaacagctattattgtaggtgatcgtttgcttgttgcaaatgttggagattctagagctgttatttctaaaggaggacaggcgattgcggtttcaagggatcacaaacctgatcagacagatgagaggcaaagaattgaggatgcagggggctttgttatgtgggctgggacatggagagtgggtggcgttctcgctgtctctcgagcatttggtgataaactcttgaagccgtatgttgttgctgaccctgaaatcaaggaggaggtggtcgacagctccctcgaattcctcatccttgctagcgatggactctgggatgttgtcactaatgaggaagctgttgccatggtcaagcctatccaggacccccaggaagcagcaaacaagcttctcgaagaagcttcccgaaggggaagctccgataacatcacagttatcatcgtccgcttcatagacggaactaccggtgagaaatcaggcgacgacaaagagaccaccaacgaccaacactcctagctgtctcgtgtagggatccatcgtgctgtgtgttcttctggctgttgtacctgatgctcagagtagacgctggctgctgctccgcaaggaaactgactcccccgaccgccgttcatgctcctggctggctggctcgctggccgcctcgacgggaacgctgccgtagaatgacgactggggctggtgttgttgttacagtatggtccttttttctttcttctttcccctttcatccattaagctctgtgatgtagctgcccgtggtgttgattcatgaaatcatgctagagattttttcctggcagtaagtgcgtgcctgtaaaactgtcgaactatttggacgaaagttgtacactgcagtatgatgtaaccatcaaaatctcccctaac

SEQ ID NO: 26777 - DNA, 1159 bp, Zea mays
  Clone ID: LIB4602-009-F12_FLI
tcaggtaaaaaaaaaaatcaaaaatagaaaaagtctcttgcccccgcggccgtgccgagccggcatcccctcccccagcaacgatcgcgacgacccaaaccggcaagggtgaccagcggctggccgccgccgcggcagacgagtcccatgggagacaacaagtctccgctgagcctgagcccgatgggcgggcgcgaccgggaccgggagctcctcatcccggtctccggcggcggctcggcgcccggcgtcgatgacgagggcgctgacagggcctcctccgcctccgcggcgctctcctcctccggccgcgaggctttccataaggtcgtccgcagttgggcttcaaagaagttcatgactggatgtgtaattctcttccccatagcaataacgttctacatcacctggtggttcattcattttgttgatggattcttctctccaatatatgcacaactaggaatcaacatatttggtcttggcttcatcacatctgttactttcatatttttgatcggagtctttatgtcatcttgggttggggcatctgtccttagccttggcgagtggattattaagcgcatgccccttgttcgtcatatctacaatgcatcgaagcaaattagtgctgcaatatcaccagatcagaacaaacaggcattcaaggaagcggtcatcataaggcatcctcgtgttggagaatatgcgtttggtttcatcacatcgtcagtatctctccagagttattccggtcaagaagatctttactgtgtctatgtcccaacgaaccatctttacattggcgatatcttcatggtgaattcaaaggatgtcataaggccaaacctttccgtgcgtgaaggcatcgaaatcgttgtgtctggtggtatgtcaatgccccagattctgtcaaccctcgacccggagatgatccttggtgacagaaccggaccaagcagaagctgaagctgccacgagccctttgtgtaacttttgtagtggtttgctagtaacattttcatacaggctaccaagagtacggcgaactgaacttggagcacaagtatctctgtattaagggttgagctgtgccttttttttgttttgaaaaagctgctgtgagttatgtgttatacaatagctgttgtgagttgcg

SEQ ID NO: 26778 - DNA, 541 bp, Zea mays
  Clone ID: LIB4602-009-F5_FLI
ggctgtcagcaagtagcagcttctgtcgcgtctccccctccctgaccgagcgatccagcgagagggagcgagtagcagccgcagccggaggagctcgccgaggccgccgaagacgaccatggggttctgggcgacgacgctcatctttgtcctcgccggcgtcgccgcatccctcttcacgctcctctgctgcaaccgcgggccctccacaaacctgttccatttgaccttggtgactacagctgtaatttgttgctggatgatgtatgcaatcgtctaccttgctcagatgaagccattgatcgaccccattctgagcggagagtgagcgctgcatctgtattgaacagaacgaaagcgagacctgctgtaccattgttcagtccgtgaactttatattcattttggccccacctgatgaaataaataaataaactgccatgatttttttggtgccactcttcacccgtgattagtgtatgcaattgcatgatatacgcagtaataacatataaatatctatgtatcgatcatgtgcttg

SEQ ID NO: 26779 - DNA, 1269 bp, Zea mays
  Clone ID: LIB4603-002-A4_FLI
gcgtctgagcagcggccacccattcgttgttcacccagggagtctcaggtcttccgtcggctggcatcggccaccgttccatcgcatcgccgaccgccgccccacatcccaccgcggcaccgccccacagacaaagagatattcaaatcccttgatgatgagactattactagaagattccagcgtcttaaaactagaagaatgcacttgcctcgagtcataactacaagattaacaacttagtgattggatttttgtcggtgattttggtgccgcgctgcagattaagagagaaatttcgtcttgggcagttcggctgacagaccaacctacggcctggattggagacttatccgcgacccctcctccccacttcagcttcagcgcaagccatcttcccgccacaggctcaaaagcaatcaagcgactcctcccacagtcccacttccactcccacccacccacacgcacggccgcaggcagcagcaccatgtggtcggcagcaacggcggcggcggcgcgcgcggtgtccgtgtccccagtcccggcgccttcgctcctcagcggccggcgcggcgggtcgcggggcggccgggggtcggtgtcggtgcgcagcacggtgtgggacttcgtgggcggcgacctggtgcggccggacctgggcaagtggctggacgacgtggagaagcacaaggcgctggccatctacccgccgcacgagggcggctacgagggccgctacctgaaccgcctccgctaccagggctactacttcctcgacctctccgcgcgggggctcggcgacccggagaccacgctcaccaaggtccaccccgtctgcccgcctagcctcggcaggcagccggtggcgcggtggtacttcccgccggaggtggactacaggctcagcctgctgcacccggacgccaaaggcctcgtcgtctggatcatcgaagccaaggttctgtccaaggctgagctgcagttcctggccatgctcccggacatccgccccaaagtcagggtgatcgcagaatgcggcaactggagaagctttgtttggaagccactgaagcagatcgcaggcctcgagccggacccggacgcggaggaatgatcaagcaagcaggtctagctagttgtctaccagactggctactgctactgctacactctccaattgcttctggacatctctccctgccattcctgcagcttcgcactgaatgagagaggcaattaataaagatatacatacatttttttggc

SEQ ID NO: 26780 - DNA, 2146 bp, Zea mays
  Clone ID: LIB4603-003-C1_FLI
gagagagagaggaggaggagaaggagaggtttttatgtatgtgtggtggacatgcgtcctcctgtcgtctcgagagagagagagagagagcggaggccctaatactccaatcaccacgcaccaaactagctagctagcagtcgtcttgcattgtagctagtccattgctctcatcttctcttcttcttcctccaatcctcccccctttcccctcttcggcctctctcgctcagctcgctcttcattaagctcacgtcgttcctcccttcttcctcttcttcttcttatccgttgttcaattcgttcagctagccggccagagatcgagcatcatctccatcatcgatcgatccatctcatctctttctcttcttctattctatgtcgtcgtcgtcccagattagatcgaagctgctagcagtctatccagtctctagctagctagatcaagcccgcagactatataatataatacaagctagctacgtgcttattgctttattagtctagaagaataatctagatatatacgatcgaacatatatctcgatctccaccgatacacacccggccctatccatgcttgaggtgtcgacgctgcgcggccctactagcagcggcagcaaggcggagcagcactgcggcggcttcgtcggcgaccaccatgtggtgttcccgacgtccggcgactgcttcgccatggtggacgacaacctcctggactacatcgacttcagctgcgacgtgcccttcttcgacgccgacggggacatcctccccgacctggaggtagacaccacggagctcctcgccgagttctcgtccacccctcctccggacgacctgctggcagtggcagtattcggcggcgacgagcagccggcggcggcagtagcacaagagaagccgtcgtcgtcgttggagcaaacatgtggtgacgacaaaggcggtggtgtagcagtagcctccagaagaaagctgcagacgacgacgacggaggaggattcttctcctgccgggtccggggccaagtcgtcggcgtcggcagagggccacagcagcaagaagaagtcggcgggcaagaactccaacggcggcaagcgcaaggtggactggacgccggagctgcaccggcggttcgtgcaggcggtggagcagctgggcatcgacaaggccgtgccgtccaggatcctggagatcatgggcacggactgcctcacaaggcacaacattgccagccacctccagaagtaccggtcgcacagaaagcacctgatggcgcgggaggcggaggccgccacctgggcgcagaagcgccacatgtacgcgccgccagctccaaggacgacgacgacgacggacgccgccaggccgccgtgggtggtgccgacgaccatcgggttcccgccgccgcgcttctgccgcccgctgcacgtgtggggccacccgccgccgcacgccgccgcggctgaagcagcagcggcgactcccatgctgcccgtgtggccgcgtcacctggcgccgccccggcacctggcgccgtgggcgcacccgacgccggtggacccggcgttctggcaccagcagtacagcgctgccaggaaatggggcccacaggcagccgccgtgacgcaagggacgccatgcgtgccgctgccgaggtttccggtgcctcaccccatctacagcagaccggcgatggtacctccgccgccaagcaccaccaagctagctcaactgcatctggagctccaagcgcacccgtccaaggagagcatcgacgcagccatcggagatgttttagtgaagccatggctgccgcttccactggggctcaagccgccgtcgctcgacagcgtcatgtcggagctgcacaagcaaggcgtaccaaaaatcccaccggcggctgccaccaccaccggcgccaccggatgacatactatctcgtcgacaatacatgcatgtacaatagacggatgtctagtagtatagtagattgctgctagctagctagccgctagagtgtagtagcatatgcatgccttttttttcttcttctttttttgcccttattattaagctggctaatagcgattgagatggagcttgacacagatctgctagctagctatttgagggtttctct

SEQ ID NO: 26781 - DNA, 2031 bp, Zea mays
  Clone ID: LIB4603-003-C10_FLI
agcacagtcatcttaaagaactccacatagctgttaagttatgtgaacaggctttggtttctgttgaccccacaatttctacccttggaactatgcaagaggcccatgtcttccgatctccatctggttgtgcagctttccttgcgaactacaattctaactcccatgcaaaagttgtgttcaacaatgagcaatacagcctcccaccttggtcaattagcatccttcctgattgcaagaatgtagtttttaacagtgccacagttggtgttcagacatctcagatgcaaatgtggggagatggtgccacatcgatgatgtgggagaggtacgatgaggaggttgattctctggcagctgctccattgctcaccacaactggtttgcttgagcagcttaacgtcaccagagacagcagtgattatctgtggtacattaccagtgttgacataagcccatctgaaaactttctacaaggcggtggcaagcctccgtctcttagtgtgcagtctgctggtcatgccttgcatgtctttgtcaacggacaacttcaaggttcttcgtatggtaccagggaggatcgaagaattaaatataatggcaatgttaaccttcgagctggtactaacaaaatcgcactactgagtgttgcttgcggattgccgaatgttggagtgcattatgagacgtggaacaccggcgtcggtggtcctgtcgtgcttcatgggttggatgaaggttcgcgagaccttacttggcagacctggtcctatcaggttggcctgaaaggcgagcagatgaatctgaactccctagaaggctcaggctcagttgaatggatgcaagggtcactgatagctcagaaccaacagccgttggcctggtatagggcttacttcgagactcccagcggggacgagccattggctttggatatgggcagcatgggcaaggggcaggtctggataaacggacaaagcattggacgctactggacagcgtatgcagacggggactgcaaagggtgcagctacaccgggaccttccgggcacccaagtgccaagcaggctgcggccagccgacccagcgttggtaccatgtgccaaggtcctggctgcagcccagcagaaacctactggtagtcttggaggaactgggtggtggggactcgtcgaagatcgccctagccaagaggtcggtctcgagcgtctgtgccgacgtgtccgaggaccatccgaacatcaagaagtggcagatcgagagctacggcgagcgcgagcaacgcagggccaaggtgcacctgaggtgcgcgcacgggcagtccatctccgcgatcagattcgcgagcttcgggacgcctgtgggcacctgcggcaacttccagcagggaggctgccactcggctagctctcacgctgtgctagagaagagatgcattgggctccagagatgcgtcgtcgccatctcccccgacaacttcggaggagacccctgcccgagcgtgaccaagagggtggcggtcgaggcggtgtgctctcccgccgcttaggcttagcctgcccgcccgcccctacttctccgactcaccgagcaacggatttgaaggccgaaagcgatgtgtgtggagagtggaactgtaagtatcgacttgcattggtcggagggaggttaggtgtcttgagcttttagcattcgtccgtctgattccggattaggattggtgctctcctacgtctccatgaactgttcaaagcgcccagctgggtccagggatggagctgtagagagagtaggagtagaagactgatcatgcgttctttttgctgtggtgtgttagtagtagctgtgtacctacccgtgacacatctcgtctttcttgaaacggaggaagacgcaggtgaagcgttcatcgtgcctttgttgttgttgttcctgctctactagtggtagaggcaggagccttgcaattgtgttgtgtgtggacgtgtggtgggggagaaaaaaaaaagaacaggctttgatgttctcag

SEQ ID NO: 26782 - DNA, 1321 bp, Zea mays
  Clone ID: LIB4603-006-E11_FLI
catagacaaggaattgggagattcgatttctgctattcagcccacgcccactggttcaaccggtttcttcaaatctcaggcttcaaggccgcaacttttcccccgttggggttggacttggacagctgccgtgcttgggaggcattgccggcaacgggaggtccaatcatcgatccttcgatagattgtatataaggaccacggttcagattactgtcaagcatgtctctactttcaaagttgcgcttgatcaccgtggatgttactggtacactgattgcttacaaaggacaccttggggattactactgtatggcagcaaagtctgctgggatgccatgtcctgactataaccgcatgcatgagggcttcaagcttgcatacactgagatggcaagacagtacccttgctttggatttgcagctaagatgccgaacatcgaatggtggaggacatgtgttaagaattcattcgttaaggctggctatgattatgatgaagagacatttgagaaagtcttcaggcgcatttattctgcatttggctcctctgcgccatactcggcgtttcctgattcgcagcccttcctaaggtgggcacgcgaaaagggactcactgttggcatcgtcagcaatgcagaataccgctacaaagatgtaatcctgccagctttaggattgaatcagagctccgaatgggactttggggtgttctcaggtgtcgttggcgttgagaagccagacccaagaatttacaagatagcgctggagatggcaggaaacgtcgctccggaagaagcgctccacataggtgacagcatgcggaaggactacaccccagctaggagcatcgggatgcatgcgctgctcctggaccggttcaagactgccgacgctgagagctggaggcagtcaggcgccacggtgctcccggaccttgtcgccactcaagagtggctcaccaaggatcagaatgacgaacaggaggaaacagtggcagcacgagtgctgaagagaatgtccgaaaagctatagatgggggctttaaccatgcattaattctacgagtgttcctttatattatctagctatggactgaaggtccaaaagcaacttatgctgatgagaggttggtgacgattcttggctactggctactgtaattagcttgagctactattctggttgcagcatctgtggctgaacacgagtaccatatctgagtgtcataagtcatgttgcgaagaacatgagtagcatatttcaggtgccgtttggttcatatatttgtaatgtaatgggtaacggataacgttaaatc

SEQ ID NO: 26783 - DNA, 1644 bp, Zea mays
  Clone ID: LIB4603-007-H6_FLI
catccatccccgttcgcctcttctcctccctcctgccgggtccttaataaagagcagcagcgcaagaggttggtagagcgagcgagaagaaggcaatggcggcggagagcttcctgttcacctcggagtccgtgaacgaggggcacccagacaagctgtgcgaccaggtgtcggacgcggtgctggacgcctgcctggcgcaggaccccgacagcaaggtggcctgcgagacctgcaccaagacgaacatggtgatggtgttcggcgagatcaccaccaaggcgagcgtggactacgagaagatcgcgcgcgacacctgccgcgagatcgggttcacctccgacgacgtggggctcgacgccgaccgctgcaaggtgctggtgaacatcgagcagcagtcccccgacatcgcgcagggcgtgcacgggcacttcacgaagcggcccgaggagatcggcgccggcgaccagggccacatgttcgggtacgccaccgacgagacccccgagctgatgccgctgagccacgtgctggccaccaagctcggcgcgcgcctgacggaggtccgcaaggacggcacctgcgcctggctcaggcccgacggcaagacccaggtgacggtggagtacgtgaacgagggcggcgccatggtgcccgtccgcgtgcacaccgtgctcatctccacccagcacgacgagaccgtcaccaacgacgagatcgccgccgacctcaaggagcacgtcatcaagcccgtcatcccggagaggtacctggacgagaagaccatcttccacctcaacccgtcggggcgcttcgtcatcggcgggccccacggggacgccggcctcaccggccgcaagatcatcatcgacacctacggcggctggggagcccacggcgggggcgccttctccggcaaggaccccaccaaggtggaccgcagcggggcctacgtcgccaggcaggccgccaagagcatcgtggccagcggcctcgcccgccgctgcctcgtgcaggtgtcctacgccatcggcgtgccggagcccctgtccgtgttcgtcgactcctacggcaccgggaccatccccgacaaggagatcctaaagatcgtcaaggagaacttcgacttcaggccagggatgatcaccatcaacctcgacctcaagaagggcggcaacaggttcatcaagaccgccgcatacggccactttggccgtgacgacgccgacttcacctgggaggtggtcaagcccctaaagaaggcatccgcttaagaatgtattgggaagttcactggacatgaggttcatcttcgtctggctctgctgatacctgcaaggattgctgctgctgctgccgcccctggatgtgtgtttgatcagtgactggctgctctgctccatagaagatgaatgaagagagagatggtgaagaaggctttggcaaatggcaattgccgcagcaagccatgtcggcgccactgaccggcttagtgattggtataatttggtgtggcagcagccaggattaatgcgctggtcttttatctttactactagtttggtctcgtccggtatcttatttttctttccccttttcgagtctgtactgaaactgctgagagatttgcagttttgatctatc

SEQ ID NO: 26784 - DNA, 2224 bp, Zea mays
  Clone ID: LIB4603-011-G11_FLI
cactgacatgtgggtccctatccgcagctaggattctgggcccctgtggcagccagtggaagagttcctctcacttaacagcatctctctctctcccacggttgcttccaggtcccaccacgtagggaggggattggagacgccgagctccaccggaggcgaaggcggaggcgcgtggcgcgccctcggactcctcgctgtcttgtttttcaggacaaaatggaccttgcacctcagggtttgataacacagcaacaaaaggcaaatgagcgaaggccagttggtagctcacaaatttggacacggtatggtgttctgcttccaagccagcagactcgaaagctaaaagaatggattctgactgatgagcagcaacagcttgttaatgctagtggtcttggacatctggcacttaccactgggtttaccattgaccgttctttgctgacatctttttgtgaaagatggaataatgaaacaaatactgcacatttcatgggatttgagattgcgccttcacttcgtgatgtttcatatattcttggcattccagtgactggtcatgtggtgaccgcagagccaattggtgatgaagctgtgaagcggatgtgcttgcattatttaggagagagccctggaaatggagagcaactgtgtggcttaattaggctgacttggttgtataggaattttcatcaactacctgaacatccaaccatcaataagattgcatatagcacccgagcttaccttctataccttgttggttccaccttgtttcctgacaccatgaggggatttgtatccccaagatatctaccactgttggcagattttgggaagatccgtgagtatgcttggggggctgcagcccttgctcatttgtataggggattgtctgttgcagtaacacctaatgccacaacacagtttctcggcagtgcaactttgctcatggcctggatttatgagtatcttcctattactcaaccacaacagaagaaccagagcacattgctgccccgggcttgccggtggaactttggaggagcaacacgtggacagagaaaaaaagtcatggactggagaaaagtttttgagcaacttcaattttccgaggtcaactggaacccttacaaggacatgaatccagcaattgttccggaatattgcattgcagcagataacatctgctactctcgtacttggctaatcagctttaacataaaggaggcgtatgtgcctgacaggtttgctaggcagttcgggagggaacaaggacgcctccatggtgtgccaatgtggacaagaagaacttggagtaagtggaaagactggaggactgagtatgctcgtgagattgaggagttccatcaattggttggctgccatttcacccctcctgcggaaaccaatatcaactcctttccactacatgagtctagtgctggacagaatgatgcaggatgcagtctgaatatctctcataatttttctgcaatggttgaagatttgaaaaatgatctcccagtaattggtcgatatcttgagggaaacttgcttccttcagatgttgcaagcttcctagagagggtgagcacgatgatcaagagttataccccaccacagggcagccgaaggaaagatcgagtaagtcatggccccgctgacccagtcaggtcaaagaacccaagaaaaaggggaagacattcactctttcaagattcttttcctcatcggtatctaggcaccccggtaaacatagtgtttgatggcaccattcctctactaaatgggggtgaggcattgaaggaacaagtggccatggatccctggcgggtctcccagtcccatttgacgatgaccacatcttcttcatctctagactcaagctcaccagaatcaatgaagcggaggcgggaaggtggggatgaaattccaatcacaagggacactgattgcctccaaagtggaaggctctgtgtgcagctgaaaatgttcaagcacagagatggagtgaatgccgaggcagctaatccgattttccgctgacgaagacaaaacttcgcttggtcttcatattgtacaaagtagcaaagaaacatgacttgtttgctgcactgctgacagttagctggccaccaacaccgctctgcggtattgctgtctgcaatttgcgaggattttcctgtgtttatatcgttgtgaaacagttgcctctgtg

SEQ ID NO: 26785 - DNA, 1096 bp, Zea mays
  Clone ID: LIB4605-001-A9_FLI
acaaccgctctatatgactccatcctccccccttccccctccccgtgatggctgcaatggatgacgtaattgtagtggagctgtagaggcggcgggggtgcggttgcgacgggctgtgctgcgccgacaagctgggaggaggaggcggcggcggcgggttgggacttgggatgggtcttctgtcgaaccgggtggagcggtcggagatcaggcccggcgaccacatctacacctggcgggccgtctacgcctactcccaccacggtatttatgttgggggaagcaaagtggtccattttacacgtaagaaagaaactgaaacttcagattcatcagactccacctccagcctggtctcagagatttcatcagagtgccaaacattccctgattgtggatttcagctgtctaatagtggtgttgtcctcacttgcttggactgtttcctccgcaacggctccctctattgcttcgagtatggagtgccatctgcagttttccttgcaaagtttcgtggggggacctgcaccattgccgaatcagacccaccagaagttgttgttcatcgagcgatgtacctgcttcaaaatggtttcggaaactacgacatgtttgagaagaactgcgaagacttcgcactctactgcaagactgggcttctacctgttgaggagcctggcattgggactagtgggcaagcttcttctgctataggtgtgccgttggcagctcttctgtccactccgtttaagcttctggctgctggcccgcttggaatggccactgtcacggctgggatgtactgtgctggcagatacattactgacataggagtaaggaaggacgtagcaaaagttgaagtggagaaattatcatcgcaccccagtttccaccttgttgaagatgaagaatcggtcaacatgcgatcagaaaaaccaaagaccttgctccctatgaagaggaaacgagaaaggtgactgcgaagcacagcttaggaggatgaacttctcttcccttcaactgatgcggaattgtggataatttgggatacaataataagactggatggtatagatatgtgccttgagaatgtaac

SEQ ID NO: 26786 - DNA, 1554 bp, Zea mays
  Clone ID: LIB4605-001-D3_FLI
acccgaagcacatcccgtcgcatcccatcccactaccacccatctcgtcgtccgccgattcgatccggttcttccaacccaggggcagtgatggcgacgaagaggagcgtgggcaccctcggcgaggcggatctgaaggggaagaaggtgttcgtgcgcgccgacctcaacgtcccgctcgacgatgcccagaagatcaccgacgacacccgcatccgcgcctccgtccccaccatcaagttcctcctcgagaagggcgccaaggtcatcctcgccagccacctgggtcgtccaaaaggtgtcaccccaaagtacagcttgaagcctcttgttccacgcttgtctgagctccttggagttgaagtcgtgatggccaatgattgcattggtgaagaagttgagaagttggctgccgctttgccagaaggtggagttctgctcctagagaatgttagattctacaaggaggaagagaagaacgaacctgagtttgctaagaagctagcatctgttgctgacctttatgtcaatgatgcttttggcacggcacacagagctcatgcttcaaccgaaggagttaccaagtatttgaagcctgctgttgccggcttcctcatgcagaaggaacttgactaccttgttggagctgttgccaacccaaagaagccatttgccgctattgttggtggatccaaggtctcaagtaagattggtgtcattgagtccttgctggcgaaggtcgatatcctcatccttggtggtggtatgatctacacattttacaaggcacaaggatattctgttggaaaatctctcgtggaagaggataaacttgagctcgcaacttctcttattgagaaggcgaaggcaaagggggtttctcttttgcttcccactgatattgtagtagcggacaagtttgcagctgatgctgagagcaagattgtccctgccactgctatccctgatgactggatgggtcttgatgttggccctgatgccaccaaaacattcaacgaagcattggacaccaccaagactgttatttggaacggccccatgggagtgtttgagttcgagaagtttgcagctggcactgaggcgattgccaagaagctagctgagcttacaaccacgatgggtgtcactaccatcatcggcggcggcgactctgttgctgctgtcgagaaggctgggctggccgacaagatgagccacatttcgaccggcggcggtgcgagcttggaactcttggaaggcaagactctacctggtgtccttgccctcgatgacgcctagatccgctgctgctgctgctactcaggttctgccagctttgcgtgtcatcttgtttcggaccttggtgtagcactgcaaggctaaggtttactcctccgcacatggacttttggggataggcttgccaccgtgttttgctagatgagtcgtggaataagcttttacttcctcgctgctgtgggtgaagtgactggaattcggaaatttggaactaacaaaaccccccgtggatttgtatgatatgttttgttcgac

SEQ ID NO: 26787 - DNA, 1182 bp, Zea mays
  Clone ID: LIB4605-001-E6_FLI
atcagctattcttctcttctcctggacaactcaagctcaaaacccaaaatcgaccttgtcgacccggatccgagctaggcacccgcacgaccacccgcctcctgccggtcaccgggacctagcatcgccgggcggcggcgggggaggggaaggtaggcgatgaggaaacgtgagcgggagaatccgtgcgggatctgcgggcactaccacaagtacgaggagggggaggtatgcggggtgtgcggccaccgctggaaaccgtcggacggggagggcgccccgtcgaggcacgagtccgccttccccacagaggtgctcaaggacttcctcttcctcgggagctacgacaacgcctcacgctccgaggtcctcaggacgctcagtatctcccacatccttaatactgtgcctgattgccacaatctgtacaagaattcattcacatgtcacagtcttcaacgggacaggcctttggattttgatgaggcaaaccagtatctagagaaatgtgaaagagataaatcgcgtgttcttgttcattgcatgactggaaaaaacaggtctgctgctattgttgcagccttcttgatgaagtctagagggtggagacttgcacagtcttttcaatgggcgaaagaccgaagaccacaggttcaactgacagatgcttctcagaaggagcttttggagtatgagttgaagcttttcggacccagtactcaaaccttggttcccactgaatcatttgcttctcttggatttggttatacaaaaccagcaggtgacatgcaaacgcctgtgttcaaccaaacgaccatgccatccatattcgagcgattcaacccaaatgatcgccccgccaatttcacttttggagttgagaggaaagcagaagctaaccctcgagataacaatagtgatggcagggtaaacccaacttcaatggagaacctgatggacagctcttaagatgatttcacgatgtcgctgtaatctgcatgtcgcggaagtaaacctgctcggcagcatgtcgcggaagtaaacctgctcggtgccgcggtgcaccgaatacttatccggtgtttaggtttcagggaggttttgccttgtcgcgtgagaaatggttctctggaaaccgatctttgctttagaatgactgtgtgaaatagatgtttgtggctc

SEQ ID NO: 26788 - DNA, 1131 bp, Zea mays
  Clone ID: LIB4605-001-F1_FLI
taccctcgaggccggccggggctctcgtttgtactttctccctttgaggaaagagtttccccttttctgtgcttcaagttcttctggtatcgccagcatgggtaggggaaggattgagatcaagaggatcgagaacaacacgagccggcaggtcaccttctgcaagcgccgcaatgggctcctcaagacgtatgagctctccgtcctctgcgacgctgaggtggccctcatcgtcttctctagccgtggtcgcctctacgagtatgccaacaacagtgtcaaggctactattgagaggtacaagaaggcacacaccgttggctcttcctctgggccaccgctcctagagcacaatgcccagcaattctaccagcaagaatcagcaaaactgcgcaaccagatccagatgctgcaaaacactaacaggcacttggttggtgattccgtgggaaacctgtcactcaaggagctgaagcagctggagagccgccttgagaaaggcatctctaagatcagggccaggaagagtgagctgctggctgcggagatcagttacatggccgaaagggagactgagcttcagaatgaccacatgaccctcaggaccgagattgaggagggagagcaacagctgcagcaggtgaccgtggcacggtcagttgcagcagcagcagcagctgccaccaacttggagctgaacccattcttagagatggataccaaatgcttcttcactggcggccccttcgcaacgctggacatgaagtgctttctccccggcagcttgcagcagatgctggaggcacagcagcgccagatgctcgccaccgagctgaacctcggctaccaactggcgccgcctggttctgacgctgccgacaataaccctcatcatcagttctaaactggatgcatgcacgagaagcttttcaagcgaactgtgaacgatggaagctggctgttgcctctagatgttcttggcttccatgacctagcttattatggtgtgtattgttgttgccttttgtgtgtgattctccttgctactctactgatggagaactaaacctaatcgattggacataatgatcaaatgctacagatcctgtgatgctgtgatcaggttaaggc

SEQ ID NO: 26789 - DNA, 1805 bp, Zea mays
  Clone ID: LIB4605-004-E12_FLI
ctcgaggccggccgggacttcaccccgttcatccccagcgaagaaggtaactaccgccatctcccggtaatgatcctcggtatcttccggccagaaaagatttgttttcggtacggatagggtttctgatcagcgcgagccgaggagctaagaatcccagttctttgttcgccgactcgagtttgacattatgcaaaatacttagcacaccagtgatggcggctacttaccaaactggccttgtggccgagccacagttgctgaacactgaaattatcactcggagggccaccaactgtgttgctgacactaacacaaaagacaaatgcgtcggctacttggatgtgtttgtacaccaggcacgcgacatccacaatgtttgtatctatcacaagcaggatgtgtatgcaaagctgagcctcacgagcagccctgatgtttcgtgctcaaccaaggtgatcaacagtgctgggcgcaacccagtatttgaggaaagcctacgccttgatgtgcaaactgtggatgcttctctcaagtgcgagatatggatgttaagcagggtgaggaactacctggaggatcagctccttggctttgcccttgttcctctagtagacattgtaattggtaatggaaagctggtccaggagttctccttgacatctactgacctgttccacacaccagctggatttgtgcacttgtccttgtcatatgctggttgttccccagatgttgtcctcatctcatcacccaataattccccatcaacagtggatgattccggaaatgatcatgtggttcctgctcagcttgagaagattgtgttcccagacctaagtgtggagaaggaagacgagattatggtctcaaagtatctcgagatgacttcagactctgaaacccctataaaagttgagaacggcatgtcgctgcattctgcaaatgatgatgatgttccttctaaacttgaaaagatcaagttcatagattctgagagccgtgcgaaagctgaaaatggcaagatgctactatttggtgtagctgtgcctagtactgcaatttgtgcagataaggttgaggaataccacgatgaaagccctctaagttgtgtctcagccacaggctcctccactaccctttctgcaacaacacaatcagtttctgagccttcggagaccagtgtcgaggcatcccctagacaatgccatagggagaaaagccaagatgttacaggtggtgaggctaattcttctgaaacaccaccaaaggatgaagttatcaagcctgtgatcagcgttaaccttcagccagagcagtcagttgtccaacaggacatagttgacatgtacatgaagagcatgcaacagttcacagaatctcttgcaaaaatgaaacttccattggacgttgagaatagtagtccctcaaacgaagattcatactccagtacagttgagaagacatccccatccccatcttcatctgcagcaaagggttctagggtcttttatggaagcagggccttcttttaagtttctaatgcaaagtagtacgctagctcagtagctcgttactatctcctacatacatatacatggttccaggtttatcagatatctgctggcatgtaatcacatactttctgtctccataatatgcttctaggactcactcctggtattgctattagtgttatgctttgttagaagataataatttcatctcatagttatagattaatcccatgtactaatacatacccatgaaatataatgtcatgaaatcagttctgactcgagatg

SEQ ID NO: 26790 - DNA, 1083 bp, Zea mays
  Clone ID: LIB4605-005-A11_FLI
ctcgaggccggccgggctcccgtttcccggccgtccccttcaccaatccaatccaactccaattcgtcctccggtcctccccctcgaggcctacgcacaatagattcgatctcgagtcctcgaatcctgccttttcctctggtcaggaaagcatgagcttgatttccggcgcttctcgccgtcgagctcgaaccagaagataagaagaatccgctaggggcgagccccatagaagatggccccgcacccgcaggaggacaaatcagatcggcacagcagcggcgccggtgcgtcgagggagcaggaacggcggccgtccaaggcatggggaatcctcatcttcggcctcatcggcgtcaccaccgccagtttcgctattactcaagttcgcaaaagcatggactggttctacactcagtcaacatcatcttggacttggaggtatacaagtaataactcaagtcgtggaagcttcagtgaggaagctaagaaaagatattatcagcgaatgcagcaggaatatgaagaggaacaagagagagttcaaagaataaggcatatgcagagtgtcttcaacagagagaggaataaatttggacgaggttatgaaagctggagggagaatggccctcctcgtggctacaattacatccctcgggatgattggtattggcagaccgatacttctcactcagaacataaaaataggcggacgtacacaccggcaggacctagggtttatcctatgtcgcatcactatgcagttctaggtcttgacagatcacgagcgacaccatatacagatgcagaagtgaagactgcttttagaacaaaagcgatggaagtgcatcctgaccaaaatcaaaatgatagagatgctgcagaagagaagttcaaggaggttgtcaagtcttacgaagcaattaaatcggagagaaaaaacggtgtaagttgatgcaaacttccagtgtggtcggatcaagtggtaaagactgggaccggatcacgcgggaatcagttgtgccttgtatatgtaatcaattgttgccggcagcttgataaaatggttcttctgttgctgtt

SEQ ID NO: 26791 - DNA, 1020 bp, Zea mays
  Clone ID: LIB4605-005-B1_FLI
atggttttcggatacttgaaagcccatcttactctccttccggtcgccgcagtaaacccctaggaagaaaccccaccgcttctggccgccgccggctcaccggtgacggcatccaaatccatggcctcccgccaggcgctccacatcttcacgccctcccggcgggcgatgcacatcctcacgtcgtcccgcggcatcgcctcgaccccgcacctctcgtccttcggctggtttgataagatcaagtccaccatcactggcaagaagcccgaggaggcctccgaggcatcctccttcaccctcatccagttcgcagacacgatggagaaagcgaggaagctggggacgttcaagaacttcgttgccgggcgggccagcgaggccaccgtcgtgaacgtcttcgagaagcactccgctgtgctgcgctacctcggtgccatcgaccccaccggcgagaacctccgaaacactgacaaaattaacgcgaccaagcactgcaactgcacaattgctgacgtggagcacattctggccaagtacacatgggctaaagaggctcagaagaagattgcaaagctcaaggaagaagggaagccattaccaaagtcatttaacgaggtccaaaatctaatgggttctacaccagtggatgtcggcagaagtaatctggcaaagagtggtcaaataagtaggaatgctttctgcccatgtggttctaagaaacgatataaaaggtgctgtggagcttcatgagatgaacaacgatcctctcgttcactagcacatgcaggccaggtgcagcgtttgtaagctcttttctttgccaaactctaccaagctctttcgtggacaacacctgaatttgaagcttgcaatttgtaaagcactatgagcgagccctatgtttcagaaggctttctcttaaactctgatttcttgattggagttgttgtttaacattgattcagttcaaccatgcatgaatctaggtaatatatatccacctagctcgttttctgc

SEQ ID NO: 26792 - DNA, 1466 bp, Zea mays
  Clone ID: LIB4605-005-H10_FLI
ctcgaggccggccggggtccgctgttcggctccggaagtccccatccgctccacctctcctcctccactcccccgccccactgatcgcggcggtgagaacatgctctttctacatctcgttgaagttttaaattatattggcagtcgtgttgtcaagtctgaactaaagcctcagccaaggtggcatgtctgctaaggtgccaaggtgcctagaagtttgttccagtggcatggcggattgggcctctattcaaacggatattcttggtataataataaagaagcttccaatccctgattacattagattccgtgctgtgtgcacatcttggaacaatgtctgcaaggatgtgtcatactgtccaagggtggacccatggctgatgctccccccaaaccagaatcctcttggtgctcagttcttttgcattcctgaaagaaagaatcaaagtatccgcctccctaacaccgcctcactgttcgaatcggtctgggctccggttggttcttccaatggatggcttatctacttcagtcacacttacggaaccatgcagctggttaaccctgtaagtggcaaacatatccagctccccccgatagggcgcaggaccttctctaaggccaagctgctcgaaatcagcgagaggaacttcatcgtcgctgtcctctatggtgatgagaaaggctacaaaataacacggaaagggtccagcaactggtcgtcggtcgagtcaaaattcattttggatgacatcatcaagcatggaggccggctatacacgtgcgacatgtatggcacagtggagatgtgggcagagccgccccgcgcgtggccagatgaggaagtcacgcatcggtggaggttccgctgtcttatagagaccccagctggtgatctggtcagggttaagcgcctgtgccagaacaagtttgctgtttggatattggacaaggcgagctcttcctgggttgggaccgagaacattggggatctcgcgctgtttgtgagccactacaactcattctgtttccctgccagtggccagcccaacctgaaagcgaactgcatctacttcatcgacatctacaacaacctgtgcgctttcaaccttgagcatgggaccaaggaactcgtccaaactcttaccatcggccgaggccaagggcgcaatgactaccaccgttggcctgagcgagaccaggtcttatggtttatcccttcactaaagtaaatactgaaggtaatggtggatgatgcgtgttcgtttaccccccagagatggagctcagatagtactgtaggctcctcctatggacggccatttatcccgatatgaaggtcgtatagtgtcctgtatttccaaagtattggatgtcgcacatgcaactgcaggtctatgtatatgagtaccgaacatcgtcttaacttgttgctaaatcaactgtttgaaccatttgaagct

SEQ ID NO: 26793 - DNA, 1440 bp, Zea mays
  Clone ID: LIB4605-006-C2_FLI
ctcgaggccggccgggattcctacgcgcgtgttctgtctgtttctctcggccccctctcgctctccgacgactggtgggccgctgccggcgccgccgccttaacccaggtgttgaggctttcgttggtctcctcgccgtcgacgagcacccaccaggatgaattctaaacgtaggaggagtcatagcccagttgaatacaaggaaggccgtgacaaagattatgggacttctggaaagaaggataagtcaagagatctagatgacacatgtgatgctagaagaggtcatgaaaccgataggcactctgataagcattcctttggaacatcacgtgaatccaagaagcatgatgactatcggaggtaccatgataagtatggtgatgattatggtaggagccatccaagagcctctcggtcagaccgggaatcaagggctgatacttattatgatcgctcaaagcatgataacacatctggtagatcacgtggtgatcagcgagatgttggcagtaggtacggagaaaaatctgttaatcgagatcagaggagtataaatgaaggaaagcaggagtcccctcgtggctatcaaaagaatgatggcggagaatacaataaacatatggatgcaagaaagcaagagtacaaaggttatggagatgatagagatcattacagggttgttcgtaagaacaaggaaaccatcaaagaggaggaggactcgaagaggagaaatggaaaggagattgagaaagaagctttggtggaaactagggataagaaaagaagtttattcagctctactgggccaaatgtggataatccaggcgatgtcaaactatcctcggccacaaatgaagccttggataacgctgcagaaaccgtagacggtgtgaatgcagctaaagttgcagctatgaaagctgctgaattagtgaataggaacattgcagcatttggtgctggaactgggcgcctatcaactgatcagaagaaaaagcttctttggggtaacaaaacgagtaatccctctgaggagacaagtaaacgttgggacttattttctgaccgtgagcgccaagagaaatttaacaaactcatgggtgtgaagagcagtgccccagttcaggaaaacacggtcgagaacaaggtcgggagctcggcggaagaagccaagaaactggaggagctcgacaccaacctggagaaacattacatagcaggcctccgcaggagagatggcaggacagtcggccttggcctgtagaaactctgcttgcagttgcagatgctgcggcattgaaaaatgcagagagcttgctctgtacaatctacagtgccttgtttattcttgcacttacaaaatttcctgtacggcttacgttgactgtttccgggttatcttgaagctctagaacatgtgtccctgattgacactcc

SEQ ID NO: 26794 - DNA, 1493 bp, Zea mays
  Clone ID: LIB4605-006-E6_FLI
ctcgaggccggccgggctagttcctgtttcaggacgcttattattctccgccgttggcgtcgtgaagcccgaagacaccgatctcacggacaaacttacaacatatggctatggcgacggcgaagctgaactccccggctaccagcttggtcgctggcagccgcacgcgccgatctgcgcccgcccgctgcacgacggtgatccgcgccgccgcaggctcctactcggacgagctcatctccaccgcgaaatctgttgctccccctgggcgtggtattctggcaattgatgagtcaaatgcaacgtgtggaaagaggttatcatctattggtttggacaacacagaagtgaaccgccaggcttacaggcagcttttgctgacaactgctggtcttggtgaatatatttctggcgctattcttttcgaggagaccctttatcaatcaactacagacggcaagaagtttgttgactgcttgaaggatcagaatatcatgcctggcatcaaggttgacaagggtttggttccattgcctggatccaacaatgaatcatggtgccaaggtcttgatggtttggcttcaaggtgtgctgagtactataagcagggggcgcgcttcgcaaagtggaggactgtatcccttgtggtccatctgcattagcagtcaaggaagcagcatggggacttgctcgatatgctgctattgctcaggataatggtttagtgccaattgtggagccagagattcttcttgatggagaccatgggatcgagggagctcttgaggtggcagagaaagtgtggtctgaggtgtttttctacttagccgagaacaatgttctgtttgagggtatcctgctgaagcctagcatggtcacccctggagctgagcacaaggagaaggcttctccagaagccattgcaaagtacacgctaacaatgctcagaaggagagtacctcccgctgttcctggaatcatgttcctttctggtggacagtccgaggtggaggcaactctgaacctgaatgcaatgaaccagtctctgaacccatggcatgtgtcgttctcctatgcccgggctctgcagaactcggtgctgaagacatggcaagggcgccctgagaacgtggaggcagcgcagaaggccctgctggtgcgcgcaaaggccaactcgctggcccagctcggtcgctacactggtgagggcgagagcgatgatgccaagaaaggcatgttccagaagggctacacctactaatgtgccagcgagatgtttccatgacataataataattgtagcgttttggtgttattattattattattttggtacgctctggtgaataataaccaaattgttggtgccaacgacatctagcagcaaattggtctttagaactcatgtagaaccttgagaacgaacatgtaatctggtgaattctattcctatatttgaggcgatggatgctaagttgccatatgcgacaagc

SEQ ID NO: 26795 - DNA, 1569 bp, Zea mays
  Clone ID: LIB4605-009-G1_FLI
ccgggctctcactcttctcgacgcgcctctgaaagttcggagccgccggcccgtccgcctccctctccgcctcccgtccccaaggccaatagttttcaagtggcaatggcggaccaggctaaccaacccactgtccttcataagctcggtggccagttccacctgcgctcgatcatctctgaaggtgtacgggcccgtaacatatgcccatctgtctcatcttatgaaaggagatttgccacaaggaactacatgacccagagcctttggggcccttcaatgtctgttagcggtggcatcaatgtcccagtgatgcagaccccgctctgtgctaatgctcctgctgagaaaggaggcaagaacttcatgattgatttcatgatgggcggtgtttcagctgctgtttcaaagactgctgctgctcccatcgagcgtgtgaagctgcttattcagaaccaagatgagatgattaagtctggtaggctatcagagccgtacaagggtattgttgactgcttcaaacgtaccattaaggatgaaggtttctcttccttgtggaggggtaacactgctaatgttattcgttacttccctactcaggctttgaactttgcatttaaggactacttcaagaggttgttcaacttcaagaaggatagggatggctattggaagtggtttgctggcaacctggcctctggtggtgctgctggtgcttcctctttgttttttgtgtactccctggactacgcgagaacaaggttggctaatgacgcgaaggctgccaagggaggaggtgaaaggcagttcaatgggcttgtcgatgtctaccgcaagacactcaagtctgatggtattgctgggctttaccgtggatttaacatctcctgtgttggaatcattgtttatcgtggtctgtactttgggctctatgattccatcaagccagttgtccttactggcaacctccaggacaatttctttgccagtttcgctctgggttggctgatcactaatggtgctggtcttgcatcttaccccatcgataccgtccgcagaaggatgatgatgacatctggtgaggctgtcaagtacaagagctccttggacgcgttccagcagattcttaagaaggaagggcccaagtccctgttcaagggtgctagtgctaacattcttcgtgccattgctggtgctggtgtgctttctggctatgaccagctccagatcctcttcttcggaaagaagtacggctccggcggtgcttaaatggagaaatatgatgacgaacaagagcagtgtgtgttcccggtcctttccaatcaggatctggtgaagtttttgcctttcatatcgaagaaattaataattcatgtagagggaggattcttccaacaatttgttttggatggagacttagatctccaaacactcgtaactatcctactaggtggtgacatcggtccccaaaaacatttatggtcatagagtctgcccttcgtttgtcagtcgggcaatttttcttgcatacaatgccttcgtttaagtatcggatgagttgctgcgact

SEQ ID NO: 26796 - DNA, 1529 bp, Zea mays
  Clone ID: LIB4605-010-D2_FLI
gccgggcctctcactcgcctcgacgcgcctctgaaagttcggagccgccggcccgtccgcctccctctccgcctcccgtccccaaggccaatagttttcaagtggcaatggcggaccaggctaaccaacccactgtccttcataagctcggtggccagttccacctgcgctcgatcatctctgaaggtgtacgggcccgtaacatatgcccatctgtctcatcttatgaaaggagatttgccacaaggaactacatgacccagagcctttggggcccttcaatgtctgttagcggtggcatcaatgtcccagtgatgcagaccccgctctgtgctaatgctcctgctgagaaaggaggcaagaacttcatgattgatttcatgatgggcggtgtttcagctgctgtttcaaagactgctgctgctcccatcgagcgtgtgaagctgcttattcagaactaagatgagatgattaagtctggtaggctatcagagccgtacaagggtattgttgactgcttcaaacgtaccattaaggatgaaggtttctcttccttgtggaggggtaacactgctaatgttattcgttacttccctactcaggctttgaactttgcatttaaggactacttcaagaggttgttcaacttcaagaaggatagggatggctattggaagtggtttgctggcaacctggcctctggtggtgctgctggtgcttcctctttgttttttgtgtactccctggactacgcgagaacaaggttggctaatgacgcgaaggctgccaagggaggaggtgaaaggcagttcaatgggcttgtcgatgtctaccgcaagacactcaagtctgatggtattgctgggctttaccgtggatttaacatctcctgtgttggaatcattgtttatcgtggtctgtactttgggctctatgattccatcaagccagttgtccttaccggcaacctccaggacaatttctttgccagtttcgctctgggttggctgatcactaatggtgctggtcttgcatcttaccccatcgataccgtccgcagaaggatgatgatgacatctggtgaggctgtcaagtacaagagctccttggacgcgttccagcagattcttaagaaggaagggcccaagtccctgttcaagggtgctggtgctaacattcttcgtgccattgctggtgctggtgtgctttctggctatgaccagctccagatcctcttcttcggaaagaagtacggctccggcggtgcttaaatggagaaatatgatgacgaacaagagcagtgtgtgttcccggtcctttccaatcaggatctggtgaagtttttgcctttcatatcgaagaaattaataattcatgtagagggaggattcttccaacaatttgttttggatggagacttagatctccaaacactcgtaactatcctactaggtggtgacatcggtccccaaaaacatttatggtcatagagtctgcccttcgtttgtcagtcgggcaatttttcttgc

SEQ ID NO: 26797 - DNA, 1690 bp, Zea mays
  Clone ID: LIB4605-010-E10_FLI
tcgaggccggccgggctccccaactcgccgtcgtcttctgcggttctgccgtctacgcctccaatttggcctctctcccttgcaagccatgggtaaggaggagtcccacatcaacattgtggtcattggccacgtcgactctggcaagtcgaccaccaccggccacctgatctacaagcttggaggcattgacaagcgtgtaatagagaggtttgagaaggaggctgctgagatgaacaagcggtccttcaagtatgcttgggtgctcgacaagctcaaggctgagcgtgagaggggtatcaccattgatattgctctgtggaagtttgagaccaccaagtattactgcaccgtcattgatgcccctggacaccgtgacttcatcaagaacatgatcactggtacctcccaggctgactgtgctgtccttatcattgactccaccactggtggttttgaggctggtatctccaaggatggccagacccgtgagcatgctctccttgcgttcactcttggagtgaaacagatgatttgctgctgcaacaagatggatgcaacgactcccaaatactccaaggcgcgttatgatgagattgtgaaggaagtctcatcctacctcaagaaagttgggtacaaccctgataagattgcctttgtccccatctctggttttgagggcgacaacatgattgagaggtccaccaaccttgactggtacaaaggcccgaccctgcttgaggctcttgaccagatcaccgagcccaagagaccttcggacaagcccctgcgtctccccctgcaggatgtgtacaagattggtggtattggaactgtaccggttggtcgtgtggagactggtgtcatcaagcctggtatggttgtcaccttcggtccaactggcctgactactgaggtgaagtctgttgagatgcaccacgaggctcttcaggaggcccttcctggtgacaatgttggcttcaacgtgaagaacgttgctgtgaaggatctcaagcgtggttttgtggcctcaaactccaaggatgaccctgccaaggaggctgccagcttcacgtcccaggtcatcatcatgaaccaccctgggcagataggcaatggctatgccccagtgctggactgccacacctcccacattgctgtcaagtttgctgaactcattaccaagatcgacaggcggtctggcaaggagcttgagaaggagcccaagttcctgaagaacggtgatgctggtatggtgaagatgattcccaccaagcccatggtggtggagacattctcgcagtatcctccccttggtaggtttgctgtccgcgacatgaggcagacagttgctgttggagtcatcaagagtgtggagaagaaggacccgaccggcgccaaggttaccaaggcagctgccaaaaagaaatgatgcaacctgtcgttaatcctgtatctgcttttgcaatacctgacttgtcactccatcccgaagttttgtatgcggttgttactgttattgtgtactgttaagctctgctgcggcgtgccctgttgtttgggtagcgtcaacgtcgagcgccacttgcgggtgtgcctttgtctgctatcagtagcggcaaaaattgaaagctctcgagacttatgtcccttttgggcgccgttgaactgattattttaaagtctgccc

SEQ ID NO: 26798 - DNA, 1152 bp, Zea mays
  Clone ID: LIB4605-011-A6_FLI
ctcgaggccggccgggcagtcttccactcgtaaaccactacctgcgatctccgcacccgcgctcaccggctcaccgctatctactccgcatccgccggccgccggcgagcccctcctcctccacgatccgtgcttccccggaggcaactccatgaattacatcgactccatcccgcccctcaacggagggaattacgagttatggcgagagaagcttgagctggcgcttgcgttgttagatattgatctggctatcactgatccctgtcccatcgctccggtagacccggtgcaggaagagaacgagagcgatgatgatttcaacgctcgtgtgcgcaatcatgcaccaataaaaatgaagtatgacctatacaaggtaaaatgggatcaatcgaaccgcaagtgtctgatggtgattaagagctctattatggatacaatcaggggagcattcccagcatgtaccaccgctacagagtatcttagtaaggtggagagtcaccttactatctcttcaaaggcttatgcatgcacaataattgaaaggctacttaccgataaatacactggcggtggagtaagagagcatatattgaagatggccagcatggcttccaagcttaaacctatggaaatggcgctcccagatgagtttctggtctatttgatttttgcctctctgcctaaagaatttgaagcttttgagattaattataactcacaaccagacaattggggcattgagaaactgattgccatgtgtgtgcaagaagaggaaagaattaaggcttcacgtggtgattctatcaactacgttggggtatataaggcacatggcaaggctccacagaatgatcaccatctgaaaaataaagaggtggacaagaatgattgctgctggtgcgaaaagtcagggcatcatcagaaggattgtccatccttcctgaagcacttgatcaataaagggattccatacgaggaggacccttcaaagaggagaaagatgcattaaagtcgtcaatggtgttgatgatgaagttgaagtgatagaacttccattattattgaataatagcttcattcttcacttgaataatgttctctatgtatcatctttcctgtcatgcgaatttaagctctctaatttattag

SEQ ID NO: 26799 - DNA, 1670 bp, Zea mays
  Clone ID: LIB4605-011-D5_FLI
gcttcagctcggcgtcttcacaaacgccggcgcaaactctcgcccgagcccgacagatcttcaattccccattccgcccaccgatcgaccttcacgccagtctcggtctcttccgaaggcgtcgcgcgcggttgtttgagaggagaggaggaagatgagggagtgcatctccgtccacatcgggcaggccggcatccaagtcggcaacgcgtgctgggaactttactgcctcgagcacggcatccagcctgatggccaagtgcctggagataagaccgcgggacatcacgatgatgccttcagcaccttcttcagccagactggtgctgggaagcacgttccccgtgcaatcttcgttgatctagaacccactgtgatcgatgaggtgcgcactggcacgtaccgccagctcttccaccctgagcagctcatcagtggcaaggaggatgccgctaacaatttcgcccgtggccactacacaattggcaaggagattgttgatctgtgccttgaccgtatccgcaagcttgctgacaactgcaccggcctccagggcttcctggtcttcaatgccgttggtggtggcactggctctggccttggttctctcctccttgagcgcctgtctgtggagtacggcaagaaatccaagctgggcttcactgtgtacccatctccccaggtgtcaacctctgttgtggagccttacaacagcgtgctctccactcactcactcctggagcacactgatgtctccatcctgctcgacaacgaggccatctatgacatctgcaggcgctccctcgacattgagaggcccaactactccaacttgaatcgccttgtgtctcaggtgatctcatcgctgactgcttctctgaggttcgatggtgccctcaatgtggatgtgaacgagttccagaccaacctggttccttacccgaggatccacttcatgctctcctcctacgcaccggtgatctcttctgcgaaggccttccacgagcagctgtctgtggcggagatcaccagcagcgcgttcgagccggcttccatgatggtcaagtgcgacccacggcacggcaagtacatggcttgctgcctgatgtaccgcggcgacgtggtgcccaaggacgtgaacgccgcggtggccaccatcaagacgaagcgcaccatccagttcgtggactggtgcccgacggggttcaagtgcggcatcaactaccaggcgccgacagtggtgccgggtgccgacctcgccaaggtgcagcgcgcggtgtgcatgatctccaactccaccagcgtcgtcgaggtgttctcccgcatcaacagcaagttcgacctcatgtacgccaagcgcgcgttcgtgcactggtacgtcggcgagggcatggaggagggggagttctccgaggcacgcgaggacctggccgccctggagaaggactacgaggaggtcgccgcagagggcggcagtgatgacggtgacgaggaggaggaatactgatctgcttgcatgaatctgtttggctgtcgagccaggttgtggtgttgaaaaacctttgtttgtgtcctggcccccctgggtaatgtttgggtgtttccttccatcatcacttgctgaactgctctagtatttgcatttgtaattgaagtctgtcgctttaagc

SEQ ID NO: 26800 - DNA, 1517 bp, Zea mays
  Clone ID: LIB4605-011-E6_FLI
tcgtgctgtgtctgtctgtctgtcgctctcgctctcagacgactgggccgccgccgcttggtgctgaggctttggttggtctcttcggcggcgacgagcacccaccagttctgtagaaatggctgatggtgaggacatccagcctcttgtctgcgacaatggcaccggaatggtcaaggctggttttgctggcgacgatgcaccaagggcggtttttcctagcattgttggccgtcctcgccacactggtgtcatggtagggatgggacagaaggatgcatatgttggcgatgaggcacagtccaagagaggtattctcacgctcaagtacccgattgagcacggtattgtgagcaactgggatgacatggagaaaatatggcatcatactttctacaacgagcttcgtgttgccccagaggagcaccctgtgttgctcactgaggctcctttgaacccaaaggccaacagggagaagatgacccaaattatgtttgagactttcaatgttcctgccatgtatgttgcaatccaagcagtgctctcactctatgctagtgggcgtactactggtattgttcttgactctggtgatggtgtgagccacactgtgcccatttacgaaggatatgcccttcctcatgcgattcttcgtttggatcttgctggtcgggacctcacagactccctcatgaaaatcctgactgagaggggttactccttcacaacctctgccgagcgagaaattgtaagggacatcaaggagaagctggcatatatagctcttgactatgagcaagagttggaaactgccaagaacagctcctcagttgaaaagagctatgagctacctgatggccaagtaatcaccattggtgcagagagattcagatgccctgaggtcctcttccagccatccatgattggtatggaggctgccggaatccatgagacaacatacaattcaatcatgaagtgcgacgtggatatcaggaaggacctctacggcaacattgtgctcagtggaggttcaactatgttccctggaatcgctgatcgtatgagcaaggagatcacttcccttgcaccaagcagcatgaagatcaaggtcgttgcaccgcctgagaggaagtacagtgtctggataggagggtccatcctagcctcgctgagcactttccaacagatgtggatatctaaggaggagtacgatgagtctggcccggcaattgttcacaggaagtgcttctaggcttcgcaagttcctcatcgttgcctagtctcaagttatgtccccttcatttctcaagatacgtgtggcagatttgcatggtacggttcatttatcaagttatgcccaccccctctttgtatgttgtggctccatgtgcgagcacgctgtctgtcgtgacacctggttcgtcagatgttttgtcaaacttgcttggcttgattggttgtacttgtacctgtaagagctgatagttatatgaatggtttggactgtcctgctgttt

SEQ ID NO: 26801 - DNA, 897 bp, Zea mays
  Clone ID: LIB4605-011-E9_FLI
ctcgaggccggccgggctctctagggtttttgattttagccgccgccgctgctcatctcacatccctcgagaagacgcctgctcctcgccgatcgatacgatggccgtcttctccgacctccacaccgccgacggcctcaagtccctcgaggctcacctcgccggcaaaacctatgtgcctggtgactccattactaaggatgacattaaggtcttcgccgcggtgccgtcgaagcctggcgctgagtttcctaatgccgcccgctggtacgagaccgtctctgcggctgtagcctcaagattccctggtaaggccgttggtgtaaatctgcctgcgggatcagctcctgcggcagctgctcctgcggatgaggctgaggatgatgatgaccttgatctttttggtgatgaaactgaggaggacaagaaggcagctgatgagcgtgctgccgctgccaaggcctcttctaaaaagaaagaaagtggtaaatcctccgtccttatggatgtaaaaccatgggacgatgagactgatatgaagaagctggaggaggctgtccgcagtgtccagatggagggtctgacttggggagcatcaaagcttgtgcctgttggatacggcatcaagaagatgactatcatgttgacaattgtcgacgatcttgtgtccatcgacactctaattgaggaccaccttacgcaagagcccatcaatgagtacgtccagagttgcggcattgtggctttcaacaagatctagagttcagtttctgagtttgggcaacggcagcggctcagctcgtcaagtttgtgctgggatgccagtttatcccttctagtctattacagaaacgttgttcggagctgagtctattataaacatcttggtctgagttc

SEQ ID NO: 26802 - DNA, 1033 bp, Zea mays
  Clone ID: LIB4605-011-F2_FLI
ctcgaggccggccgggaaaactccgtttcgaattctagggttttgctgctctccgaccccgagctccgaaggccgcagcatcaggcgaggcccccctcgcgtgtgaccgagatggcgctgccgaatcaggggaccgttgattaccccagcttcaagctcgtcatcgtcgacgatggtggaactggtaaaactacatttgtgaagaggcatctcactggagagtttgagaagaaatatgaaccaaccattggtgtggaagttcatccgttggatttcaccactaactgtggtaagatcaggttctactgctgggataccgcagggcaagagaagtttggtggcctcagggatggatactatatccatggccagtgtgcgatcatcatgtttgatgtaacctcaaggcttacttacaagaatgttcctacgtggcatagggatctgtgcagggtctgtgaaaacatccccattgtcctctgcggtaataaggttgatgtgaagaacaggcaggtcaaagccaagcaggttactttccacaggaagaagaatctgcagtactatgaaatttctgccaagagcaactacgactttgagaaacctttcctgtaccttgcaaggaagctggctggtgatccgaaccttcactttgttgaagctgttgctcttaagcctccggaagttaccatcgacatggctatgcagcagcagcatgaagccgagcttgctgcagcagctgcacaacctcttcctgatgacgatgatgatctgattgagtagaaaggatcatgagtcttggacttgagcaggagttgtgccttgcacgatttaagttgttctagggtggactctctcttgagttatctgtctggatcatctttttctccttggacttgttgcaacttttgagtgtggaaatggattggaatagtcgccatgaatttgctggctactttatacatgtctttgttcataaaccttgttttaagatgaggttgtggcaatcctcttagtgctaatataatgttctattgcc

SEQ ID NO: 26803 - DNA, 1285 bp, Zea mays
  Clone ID: LIB4605-011-H2_FLI
ctcgaggccggccggggtttatcgtctggtcgccttctcttccccatcatctccgcgcattttatatgcaggcttgcgcctgtcacttctcccctgtccttgctccccctcgatcccgcatcagtgcgtcacattcaccgggaatggcaacgctcaaggtcccagccactgttcctcccgtcgccgatgactgcgaccagctgcgcaaagcattccaagggtggggcacgaacgaggcgctcatcatctccatcctcggccaccgcgacgccgcgcagcgccgcgccatccgccgcgcttacgccgaggcctacggcgaggagctcctccgctccatcacggacgagatctccggcgacttcgagagggccgtgatcctgtggacgctggacccagcggagcgcgacgcggtgctggccaacgaggcggcgcggaagtggaagcccgggaaccgtgtgctcgtcgagatcgcctgcacgcgcacctccgcgcagatcttcgcgaccaggcaggcttatcacgagcggttcaagcgctcgcttgaggaagacatcgctgcgcacgtcactggggacttccgcaagctattggtgccacttgtaagtacttaccgctatgatggaccagaggtcaacacaaggttggcacactcagaagccaaactacttcatgagaagatccatcacaaggcttacagtgatgatgagatcatcagaatcctcaccactaggagcaaacctcagctgattgctacattcaatcattacaatgatgcatttggccaccgaatcaacaaggatctgaaggctgacccccaggacgagtacctcagaacgctgcgggcgatcatccggtgcttcagttgccctgacaggtactttgagaaggtggctaggcaggccatagcggggctaggcacagatgagaactccctgaccagggtcatcaccacccgcgctgaggtggacctcaaactgattaaggaggcgtaccagaagaggaacagcgtgccgctggagcgggccgtcgcgggggacacctccggcgactacgagagcatgctcctcgcgctcctggggcaggagtgatgagccgtactggtgcgctggtgcctttctgaccggcgccgtggtgtttgttcgtgatcgtaataaacctgattgcctagctgtacgtgaggctgtttcttcggtcctggtactgtcgctgcagcatgcatagcagtggaccagtggtgataaataagttactgtgctttcgacgaatgaaccctttttttgtgtct

SEQ ID NO: 26804 - DNA, 1630 bp, Zea mays
  Clone ID: LIB4605-012-D12_FLI
atgcgaacaccttgcagtgagtgacacacctcctgctcttccatacgcctccagtagtccagtgcagcctgagctgagctgcactgaggtacgagtagctcacgacaccactcggtgataaactaatggcgtcggcctccgccgctcccgcgccggacagggaggagattgtgttcctggacgtggagacgtcgaccccgccgtgcgtgctcctcgagttcggtgccgtagccgtgtgctcgcgcaggctcgtggaggtctcctccttcgccacgctcgtgcggcccgccaacctcgacgcgctcccggacccgaccgcgcggagcaacggcatcacgcgcggcaccctcgcggacgcgccgccgttcggcgacgtcgccgacatggtctacgacgtcctgcacgggagggtgtgggcagggcacaacatcgtgcacttcgattccatgataatcatggacgcgttcgccgagattgggcgaccacctcctcaacccaaggccatgatcgacacccttccgttgcttacccagtgtttcgggccgagagcaggggacatgaagctggcaagcttggcaaactattttggtctagggaagcaaaggcacaggagcctggatgatgtgaaaatgaatattgacgttttcaagaactgtgctacagtcctgttcctggaggaaagccttcgaggtgtgcgtgtgcctaccgttcagaacatgtcgtcggggggtgcaacaatcagaacccaaggaataacaagtgatcctgcaccgaacagggataatcccaacgagtcgttgctggtgggatcgtccactgtgcatgtggaggaaatgatgctagacaccactgtcactgtgcagacggatacaaggagctcaggtgccttttctgggttcgttgagctagacgacgtttcaacggagagtatcaagatctcagctccgctgttcctacgcccgttcggtccgagagcaatcgtccagcacaagggttccccgctccagctcatctgtccaggtctggaagtcctctgggtcaacacaaaggggttcccaaacagcccacatcgaccaaaggtgggcataaaggtcgacatacctgagaaccttagtaaggtactagggttttgcgacgatctagcgcagagctcgtcgtcgtcgccaggaccaggagcaatatgcagtaattccagatggaaatccctgattgagagagacgcggatcggcgtccaacggtctggctgaagattcctacctttggcagtggcgacaccgcagcctgccggacacatgtatacgaaaaggagtgcgacggtgtcgttccaaggcttgtttccgaaagggtcgatccatcggaactggcctcgatgcttcaagggaacaaggtggtggatgcgttcgtctcggtggaaacattcgaccactaccaaagcgctggcattcggttggttgccaataggctggatgtgcacttcaaaaggcaacagcaggcctagctagttccttatggtgctctccggtcaggccgaggctggattgaaggggattgacccatccaattctcctgtgattctcttgttaccgaatcgatccaggactatataaataagtaagtttatgtcgtccc

SEQ ID NO: 26805 - DNA, 1164 bp, Zea mays
  Clone ID: LIB4606-001-A8_FLI
ctcgaggccggccgggaatgaccgcttgtgatctgatctgacggtagaggtaagttgttctagaacaagtagacgccaccgaagaatctagaatacagcacgcagggcacaaggagaagaagaggggaagaaatattcttcccgtcgaaagacggagagaggaaaagggacaagggcaaggcaagagagaggcgtcgtcgtttgatctgctgccggggtgcgaagaggaagaggaagaggagcgccggagttgtaaagatgttcctggtggactggttctatggggtgctggcatcgcttgggctgtggcagaaggaggctaagatcctcttccttggcctcgacaacgccggcaagaccaccctcctccacatgctgaaggacgagcggctcgtacagcaccagccgacgcagtaccccacgtcagaagagttgagcatcggcaggatcaagttcaaggcgttcgaccttgggggccgccagaccgcccgccgcgtctggaaggactactacgccaaggttgatgctgttgtgtacttggtggatgctgttgacaaggaacgttttgccgagtcgaagaaggagcttgatgcgcttcttgcagatgactcccttgcaaacgttcctttcctcatactgggcaacaagattgacatcccatacgcggcttcagaggaggagctgaggtactacctcggcctgagcaacttcacaaccgggaagggcaacgtgaacttggccgactccaacgtccgccccctggagatcttcatgtgcagtgtggtgcgcaagatgggctatggcgaaggcttcaaatggatgtctcagtacatcaagtgagtcgctgctgtcctcttttgtccatggcgctgctgctttcgcaggagggttgaaatcaagtctggtcgtgacatggcagctgcatggaaaggtttatggtagctagtgataggcaaagcttgtaagtcggtgttaatcctagatatgtgatgtggggtctactttctcttctgattgtttcttggggtggtctaaacggttcaaaaaatgcgacttcttcgggtcagctagaagttatgtaatcacgttacatgaagcagcgcattgttcgccagctgctttggtgtggtggacttctgtcggtaatggtgagcttgcggtttc

SEQ ID NO: 26806 - DNA, 1825 bp, Zea mays
  Clone ID: LIB4606-001-F2_FLI
cgaggccggccgggatctttgcgcttggggcaatgacgcagctcatgaggttataccgaggcgcgtcaattgctggttgaaaactgtttccaaaccccctctgcggcccgcaagggccccagagaatttctggaagggctccctctaaccagggtaaagcccacatagcatagcagagcaggcgcacggcgcaccgcacacctcactgccgctcccttctcgtctcctctcctctcctctcctcggcggatccggcaccgacccaccgcccctctgctcgctccttccgccggaatcgctgctcctctctgtgctgtcgatttgtgcggcgactgttagtttggttcggtcccatccttctgttgatcaatggctgacggtgaggatatccagccacttgtgtgtgacaatggcactggaatggtcaagcccatgcttctctctgcaggctggctttgctggtgatgatgcgcccagagcagtgttccctagtatagtcggccgccctcggcacacgggtgtgatggttggaatgggccagaaggacgcctatgtaggtgacgaggcacagtcaaaaagaggtatcttgaccttgaagtaccccattgagcacggtatcgtgaacaactgggatgatatggagaaaatctggcaccacaccttctacaatgaactgcgtgttgctcctgaagagcacccagttctgctgacagaagcacctctgaacccaaaggcaaacagagagaagatgacccaaattatgttcgagacattcaatgcaccagcaatgtatgttgctatccaagctgtcctttccctgtatgccagcggtcgcactacaggtattgtgctcgattctggtgatggtgtgacccacaccgtgccaatctacgagggatacgcgctccctcatgccattcttaggctggatcttgctggccgtgatctgactgactgcctaatgaagatcctcacggaaaggggttattccttcaccgcgacggcagaacgggaaatcgtgagagacataaaggagaagctggcctttgtggccctagactacgagcaggagctggagaccgctaagagcagctcctccgtcgagaagagctacgagctgcccgatgggcaggtcatcacgatcggcgcggagaggttcagatgcccagaggtgcttttgcagccgtcgctgatcgggatggaagctcccggcatccacgagaccacctacaactcgatcatgaaatgtgacgttgatatcaggaaggacctgtacgggaacatcgtcctcagtggagggacgaccatgttccctggcatcgctgacaggatgagcaaggagattactgccctcgcgccgagcagcatgaaggtcaaggtcgtggcgcctcctgagagaaaatacagtgtttggattggtggctcgatccttgcgtcgctcagtacgttccagcagatgtggatatccaaggatgagtacgatgagtctggccctgctatcgtccaccgaaaatgcttctgagctagctatctgccgcgcctttcatagcgtgtcaagctgttgagatctgcgttgttgagttgagtgtctctatggagtatcacatactttctgcatgaggggggaagagtatacccaactaagcgcatgcctttcggatgccctgcttcgtgattcagatgctgctttctttcaagtgatatgtcgatgtagtgtgcgagcaatgtatttggtttggctacagctgttcctgtcgtctgtgcgtaaaacattagctatgtatctatccatatctgcatatttgaatgtatggtcgttttctcg

SEQ ID NO: 26807 - DNA, 1442 bp, Zea mays
  Clone ID: LIB4606-002-E10_FLI
gggctgccttaaccattcctcccaacaccacctcgcctgcgatcttcgtagcctccgtcgcgtcgagcatcgatcatgtcggcctactgcggaaagtacaaggatgagctcatcaagaatgctgcctacattggcacccccggcaagggtatccttgctgctgatgagtccactggcaccattggcaagcgcctttccagcatcaatgtcgagaacgttgaggagaaccgccgtgccctccgtgagctcctattctgctgccctggtgctctccagtacatcagcggtgtgatcctcttcgaggagaccctgtaccagaagaccaaggatggcaagccttttgttgatgtcctcaaggagggaggcgtcctccctggcatcaaggttgacaagggcaccattgaggttgttggcactgataaggagaccaccacccaaggccatgacgaccttggcaagcgttgcgccaagtactacgaggcaggtgcccgctttgccaagtggcgcgctgttctcaagattggccctaatgagccatcacagcttgccatcgacctgaacgctcagggtctggctcgctatgccatcatctgccaggagaatggtctggtgccaattgttgagcctgagatccttgttgatggccctcatgacattgatcgctgcgcttacgtcactgagaccgtccttgctgcctgctacaaggcgctcaacgagcaccatgtcctcctggagggtaccctcctgaagcccaacatggtgactccaggctccgactccaagaaggtgacccctgaggtgattgctgagtacaccgtccgtaccctccagaggaccgtccctgctgctgtgcctgctgttgtcttcctctctggtggacagagcgaggaggaggccacccgcaacctcaatgccatgaacaagctcagcaccaagaagccgtggtccctgtctttctccttcggccgtgccctccaggcgagcaccctcaaggcctgggctggcaaggtggagaacctggagaaggctagagctgccttcctcgccaggtgcaaggccaactctgaggctaccctcggcacctacaagggtgatgctgccgccgacaccgagagcctccacgtcaaggactacaagtactgagttgcttctctttgcgtgcccgttttggaactcctgcctacgagctaggttgcggagtgtggtttgctcgttagagcttattttcggacatccaaaaaacatgcttcctatgtgggatgatggttatctttatatttgtatgttaattagtctctttgctgttaaatttcgtgtaagttggtcctgccgatggagaatcgagcagctccctttttttgttctatcaactatgctgtaattctggctatgtatcggcaaaaacaattctatatgctgagttggagtcggcaaaaattcat

SEQ ID NO: 26808 - DNA, 1748 bp, Zea mays
  Clone ID: LIB4606-002-G11_FLI
ctcgaggccggccgggggtgccttgcttgttctagtagccggttctcaatcctcacccaagcgcctctaggccgaggctcggaggccacggcgaggaggagcagcagctgccagcaggggaggacacggatagtagccggcctcccgccgcccgaggcccaaccgcccccgcaattactgttgttgctgcgtgcagagcggttttgaattgccgtctcctacccaggaataatccatggccccgcctccgccatggcttgccgccctcctcttcctcctcctacccgcgctgctgccggcggtcggctccgtctccggcgcggcggctgccggcatcttccgggtgcggcgtaagttaccagccggagttggaggggacactggcgccaacatcagcgcccttcgtgcccacgacggtcgccgccacggccgccttctcgcggctgccgacctcccgctcggtggcctaggtctccccactgacaccgggctctacttcacggagatcaagctcgggacgccgcccaagcgctactacgtccaggtcgacactggcagcgacatcctgtgggttaactgcatctcctgctcaaaatgcccccgcaagagcggactcgggttagacttgacgttctatgaccccaaggcgtcctcgagcgggagcacggtgtcctgcgatcagggattctgcgcggccacctatggggggaagctgccagggtgcactgccaatgtgccctgcgagtacagcgtcatgtacggtgatggtagctcaacgactgggttcttcatcaccgatgcgctgcagtttgatcaggtgactggggatggacagacacagcctggcaatgctaccatcacattcgggtgtggtgctcagcaaggtggggatttgggcaactcaaaccaagcgcttgatggaattcttggttttggtcaggcaaatacgtcaatgttatcacagctagctgctgctggtaaagcgaagaagatatttgctcattgcttggataccataaagggtggtggaatttttgctattggaaatgttgttcagccaaaagtaaaaacaacaccgttagtagctgacatgccgcactacaatgtgaaccttaagtcaattgatgttggtggcactacattacagctcccggctcatgtttttgaaacaggagagaaaaaaggcaccataatcgacagtggtactaccttgacataccttccagaattggttttcaaacaagtaatggatgtggtatttagcaagcatcgagatatagccttccataatttgcaagattttttgtgtttccaatattctggaagtgtagatgatggattcccgaccatcaccttccattttgaggatgatcttgcactgcatgtgtatccacatgagtactttttcccaaatgggaatgacatatactgtgtgggattccaaaatggtgcattacaatcaaaagatgggaaggacattgtgcttatgggagatcttgtgctttcaaacaagttggttgtctatgacttggaaaatcaagtcatcgggtggactgactataactgttcgtcgagcattaaaattaaggacgacaagacaggcacaacctatactgtcgaatcacatgacatatcctccggatggaaattccactggcacaagtccctggttctgttgttggtaacaatggtgtggagctatttatagtacgctaactctattgtacaacacgaacacgcacttaccg

SEQ ID NO: 26809 - DNA, 1148 bp, Zea mays
  Clone ID: LIB4606-002-H7_FLI
ctcgaggccggccgggatttccggccctgcaatcctgcaccggcgcgaaagccccctcacggcctcacctccactccggtgatggccgcccctcctttacttctcagatctcagtgctcacgccgtccacggtccactagttgcatcggctcccgcataaagatccacaccacttgagcagcagctagctcaagggaaggagaaggctggaagtggaaagaagtgggttcttgcttgagctgagctcttgctgcccttgaatctgttagggagtggagaacggagtatggggcgcggcaagatcgagatcaagaggatcgagaactctaccaaccggcaggtgaccttctccaagcgccgggccggactggtcaagaaggcacgggagatcggcgtgctctgcgacgccgaggtcggcgtcgtcatcttctccagcggcggcaagctctacgactactgctcgcccaggacctcgctgtccaggatcttggagaagtaccagaccaactccgggaagattctgtggggtgagaagcacaagaacctgagtgcagagatcgacagagtcaagaaggagaacgacaacatgcagattcagctcaggcatctgaaaggcgaggacctgaactccctgcagcccagggagctgatcgctattgaagagggcctccagaatgggcagaccaacatgcgcgagaagcagatggactactggaggatgcacaagacgaatgggaagatgctggaggacgaacacaagatactgacttttaggatgcaccaacaggctgttgatctgagcggcggcatgagggagctggagaccggataccatcaggtccagcacgacagggatttcatttcccagatgccgttcaccttccgggtgcagcccaaccaccccaacctgcaggaagacgagtagctacagcctgctggatagtgttctgcatgccgctctgaactgaagctgcaggaagacgagtagctacagcctgctggatagtgttctgcatgccgctctgaactggagctcctcacctgcagcttctatctcgcgtttcatcattcagcgttagctgggtatctttcttttcatggcaccctggatgaagtctgtcagttgttactacgatgtggtcttgtct

SEQ ID NO: 26810 - DNA, 1788 bp, Zea mays
  Clone ID: LIB4606-003-C11_FLI
aacatggctagcacaacccaagaaagatccatagggagggtagcgcgtgcacggtgcacacacatggatcctttggcttgttctagatctagcgactagggacgcttgctcgcaggagattctcccttctcgtaagaacagctcaccgtcactagcaacatgccaatgacaatatcataagctgcatccaggtcgcagatgcccacacagccaccagcacgtacccaactcccacgcagctcggttcagtaaaagctactagcagtagtgggcagtggttggcacatcgcagttgatacggaggcgtagcgtaggctgtactggttctcccgcgtcggcgtcgacggccgtgtccttctcgggaagatggtaatgggggccgcgtccgtcggcacgctgctcgtcgcgctcgccgtcctcgctccggcggtgatggcgcagagctgcgacgacgagctgccggctcagctcgccggcaacttctcggggctcgcctgcgcccccgtctggaacaacttcgtgctccggtacgcgcaggacaaggacaacgtgctgcgggtggtgctgtcgaccatgtacagcacggggtgggtggggatggggttctccaagaacggcctcatggtggactccagcgccatggtggggtggatcggcaagacggggctcccgcacatcaagccgttctcgctggggggcaagaccccctcccaggtggtcgcggaccagggcttcctcgtctccagcgacaaccacaagcccaccgtgctcgtgcagcaggccaagatctacctcgccttccagctcagcttcaccgagccgctcaggcgccagaacgtgctcctcgccgtcggctccgccatccccgtcaacgaccgcctcgccgagcaccaggataagacctccatcgtattcgatttcaccacaggcagctcatcaggctcgtcatccttcccggaaggtctgaaaaggacccatggggcgctcaacctgttcgcctggggcgtgctactgcccatcggcgccatcgtcgcaaggtactgcaggagatgggaccctctgtggttctacctccacgccggcatccagttcgtggggttcatcctgggcctagccggcgtcgtggctggagtatccttgtacagcaagatccaggccgacgtccccgcgcacaggggccttggcatattcgtgctcgtgcttgccattttgcagatcctggcgattttcctgaggcccaacaaggactccaagtaccgcaagttctggaactggtaccaccactgggtcggcaggctcgccctcttctttgcagccatcaacattgtgctcgggatcaaggtcggcggagcaggcaactcttggaagatcggctacggtttcaacctggccgtccttctgatcaccatcgtcaccctggaagtcctgctctggacgaggtggaaaaacagcaccggttccacgggggcatattagctacttaaccgatttttataggtgtttgtgatggtcagtgaaggaggttcgtattcttttgttcgaatattttcgcgtgtatgcagttgctgtaatgtccgcgtttgctgcgtgatgtgttttccttttggtgcatgtgtcctggacttgccgttccgatgccttttgtgctgctcggaatggagatggaatgatgatttccgcaattccgccgcatttcccatgctgcgaatggtggtagatctggtatattctgttgtgacactgtgactgacttagagtatctatacgagactatatttttgactctct

SEQ ID NO: 26811 - DNA, 1206 bp, Zea mays
  Clone ID: LIB4606-004-H7_FLI
atccaccagaccaccagtggatgcgcccctgccccccatgccccaggtcgagtcggccactgcctcggaggcgccgccgccgcaggacgcatggctcgtcgagctcggcagtcgcctcccgcagtgggagtcgctgcgggattcctccaaggtcattatcccgatttcaatatctagggtgaaccagtttgatgctgcaaggctagatgttgagatgtcggccatgttgaaagagcagctagtcaaagtgttctctttgatgaagccaggactcttattccaatatgagcctgaacttgatgctttccttgagttcctcatctggaggttctcaatttgggctgacaagcctacccctggcaatgcactgatgaacctgaggtacagagatgagcgggcagcacccatcactggaaaagaagttagaacaggtttggaaggacctgggctttctgtttctcaaaagatattttattgtattagctttgttggtggccaatatgtatggtcacgattacaatctttttctgctttccgtcgatggggcgattctgaacagagaccactagctcgccgtgcttgggcgttgatgcggaatgctgaagtattttatagggctgcttcattctttaacctattattgtttctctatggtggaaggtacaaaactgttgtagaaaggattctgaaggcaagacttgtttatgggagccccaacatgaatagagctgttagttttgagtacatgaatcggcagctggtctggaatgagttttcggaaatgttgcttttgcttcttcccctcctaaactcgtcttcggtaaagaagttccttctccccttctccaaagataagtcaggaggttcttctggtgatgaagcagattgtcctatatgtcggtccagtcctagcattccatttattactcttccatgtcaacacaggtattgctactattgcctacgcacacgttgttcggctacgacttcttacagatgcacacgttgtgacggggcggtggttgcaattcaaagactaggatcaggttagttttacgacctagttgggttaaagaattctcgcccgtttctacagagaatcagcacttcggtgtttcatacggttacaagtttggatacgcgtcattcactgtatgtacatgtaattgccccaagtgtggacagttcggatgccatgagcccatt

SEQ ID NO: 26812 - DNA, 1094 bp, Zea mays
  Clone ID: LIB4606-005-A1_FLI
agttctgacaaacacctctgtgatatggtaccagcagcagccacaaggaaggggggactcgtcattaccgccttttccccgggcaccaccaccaccaccccagccgcacagctcactccagccgaaagcacaagcacgccatggcagaggagaagaagaggcagaagcacaagcacaaggagaaggagaagcagccgggcggcggcacggagcaggcggcgcacttcaagccgtgcggcgacgtgaagggcatccggttcgggggccagttcatcgtgaagtcgttcacggtgcggcgggcgtcgcccctggagctgctgcggctgctgggcatcccgccgtcgtacctgagcgagtgccagagcctgccgttcccgtccaccaccgcctacatgcccacgggcttcaccatcctggcgcaccaggcgtggcacacgctgacgctgggcctgggcaccaacaagtccaaggcggcgctcttcgtgttcgagtccgaggccatgaaggcggccgtcgaccgcctgtggcccgccgtcaccccgctcggggacgtcaacaggaggctcatccgcggcctcacgggcagcgagatggcgcgcttcaagttccgcaagggctgcctcaccatctacgtctacgccgtgcgccggctcggcgccgccgggttcatgcgcgccgacgacctcaggcgggtgctgcagtccgtcgtcgagctcaaggacttcctggaccacacagccatgctcgccatcccgagccagaagagcatcaccctgcagtcccggacagcggtggctcactgagaggagatcgtcgtcacagggcatctcacctccagagcctcgagtctgatctgattctgatgacgccgcaagaacctcgatcggttcagcatcgcagaacagcctgaacaggtatggtcgtcggtttgtagctgtaatcttcagagggcctatctcattttttttgcccccctctccctctctcggttggattcgtttgttcagtgtcggtggtgcaagtgttcgcctcctctgctgggagagcagatgtatagatctgttgagcaaaaaaaagaagaagaagtgttcccg

SEQ ID NO: 26813 - DNA, 1527 bp, Zea mays
  Clone ID: LIB4606-006-G5_FLI
ccgggactcgcctcgacgcgcctctgaaagttcggagccgccggcccgtccgcctccctctccgcctcccgtccccaaggccaatagttttcaagtggcaatggcggaccaggctaaccaacccactgtccttcataagctcggtggccagttccacctgcgctcgatcatctctgaaggtgtacgggcccgtaacatatgcccatctgtctcatcttatgaaaggagatttgccacaaggaactacatgacccagagcctttggggcccttcaatgtctgttagcggtggcatcaatgtcccagtgatgcagaccccgctctgtgctaatgctcctgctgagaaaggaggcaagaacttcatgattgatttcatgatgggcggtgtttcagctgctgtttcaaagactgctgctgctcccatcgagcgtgtgaagctgcttattcagaaccaagatgagatgattaagtctggtaggctatcagagccgtacaagggtattgttgactgcttcaaacgtaccattaaggatgaaggtttctcttccttgtggaggggtaacactgctaatgttattcgttacttccctactcaggctttgaactttgcatttaaggactacttcaagaggttgttcaacttcaagaaggatagggatggctattggaagtggtttgctggcaacctggcctctggtggtgctgctggtgcttcctctttgttttttgtgtactccctggactacgcgagaacaaggttggctaatgacgcgaaggctgccaagggaggaggtgaaaggcagttcaatgggcttgtcgatgtctaccgcaagacactcaagtctggtggtattgctgggctttaccgtggatttaacatctcctgtgttggaatcattgtttatcgtggtctgtactttgggctctatgattccatcaagccagttgtccttactggcaacctccaggacaatttctttgccagtttcgctctgggttggctgatcactaatggtgctggtcttgcatcttaccccatcgataccgtccgcagaaggatgatgatgacatctggtgaggctgtcaagtacaagagctccttggacgcgttccagcagattcttaagaaggaagggcccaagtccctgttcaagggtgctggtgctagcattcttcgtgccattgctggtgctggtgtgctttctggctatgaccagctccagatcctcttcttcggaaagaagtacggctccggcggtgcttaaatggagaaatatgatgacgaacaagagcagtgtgtgttcccggtcctttccaatcaggatctggtgaagtttttgcctttcatatcgaagaaattaataattcatgtagagggaggattcttccaacaatttgttttggatggagacttagatctccaaacactcgtaactatcctactaggtggtgacatcggtccccaaaaacatttatggtcatagagtctgcccttcgtttgtcagtcgggcaatttttcttgcatacg

SEQ ID NO: 26814 - DNA, 1009 bp, Zea mays
  Clone ID: LIB4606-006-H9_FLI
ccgggctaacactcccatccagccgccaccaggtgcagagtctttcgtcatctcttctccggcgaagaacccccagtcgcccaccagatcacttgttaaactttgttgaggggtgatggcggtttctttcgcaaacctcagctccgaggcagggcttaaaaagcttgatgagtaccttctcactcgcagctacatcactggctaccaagcttccaaggatgacttggctgtctacacttcgttttcgcctgctccctcgtccaagtatatcaacgtagcaaggtggtttaatcacattgatgcgctcgtgaggctgagcggaattactgcagagggccaaggtgtgaaggttgaatcgtcagcagttccttcagccccaactccagatgttgctgaagcacaggccccagttgctgaggaggacgacgacgatgatgttgacctttttggtgaggagaccgaagatgagaagaaggctgctgaagagcgtgctgcagctgccaaggcttctggcaagaagaaagaatctgggaagtcatcagttttacttgatgtgaagccatgggacgatgagactgacatggccaagctcgaggaagctgttaggagtgtccagatggaagggttgctctggggcgcatccaagcttgtcccagttggatatggtatcaagaagctgcaaatcatgatgaccatcgtcgacgaccttgtctctgtcgacactctcattgaggactatctgtgcgctgagccagttaacgagtacgtacagagttgcgacatagttgccttcaacaagatctaggcgtgactttcgatcagtccttcccctggggtgctggcgatggtggtggctgggcaatgcaccagcctaatttatccatagctatatgtctgctttgtgtggccagtgatattgccgtgagtatttttggatcctattcgagtcgaatgtaccagtaccagagttaatttgctttaattcgaaacaccgttccagttggaattc

SEQ ID NO: 26815 - DNA, 1559 bp, Zea mays
  Clone ID: LIB4606-007-A12_FLI
actcgcctcgacgcgcctctgaaagttcggagccgccggcccgtccgcctccctctccgcctcccgtccccaaggccaatagttttcaagtggcaatggcggaccaggctaaccaacccactgtccttcataagctcggtggccagttccacctgcgctcgatcatctctgaaggtgtacgggcccgtaacatatgcccatctgtctcatcttatgaaaggagatttgccacaaggaactacatgacccagagcctttggggcccttcaatgtctgttagcggtggcatcaatgtcccagtgatgcagaccccgctctgtgctaatgctcccgctgagaaaggaggcaagaacttcatgattgattccatgatgggcggtgtttcagctgctgtttcaaagactgctgctgctcccatcgagcgtgtgaagctgcttattcagaaccaagatgagatgattaagtctggtaggctatcagagccgtacaagggtattgttgactgcttcaaacgtaccattaaggatgaaggtttctcttccttgtggaggggtaacactgctaatgttattcgttacttccctactcaggctttgaactttgcatttaaggactacttcaagaggttgttcaacttcaagaaggatagggatggctattggaagtggtttgctggcaacctggcctctggtggtgctgctggtgcttcctctttgttttttgtgtactccctggactacgcgggaacaaggttggctaatgacgcgaaggctgccaagggaggaggtgaaaggcagttcaatgggcttgtcgatgtctaccgcaagacactcaagtctgatggtattgctgggctttaccgtggatttaacatctcctgtgttggaatcattgtttatcgtggtctgtactttgggctctatgattccatcaagccagttgtccttactggcaacctccaggacaatttctttgccagtttcgctctgggttggctgatcactaatggtgctggtcttgcatcttaccccatcgataccgtccgcagaaggatgatgatgacatctggtgaggctgtcaagtacaagagctccttggacgcgttccagcagattcttaagaaggaagggcccaagtccctgttcaagggtgctggtgctaacattcttcgtgccattgctggtgctggtgtgctttctggctatgaccagctccagatcctcttcttcggaaagaagtacggctccggcggtgcttaaatggagaaatatgatgacgaacaagagcagtgtgtgttcccggtcctttccaatcaggatctggtgaagtttttgcctttcatatcgaagaaattaataattcatgtagagggaggattcttccaacaatttgttttggatggagacttagatctccaaacactcgtaactatcctactaggtggtgacatcggtccccaaaaacatttatggtcatagagtctgcccttcgtttgtcagtcgggcaatttttcttgcatacaatgccttcgtttaagtatcggatgagttgctgcgact

SEQ ID NO: 26816 - DNA, 1350 bp, Zea mays
  Clone ID: LIB4606-007-B5_FLI
tctcactcgcctcgacgcgcctctgaaagttcggagccgccggcccgtccgcctccctctccgcctcccgtccccaaggccaatagttttcaagtggcaatggcggaccaggctaaccaacccactgtccttcataagctcggtggccagttccacctgcgctcgatcatctctgaaggtgtacgggcccgtaacatatgcccatctgtctcatcttatgaaaggagatttgccacaaggaactacatgacccagagcctttggggcccttcaatgtctgttagcggtggcatcaatgtcccagtgatgcagaccccgctctgtgctaatgctcctgctgagaaaggaggcaagaacttcatgattaatttcatgatgggcggtgtttcagctgctgtttcaaagactgctgctgctcccatcgagcgtgtgaagctgcttattcagaaccaagatgagatgattaagtctggtaggctatcagagccgtacaagggtattgttgactgcttcaaacgtaccattaaggatgaaggtttctcttccttgtggaggggtaacactgctaatgttattcgttacttccctactcaggctttgaactttgcatttaaggactacttcaagaggttgttcaacttcaagaaggatagggatggctattggaagtggtttgctggcaacctggcctctggtggtgctgctggtgcttcctctttgttttttgtgtactccctggactacgcgagaacaaggttggctaatgacgcgaaggctgccaagggaggaggtgaaaggcagttcaatgggcttgtcgatgtctaccgcaagacactcaagtctgatggtattgctgggctttaccgtggatttaacatctcctgtgttggaatcattgtttatcgtggtctgtactttgggctctatgattccatcaagccagttgtccttactggcaacctccaggacaatttctttgccagtttcgctctgggttggctgatcactaatggtgctggtcttgcatcttaccccatcgataccgtccgcagaaggatgatgatgacatctggtgaggctgtcaagtacaagagctccttggacgcgttccggcagattcttaagaaggaagggcccaagtccctgttcaagggtgctggtgctaacattcttcgtgccattgctggtgctggtgtgctttctggctatgaccagctccagatcctcttcttcggaaagaagtacggctccggcggtgcttaaatggagaaatatgatgacgaacaagagcagtgtgtgttcccggtcctttccaatcaggatctggtgaagtttttgcctttcatatcg

SEQ ID NO: 26817 - DNA, 1385 bp, Zea mays
  Clone ID: LIB4606-007-D2_FLI
ccggccgggacggcggcgcgtgcgactccccagcatgggaaataaatagatgtcccaattacccatcgagccgtcgtcgtggagcggcaggatttgaaaatctcgcgagaggccctgtccttgtccacttcctccgcttcgccgtcctcaaagcagcggaaggggagaggccagggtgcagcagcaggacccccaacggcaacctccgccacgcgccacggagcaaccaagcagcaggtaagtgacgagacaaagatggtgcaggaggagctgccgcaggcatggtggttcgacagccacaacctcgcgaggccgtcgccatggctgaacagcacgctctcagagctggatgacaagaccaagcaaatgctgaagctgatcgaccaagacgcggactcgttcgcccagcgcgccgaaatgtactacaagaagcggccggtgctggtggacatgctcggcgacctgtaccgcacgcaccgctcgctggcggagcagtacgacctgctgaagcacggcagcggcacacggcacacggtcttcggcctgtcttcctgcacacagagccggtcgtcgacgaacggcaggaccactcctcgctcctcctgctcggcctccatgtacgactcggagtccgaagtggacgaccccgggcaggaagaatacgaggcagagcagctggcgcgtgcggggatggccaagacggactcgccgccgccgccgccggagcagcagcagcagcaagaacagcgtgagcaggcggagcagcagatgcgcgcggagatcgagaggctcaaggcgcagaacgcggcgctgcagaaggcggccgaggagagcgcggcggcgctcagggcggagctggccgggaaggacgaggagaagcgggaggtgatcaggcagctggcgtcgtccatggacgtgatgaggcaggagaacctcacgctgcgcgagcacatcagcaggggatcgtcgaagcgttcctctgcgccccgcgcgggagctgcgttcgatctcaggaaggtggccaggggcctcttctccacgaggctgttcaccgcgcactgcaggcctacggaccccatcgtcgcgctctgagcaggatgccaggatcgtgaagagagacagcgtagatatgcatttgttgtaggcgagtgatgtgcatattataggatggcatcgatcgatattccctccgctgtctgtttctcaggttcaactaaagtagagggagcactcgtttcttactatgatggcgtagtagtagttaactgtagttaaatatttactagtcatatggatgcatgtgtgtatgatggcgttaattattgttaaagtattattttgtcagttcctcttctgctatgactatgatttttgggcctgggttg

SEQ ID NO: 26818 - DNA, 946 bp, Zea mays
  Clone ID: LIB4606-007-D6_FLI
tccgccttgtcctctttcctcaacctaacccccatccagcgaggtttctccgctctcatataggtgaggccccaaaccccctgcccctctgcgttctctgcgagcttcggattgagtggcgctgaccgcgtttgtgggggatcagaatcagatatgaagagggcggcgccgtctcaggagcccctcgacgtttcttccggggactcctcgggctcggattccgatcaattaggcggcaaggataagggcgggagcgcctctaaagctgctgcaggggctgaagatgtgaagagggtggtgctgcataaagaatcccaggacgtatcttctgatgatgacctgagctcggattctgatgatgatgctgggaaggggaatgcttggaatgcctttgggctgcccaattcctccaaagctgcttcgacggcagaaggtgctctgatcaggagggccgaaatgtatcagcaatacatgaagcacattccggttcctgcttactgtgattctgtaatcccattcacatcgtggctgggactcgccggatcgctgaagcagctgtatgagcaacccttgcattacctcaccaatgtcctcttaaaaaagtgggaccagcaaaggattgggagcgatgatgagcaccggcgtctggacgctatcatccaccctgccagagctgagaccctggtttgggccactgaagaggtccataggctgaccacctctggccagcacttggctagcctctgggcctcagatcccatgtatcatgcttacgtagatcccgtgtttgcttccgtaaagctggagtaccagccgttatgagtttggggggtgggtgggggggtcttcttcttctctgcctgttttggtgtttccatggtgtaagcctgcacactttgatttgctaaaatagcaagtaccaatctagtgatgcgaactccagtcc

SEQ ID NO: 26819 - DNA, 909 bp, Zea mays
  Clone ID: LIB4606-007-E2_FLI
ctcgaggccggccgggcctagccgcatcccttctttcattcgccgccgccgcctcctctctgctgccgtcgccatggggagaaggcctgcgagatgctatcgccaaatcaagaacaagccataccccaagtccaggtactgccgtggtgtccctgaccccaagattaggatctacgatgttggcatgaagagaaagggtgttgatgagttcccctactgtgtgcaccttgtctcttgggagaaggagaatgtctccagtgaggctcttgaggctgcccgtattgcctgcaacaagtacatgaccaagtctgcaggaaaggatgccttccatcttcgggtccgggttcaccccttccatgtccttcgtatcaacaagatgctttcgtgtgctggggctgataggctccagactggaatgaggggtgcctttggcaagcctcagggcacctgtgctagggtggacattggtcaggtactcctttctgttcgatgcaaggacaacaatgctgcacatgccagtgaagctctgcgacgcgccaagttcaagttccctggccgccaaaagattattgagagcagaaagtgggcttcaccaagttcagccgtgccgactacctgaagtacaagagtgagggtagaattgttcctgatggtgtcaacgcaaggctgctcggtaaccatggaagacttgagaagcgtgctcctgggaaggctttcctcgaggccgttgcttaagtccaatctacagttggaatgcgaatccagacgttttgctttagcctatcttattttgctttgtgcaacatgaattttaagtgtatggggtattacagtgccttgtcttgtgtgaacctgcttatctcgtgctgaacatcgttatgcatggaagtacttatcttttgttctgcg

SEQ ID NO: 26820 - DNA, 1627 bp, Zea mays
  Clone ID: LIB4606-008-A10_FLI
ccgggagtctcctctcatgtattaagctttgaaatgagtctccttaattgacgagtaatttggttctatactcgatgccctatgatgcaatcccccgaattgggcttactactttaattactacacttctgcagttctggaattcggaggcctggaattcggaggcccaggaatcatgatgcagcaggctcaggcgcacacctcggcacttgcgggagcgccgtcggcgtcggcggtggcaccgacggtggctcacccgcacgatccggtgggcggggatgcgccgccgaagcaggtggctcaggcgatggagcggctgggccgtgctggccggttcatcgcggacatccggctcggcgcggaccgcctcctcgaggctcttttcgtctccggcgacgcgcccccgtacagcgtgcgccagcacgtcgacaggatggagcgtattatcgtcaaggaggatgccgccatgcgcctccactttcaggacctacgcgccctcggcaggcaattagaggagtctggagttcttaacggggcccttaaagctcaaggcaattcatggggcttgcacatgccactcgtttgtccagatggtgctgttgtagcttatgcttggaagcgtcaactagcaggtcaggctggtgcatctgctgtggacaggactaggttagctctcaaggctttcactgaccagaaaagaagattctttcctcatctagaagatgaagttgttagccatctccatgatggtcaacctggtgacaccaaaaagtcaaagttgtttaccagcaatggatatctagaggaaaaatctttgtctgaaatactgaaaaatttagaacatgaagtacctaacataaaaatattcacatactggcatctggattggtcaaaaagagcttcatcattagcatctctgttggatgatgactttgtggatccatctaaagagctgaacctgcaaaatatggacaaatcgagatctgatgctctgacaactaccatagaccaagttgctgttattgaattgctggttccttcaatatttagagctgtagtgtcattgcatcctgctggatctactgatcctgatgcagtggcattcttctctcccactgagggaggaagctatcttcatgcaaggggcacatcggtacatcatgtgtttaagcatgtaaaagaacatgctgacaaggcattgcagtacttcatcaatgcggagccgagtaaagcactacctcttcttttgcgttggattgccagctatcagactctgtttacgaaggtttgcagcaaatgcagacggcttctgatgatggacaagtctttggctttgctgttgcctcctgtccaccgcccctatcaccagacttcaaatgttggaccagatcttcaagaggcctaccacattggatgttcctcctacgatggctagctgatgcttctaagatgttcctgacattgtcattgacatagtacgtgtacaacagtcctgtgtgaaacaatgttctttttttttttggaatgtatccaacccattaggtgacatatgtatagaaacgttactggttgcttaggtacttgaagttctacgctcttgctcaaattaacctacagattaattcat

SEQ ID NO: 26821 - DNA, 1129 bp, Zea mays
  Clone ID: LIB4606-008-D10_FLI
ctcgaggccggccgggaggcacaccgcatcagtgtctggctcacctcacctgcagcaggtctcgtctcggtcatccagcgcattgctctcgatcgctgcagcgcatccagtccaaacacacaccggtcgaatcgagcaatggccgcggggctgcaggtgttcggacagccggcttccaccgacgtcgccagggtgctgacctgcctcttcgagaagaacctcgagttcgagctcgtccgcaccgacaccttcaagaagtcgcacaagctccccgagttcatcaagctgagggatcctaccgggcaggtgactttcaagcacggtgacaagacaatcgttgattccaggactatctgccggtacctgtgcacgcagttcccggacgacgggtacaagaagctgtacggcacggggtcgctggagcgggcgtccatagagcagtggctgcaggcggaggcgcagagcttcgacgcgccgagctcggagctggcgttccagctggcgttcgcgccgcacctcaaggacgtgcgccccgacgaggcccgcgtcgccgagaacgagaagaagctgcatagcatgctgggcgtctacgacgacatcctctccaagaacgagtacctcgccggcgacgacttcacactggccgacctctcccacctgccaaactcccactacatcgtcaactcctccgacaggggcaggaagctcttcaccgccaggaagcacgtggccaggtggtacgacaagatctccacccgcgactcctggaggcaggtcatgaagatgcagagggagcaccccggcgcgttcgagtgatgcgtcgtgcttccttctctctgcatgcatgcgcgcgtcgcggcgtgttcctcgtcgtcgccggcttcgtggtcgtcaggcttcacaccgtgtggtgtgtggttgtcgagttcgtcgtatcgtacgtacgtcctgtgggctaaaataacgtggagcctgcgcctgcctacggtgtctctcgtgtcttcctttcgctgcatatacaagcagtgtcttttctgggtattgtatggtgacgtaatcatcaactccttttgcattattggccaattcaataaaaatatgtccgggcattattttgctcgttcgcact

SEQ ID NO: 26822 - DNA, 1413 bp, Zea mays
  Clone ID: LIB4606-008-D11_FLI
cctgccttaaccattcctcccaacaccacctcgcctgcgatcttcgtagcctccgtcgcgtcgagcatcgatcatgtcggcctactgcggaaagtacaaggatgagctcatcaagaatgctgcctacattggcacccccggcaggggtatccttgctgctgatgagtccactggcaccattggcaagcgcctttccagcatcaatgtcgagaacgttgaggagaaccgccgtgccctccgtgagctcctattctgctgccctggtgctctccagtacatcagcggtgtgatcctcttcgaggagaccctgtaccagaagaccaaggatggcaagccttttgttgatgtcctcaaggagggaggcgtcctccctggcatcaaggttgacaagggcaccattgaggttgttggcactgataaggagaccaccacccaaggccatgacgaccttggcaagcgttgcgccaagtactacgaggcaggtgcccgctttgccaagtggcgcgctgttctcaagattggccctaatgagccatcacagcttgccatcgacctgaacgctcagggtctggctcgctatgccatcatctgccaggagaatggtctggtgccaattgttgagcctgagatccttgttgatggccctcatgacattgatcgctgcgcttacgtcactgagaccgtccttgctgcctgctacaaggcgctcaacgagcaccatgtcctcctggagggtaccctcctgaagcccaacatggtgactccaggctccgactccaagaaggtgacccctgaggtgattgctgagtacaccgtccgtaccctccagaggaccgtccctgctgctgtgcctgctgttgtcttcctctctggtggacagagcgaggaggaggccacccgcaacctcaatgccatgaacaagctcagcaccaagaagccgtggtccctgtctttctccttcggccgtgccctccaggcgagcaccctcaaggcctgggctggcaaggtggagaacctggagaaggctagagctgccttcctcgccaggtgcaaggccaactctgaggctaccctcggcacctacaagggtgatgctgccgccgacaccgagagcctccacgtcaaggactacaagtactgagttgcttctctttgcgtgcccgttttggaactcctgcctacgagctaggttgcggagtgtggtttgctcgttagagcttattttcggacatccaaaaaacatgcttcctatgtgggatgatggttatctttatatttgtatgttaattagtctctttgctgttaaatttcgtgtaagttggtcctgccgatggagaatcgagcagctccctttttttgttctatcaactatgctgtaattctggctatgtatcggcaaaaacaattctatag

SEQ ID NO: 26823 - DNA, 759 bp, Zea mays
  Clone ID: LIB4606-009-A3_FLI
ctcgaggccggccgggacaccggcattctgctctgcacaccattgctagctgcaacgcactgcaagaaagagctagctagctagctcaccgtcgttacgaagatgatcaagctgaggtaccctaagaagctgttcaggaggagctcctccaagggcagcagcactaccagcagcagcagcagcgacggcgatgccgccggcagcgcccgcggcggggagatcgagtgggaggtccggccgggcggcatgctggtgcagaagagggacgacggcagggggcacgtggacgtcatcaccgtgagggtcgccaccggcttctcctggcacgacgtctccgtcgtggctacctgcacttttgtgtgggcgtgcaaaaaaacgattgcaggtgagctgaaggcggtgctgtggaagatgacagggctggagcctcgggagcagaggctcctgttcaggggcaaggagagggaggacggcgaccacctccacatgatcggggtgagggacatggacaaggtgctgctcctggaggaccctgccctcaaggacatgaagctccgggccgggctcacggcggcgtatcgtcagactttcatcagggtctagtagtaggcttaggcttgccacccccgccccctaattaactgtgatgcatgatagagagagagtaaaacgaaccagtatcttgttttcggctgctctgacttctgggtcggtgaacgactgcctgccctgttgaagagaagccactgcttgttgttg

SEQ ID NO: 26824 - DNA, 1018 bp, Zea mays
  Clone ID: LIB4606-009-B2_FLI
tcgaggccggccgggcccatttcgaagcccaccgaattccctgcgattcctctcccctcgcctcctcgtctccccctaggggatcgtcggagaggaatcgcaaagagggccgtctcatccgagttaaggaagccatggagcacaaggaggctgggtgccaggcccccgagggacccatcctctgcatcaataactgtggcttcttcggcagcgcggcgaccatgaacatgtgctccaagtgccacaaggagatgataacgaagcaggatcaggccaagctggctgcctcctctatcgacagcatcgtgaacggcagcgacgccgtcatggagccggttgttgctggcagcaacacggtagtagctgttgcccaagttgagttgcaaacaatgaacgtgcagcagcccgctgatgttgccggacccagcgagggggtggcggcgatctccaaaggggggaaggtagggccgaaccggtgcagcgcctgcaggaagagggttggacttacgggattcaactgccggtgtgggaacttgtactgcgcactccaccgctactccgacaagcacgactgcaagttcgactaccggactgctgccagggacgccattgccaaggctaatccggtggtgaaggcagacaagctcgacaagatctagggggggttccctacggttgggtatcaggaagattgtaaaccgcggtaactcgtcatgcggaactgctgccttgccccccgcgcctttctcttccatgtttgctgctacaatcttgttgttgggcattgcagtgcacggtgcacacttgtgtagcccgcctcgagaattcctgcctctgcatctggtcagttctaaaatgatttgcatgttggctatgttgtgtaagctctatttatggtggtctcgctgagacgggtatttggcttcgcagttatctagctatgtgatgtactgttgtcttgtccctgggtattatatggtacactgcagccagtaatagtaatctgcaactgtgcgtt

SEQ ID NO: 26825 - DNA, 1575 bp, Zea mays
  Clone ID: LIB4606-009-H9_FLI
ccgggcctctcactcgcctcgacgcgcctctgaaagttcggagccgccggcccgtccgcctccctctccgcctcccgtccccaaggccaatagttttcaagtggcaatggcggaccaggctaaccaacccactgttcttcataagctcggtggccagttccacctgcgctcgatcatctctgaaggtgtacgggcccgtaacatatgcccatctgtctcatcttatgaaaggagatttgccacaaggaactacatgacccagagcctttggggcccttcaatgtctgttagcggtggcatcaatgtcccagtgatgcagaccccgctctgtgctaatgctcctgctgagaaaggaggcaagaacttcatgattgatttcatgatgggcggtgtttcagctgctgtttcaaagactgctgctgctcccatcgagcgtgtgaagctgcttattcagaaccaagatgagatgattaagtctggtaggctatcagagccgtacaagggtattgttgactgcttcaaacgtaccattaaggatgaaggtttctcttccttgtggaggggtaacactgctaatgttattcgttacttccctactcaggctttgaactttgcatttaaggactacttcaagaggttgttcaacttcaagaaggatagggatggctattggaagtggtttgctggcaacctggcctctggtggtgctgctggtgcttcctctttgttttttgtgtactccctggactacgcgagaacaaggttggctaatgacgcgaaggctgccaagggaggaggtgaaaggcagttcaatgggcttgtcgatgtctaccgcaagacactcaagtctgatggtattgctgggctttaccgtggatttaacatctcctgtgttggaatcattgtttatcgtggtctgtactttgggctctatgattccatcaagccagttgtccttactggcaacctccaggacaatttctttgccagtttcgctctgggttggctgatcactaatggtgctggtcttgcatcttaccccatcgataccgtccgcagaaggatgatgatgacatctggtgaggctgtcaagtacaagagctccttggacgcgttccagcagattcttaagaaggaagggcccaagtccctgttcaagggtgctggtgctaacattcttcgtgccattgctggtgctggtgtgctttctggctatgaccagctccagatcctcttcttcggaaagaagtacggctccggcggtgcttaaatggagaaatatgatgacgaacaagagcagtgtgtgttcccggtcctttccaatcaggatctggtgaagtttttgcctttcatatcgaagaaattaataattcatgtagagggaggattcttccaacaatttgttttggatggagacttagatctccaaacactcgtaactatcctactaggtggtgacatcggtccccaaaaacatttatggtcatagagtctgcccttcgtttgtcagtcgggcaacttttcttgcatacaatgccttcgtttaagtatcggatgagttgctgcgactaaaag

SEQ ID NO: 26826 - DNA, 1652 bp, Zea mays
  Clone ID: LIB4606-010-D7_FLI
tccccaactcgccgtcgtcttctgcggttctgccgtctacgcctccgatttggcctctctcccttgcaagtttaagcttcaccttcaaccatgggtaaggagaagtcccacatcaacattgtggtcattggccacgtcgactctggcaagtcgaccaccaccggccacctgatctacaagcttggaggcattgacaagcgtgtaatagagaggtttgagaaggaggctgctgagatgaacaagcggtccttcaagtatgcttgggtgctcgacaagctcaaggctgagcgtgagaggggtatcaccattgatattgctctgtggaagtttgagaccaccaagtattactgcaccgtcattgatgcccctggacaccgtgacttcatcaagaacatgatcactggtacctcccaggctgactgtgctgtccttatcattgactccaccactggtggttttgaggctggtatctccaaggatggccagacccgtgagcatgctctccttgcgttcactcttggagtgaagcagatgatttgctgccgcaacaagatggatgcaacgactcccaaatactccaaggcgcgttatgatgagattgtgaaggaagtctcatcctacctcaagaaagttgggtacaaccctgataagattgcctttgtccccatctctggttttgagggcgacaacatgattgagaggtccaccaaccttgactggtacaaaggcccgaccctgcttgaggctcttgaccagatcaccgagcccaagagaccttcggacaagcccctgcgtctccccctgcaggatgtgtacaagattggtggtattggaactgtaccggttggtcgtgtggagactggtgtcatcaagcctggtatggttgtcaccttcggtccaactggcctgactactgaggtgaagtctgttgagatgcaccacgaggctcttcaggaggcccttcctggtgacaatgttggcttcaacgtgaagaacgttgctgtgaaggatctcaagcgtggttttgtggcctcaaactccaaggatgaccctgccaaggaggctgccagcttcacgtcccaggtcatcatcatgaaccaccctggccagatcggtaacggctatgccccagtgctggactgccatacctcccatattgctgtcaagtttgctgagctgattaccaagatcgacaggcgttctggcaaggagcttgagaaggagcccaagttcttgaagaacggcgatgctggtatggtgaagatgattcccaccaagcccatggtggtggagacattctcgcagtatcctccccttggtaggtttgctgtccgcgacatgaggcagacagttgctgttggagtcatcaagagtgtggagaagaaggacccgaccggcgccaaggttaccaaggcagctgccaaaaagaaatgatgcaacctgtcgttaatcctgtatctgcttttgcaatacctgacttgtcactccatcccgaagttttgtatgcggttgttactgttattgtgtactgttaagctctgctgcggcgtgccctgttgtttgggtagcgtcaacgtcgagcgccacttgcgggtgtgcctttgtctgctatcagtagcggcaaaaattgaaagctctcgagacttatgtcc

SEQ ID NO: 26827 - DNA, 1571 bp, Zea mays
  Clone ID: LIB4606-011-E12_FLI
gccgggcctctcactcgcctcggcgcgcctctgaaagttcggagccgccggcccgtccgcctccctctccgcctcccgtccccaaggccaatagttttcaagtggcaatggcggaccaggctaaccaacccactgtccttcataagctcggtggccagttccacctgcgctcgatcatctctgaaggtgtacgggcccgtaacatatgcccatctgtctcatcttatgaaaggagatttgccacaaggaactacatgacccagagcctttggggcccttcaatgtctgttagcggtggcatcaatgtcccagtgatgcagaccccgctctgtgctaatgctcctgctgagaaaggaggcaagaacttcatgattgatttcatgatgggcggtgtttcagctgctgtttcaaagactgctgctgctcccatcgagcgtgtgaagctgcttattcagaaccaagatgagatgattaagtctggtaggctatcagagccgtacaagggtattgttgactgcttcaaacgtaccattaaggatgaaggtttctcttccttgtggaggggtaacactgctaatgttattcgttacttccctactcaggctttgaactttgcatttaaggactacttcaagaggttgttcaacttcaagaaggatagggatggctattggaagtggtttgctggcaacctggcctctggtggtgctgctggtgcttcctctttgttttttgtgtactccctggactacgcgagaacaaggttggctaatgacgcgaaggctgccaagggaggaggtgaaaggcagttcaatgggcttgtcgatgtctaccgcaagacactcaagtctgatggtattgctgggctttaccgtggatttaacatctcctgtgttggaatcattgtttatcgtggtctgtactttgggctctatgattccatcaagccagttgtccttactggcaacctccaggacaatttctttgccagtttcgctctgggttggctgatcactaatggtgctggtcttgcatcttaccccatcgataccgtccgcagaaggatgatgatgacatctggtgaggctgtcaagtacaagagctccttggacgcgttccagcagattcttaagaaggaagggcccaagtccctgttcaagggtgctggtgctaacattcttcgtgccattgctggtgctggtgtgctttctggctatgaccagctccagatcctcttcttcggaaagaagtacggctccggcggtgcttaaatggagaaatatgatgacgaacaagagcagtgtgtgttcccggtcctttccaatcaggatctggtgaagtttttgcctttcatatcgaagaaattaataattcatgtagagggaggattcttccaacaatttgttttggatggagacttagatctccaaacactcgtaactatcctactaggtggtgacatcggtccccaaaaacatttatggtcatagagtctgcccttcgtttgtcagtcgggcaatttttcttgcatacaatgccttcgtttaagtatcggatgagttgctgcgact

SEQ ID NO: 26828 - DNA, 1687 bp, Zea mays
  Clone ID: LIB4606-011-F8_FLI
ccgatcgcttcagctcggcgtcttcacaaacgccggcgcaaactctcgcccgagcccgacagatcttcaattccccattccgcccaccgatcgaccttcacgccagtctcggtctcttccgaaggcgtcgcgcgcggttgtttgagaggagaggaggaagatgagggagtgcatctccgtccacatcgggcaggccggcatccaagtcggcaacgcgtgctgggaactttactgcctcgagcacggcatccagcctgatggccaagtgcctggagataagaccgcgggacatcacgatgatgccttcagcaccttcttcagccagactggtgctgggaagcacgttccccgtgcaatcttcgttgatctagaacccactgtgatcgatgaggtgcgcactggcacgtaccgccagctcttccaccctgagcagctcatcagtggcaaggaggatgcagctaacaatttcgcccgtggccattacacaattggcaaggagattgttgatctgtgccttgaccgtatccgcaagcttgctgacaactgcaccggcctccagggcttcctggtcttcaatgccgttggtggtggcaccggctctggccttggttctctcctccttgagcgcctgtctgtggagtacggcaagaaatccaagctgggcttcactgtgtacccatctccccaggtgtcaacctctgttgtggagccttacaacagcgtgctctccactcactcactgctggagcacactgatgtctccatcctgctcgacaacgaggccatctatgacatctgcaggcgctccctcgacattgaggggcccaactactccaacttgaatcgccttgtgtctcaggtgatctcatcgctgactgcttctctgaggttcgatggtgccctcaatgtggatgtgaacgagttccagaccaacctggttccttacccgaggatccacttcatgctctcctcctacgcaccggtgatctcttctgcgaaggccttccacgagcagctgtctgtggcggagatcaccagcagcgcgttcgagccggcttccatgatggtcaagtgcgacccacggcacggcaagtacatggcttgctgcctgatgtaccgcggcgacgtggtgcccaaggacgtgaacgccgcggtggccaccatcaagacgaagcgcaccatccagttcgtggactggtgcccgacggggttcaagtgcggcatcaactaccaggcgccaactgtggtgccgggtgccgacctcgccaaggtgcagcgtgccgtgtgcatgatctccaactccaccagcgtcgtcgaggtgttctcccgcatcaacagcaagttcgacctcatgtacgccaagcgcgcgttcgtgcactggtacgtcggcgagggcatggaggagggggagttctccgaggcacgcgaggacctggccgccctggagaaggactacgaggaggtcgccgcagagggcggcagtgatgacggtgacgaggaggaggaatactgatctgcttgcatgaatctgtttggctgtcgagccaggttgtggtgttgaaaaacctttgtttgtgtcctggccccctgggtaatgtttgggtgtttccttccatcatcacttgctgaactgctctagtatttgcatttgtaattgaagtctgtcgctttaagcactcttggttcc

SEQ ID NO: 26829 - DNA, 1532 bp, Zea mays
  Clone ID: LIB4606-011-G11_FLI
ccgggccccctctcactcgcctcgacgcgcctctgaaagttcggagccgccggcccgtccgcctccctctccgcctcccgtccccaaggccaatagttttcaagtggcaatggcggaccaggctaaccaacccactgtccttcataagctcggtggccagttccacctgcgctcgatcatctctgaaggtgtacgggcccgtaacatatgcccatctgtctcatcttatgaaaggagatttgccacaaggaactacatgacccagagcctttggggcccttcaatgtctgttagcggtggcatcaatgtcccagtgatgcagaccccgctctgtgctaatgctcctgctgagaaaggaggcaagaacttcatgattgatttcatgatgggcggtgtttcagctgctgtttcaaagactgctgctgctcccatcgagcgtgtgaagctgcttattcagaaccaagatgagatgattaagtctggtaggctatcagagccgtacaagggtattgttgactgcttcaaacgtaccattaaggatgaaggtttctcttccttgtggaggggtaacactgctaatgttattcgttacttccctactcaggctttgaactttgcatttaaggactacttcaagaggttgttcaacttcaagaaggatagggatggctattggaagtggtttgctggcaacctggcctctggtggtgctgctggtgcttcctccttgttttttgtgtactccctggactacgcgagaacaaggttggctaatgacgcgaaggctgccaagggaggaggtgaaaggcagttcaatgggcttgtcgatgtctaccgcaagacactcaagtctgatggtattgctgggctttaccgtggatttaacatctcctgtgttggaatcattgtttatcgtggtctgtactttgggctctatgattccatcaagccagttgtccttactggcaacctccaggacaatttctttgccagtttcgctctgggttggctgatcactaatggtgctggtcttgcatcttaccccatcgataccgtccgcagaaggatgatgatgacatctggtgaggctgtcaagtacaagagctccttggacgcgttccagcagattcttaagaaggaagggcccaagtccctgttcaagggtgctggtgctaacattcttcgtgccattgctggtgctggtgtgctttctggctatgaccagctccagatcctcttcttcggaaagaagtacggctccggcggtgcttaaatggagaaatatgatgacgaacaagagcagtgtgtgttcccggtcctttccaatcaggatctggtgaagtttttgcctttcatatcgaagaaattaataattcatgtagagggaggattcttccaacaatttgttttggatggagacttagatctccaaacactcgtaactatcctactaggtggtgacatcggtccccaaaaacatttatggtcatagagtctgcccttcgtttgtcagtcgggcaatttttcttgcg

SEQ ID NO: 26830 - DNA, 1520 bp, Zea mays
  Clone ID: LIB4606-011-H5_FLI
tctcactcgcctcgacgcgcctctgaaagttcggagccgccggcccgtccgcctccctctccgcctcccgtccccaaggccaatagttttcaagtggcaatggcggaccaggctaaccaacccactgtccttcataagctcggtggccagttccacctgcgctcgatcatctctgaaggtgtacgggcccgtaacatatgcccatctgtctcatcttatgaaaggagatttgccacaaggaactacatgacccagagcctttggggcccttcaatgtctgttagcggtggcatcaatgtcccagtgatgcagaccccgctctgtgctaatgctcctgctgagaaaggaggcaagaacttcatgattgatttcatgatgggcggtgtttcagctgctgtttcaaagactgctgctgctcccatcgagcgtgtgaagctgcttattcagaaccaagatgagatgattaagtctggtaggctatcagagccgtacaagggtattgttgactgcttcaaacgtaccattaaggatgaaggtttctcttccttgtggaggggtaacactgctaatgttattcgttacttccctactcaggctttgaactttgcatttaaggactacttcaagaggttgttcaacttcaagaaggatagggatggctattggaagtggtttgctggcaacctggcctctggtggtgctgctggtgcttcctctttgttttttgtgtactccctggactacgcgagaacaaggttggctaatgacgcgaaggctgccaagggaggaggtgaaaggcagttcaatgggcttgtcgatgtctaccgcaagacactcaagtctgatggtattgctgggctttaccgtggatttaacatctcctgtgttggaatcattgtttatcgtggtctgtactttgggctctatgattccatcaagccagttgtccttactggcaacctccaggacaatttctttgccagtttcgctctgggttggctgatcactaatggtgctggtcttgcatcttaccccatcgataccgtccgcagaaggatgatgatgacatctggtgaggctgtcaagtacaagagctccttggacgcgttccagcagattcttaagaaggaagggcccaagtccctgttcaagggtgctggtgctaacattcttcgtgccattgctggtgctggtgtgcttctggctatgaccagctccagatcctcttcttcggaaagaagtacggctccggcggtgcttaaatggagaaatatgatgacgaacaagagcagtgtgtgttcccggtcctttccaatcaggatctggtgaagtttttgcctttcatatcgaagaaattaataattcatgtagagggaggattcttccaacaatttgttttggatggagactttgatctccaaacactcgtaactatcctactaggtggtgacatcggtccccaaaaacatttatggtcatagagtctgcccttcgtttgtcagtcgggcaatttttcttgc

SEQ ID NO: 26831 - DNA, 1673 bp, Zea mays
  Clone ID: LIB4606-012-D8_FLI
cggggcttcagctcggcgtcttcacaaacgccggcgcaaactctcgcccgagcccgacagatcttcaattccccattccgcccaccgatcgaccttcacgccagtctcggtctcttccgaaggcgtcgcgcgcggttgtttgagaggagaggaggaagatgagggagtgcatctccgtccacatcgggcaggccggcatccaagtcggcaacgcgtgctgggaactttactgcctcgagcacggcatccagcctgatggccaagtgcctggagataagaccgcgggacatcacgatgatgccttcagcaccttcttcagccagactggtgctgggaagcacgttccccgtgcaatcttcgttgatctagaacccactgtgatcgatgaggtgcgcactggcacgtaccaccagctcttccaccctgagcagctcatcagtggcaaggaggatgcagctaacaatttcgcccgtggccattacacaattggcaaggagattgttgatctgtgccttgaccatatccgcaagcttgctgacaactgcaccggcctccagggcttcctggtcttcaatgccgttggcggtggcaccggctctggccttggttctctcctccttgagcgcctgtctgtggagtacggcaagaaatccaagctgggcttcactgtgtacccatctccccaggtgtcaacctctgttgtggagccttacaacagcgtgctctccactcactcactgctggagcacactgatgtctccatcctgctcgacaacgaggccatctatgacatctgcaggcgctccctcgacattgagaggcccaactactccaacttgaatcgccttgtgtctcaggtgatctcatcgctgactgcttctctgaggttcgatggtgccctcaatgtggatgtgaacgagttccagaccaacctggttccttacccgaggatccacttcatgctctcctcctacgcaccggtgatctcttctgcgaaggccttccacgagcagctgtccgtggcggagatcaccagcagcgcgttcgagccggcttccatgatggtcaagtgcgacccacggcacggcaagtacatggcttgctgcctgatgtaccgcggcgacgtggtgcccaaggacgtgaacgccgcggtggccaccatcaagacgaagcgcaccatccagttcgtggactggtgcccgacggggttcaagtgcggcatcaactaccaggcgccaactgtggtgccgggtgccgacctcgccaaggtgcagcgtgccgtgtgcatgatctccaactccaccagcgtcgtcgaggtgttctcccgcatcaacagcaagttcgacctcatgtacgccaagcgcgcgttcgtgcactggtacgtcggcgagggcatggaggagggggagttctccgaggcacgcgaggacctggccgccctggagaaggactacgaggaggtcgccgcagagggcggcagtgatgacggtgacgaggaggaggaatactgatctgcttgcatgaatctgtttggctgtcgagccaggttgtggtgttgaaaaacctttgtttgtgtcctggccccctgggtaatgtttgggtgtttccttccatcatcacttgctgaactgctctagtatttgcatttgtaattgaagtctgtcgctttaagc

SEQ ID NO: 26832 - DNA, 2346 bp, Zea mays
  Clone ID: LIB4606-012-F3_FLI
gtcctgatgccccgtttcaatttttgaactcccgatctggcaatccccacccacgctcccgagcaactttctactcactccggcgtcgcttcgaatcccagcgcggcggcgtgacgcgtgaatgcgtgatcgacgcgcggcgctgctcctccgggaaaccgcatggacgccgccgaccctctctgcgccatcacctcgcctgcgcggctccttccgcggacccttggccccaccccctcgaaggtccgcggtgcgctcctcgaggccatcgcactcgcccggtcgcggaaagggtctgaggagctggttaagcaggctgcaatggtgctgaaggagcacggggacatccagactctctaccatgatgatgcaatgaaagccatgccccccacaaatgtcagcaaagggcaacagggaagaagggcagcactggatcgcaaacgggctcggttcactatgaaggacactggaagcaaagcggtgcctgttgtggatcgatctaagttattgaatatttcggatccagtcgcattcttcatggccttggatcggcttgaagaagctgaggatgagatcaaacggctaaatggagaggcagaaaagcgcatattgatttttgatcctttagacgaacccattagacagcctggtttgcgtgggagaaaatcattccgcagtttcaaagtaactgaggatgctactactcaagatcccattgaggtactggcttcccaaacagcaactatgacaggatctcagttctcacaggatgttatgcatgctgttgctgacaaaaatgaacagtctgttccttcacgatctggtgaagctatttcagatgtttcaggaaaagaagattcattagctgagaaggatggccgtgatgatttggcttatttactgacctcgatccaagatttggatgaatctgaagaggaagcatttatccggaagaccttagggcttaaagaaataaggaagggaagagttagtctctgtaactccattcctggagtcaggtccttaagaagcgatactgaacaaaaaggttcaatgaaggttcgccctccagaaagtcatttgcctcagactcgccaagatcgaatttcagagttggagaaacatttatttcctggaggtgcagcaaatgctaaatgcacagatgatgaatctgaagggtcaccagatattgtgatgggtgaaccatcattagtgcatgattcttccgaggttctgatgaccaatgagaactctactggaagtgaaattgacaggaggaccccaaatctgtgtgccagagcagcagaccacgctcttgatcctgaaccaaacttgcctgatcatgcatacgaaaggcaaaccagaggctcctcacttggtttgtgcaaaaacacagaagttgccaatgaacacgaggaagatgatgtacacatagaatatccaactactggcgggtctacttatcaaacagaagtttcttctcatgatttggagggcagcttgacagaagaattggtcagtgaaccaggtaggcatgcggctccagatgatatctataggacttcacatgcagctgaggatagcattcaacatctagaagtggtcaaacagggtggtgttctacaagacaagtcaagccagtcgttggagatgcctctggaagatattgatccactatatcggcctcagatgcatggtggaagcactaagaaatcgacacctgttctgtgcaatgcactgtccccgatcgaacagaagcaacaagcagctcaagaagggaaaaggaagcaacaggcaaagagggtaaaaaaagtgtctgatgaatctagccatgcactggaaatatcccaagcaaatttcgaaccggagaatgaacctcataatgttgacgtgaacatggagcaaccgacagttatgagtagcgccaaggggcaaaagggagctcaaaggagaaacaagaccaaaaaattgaatcaaagaaaaatccttggagatgttgaccttgcgcggcagtctggagtgagaagaagctcaagaatacgctcgaggcctttggagtattggcttggtgaaagattactatatgggccgatacaggacactttgcctgcagttattggcatcaaagcatactctcctggccaggatggcaagaaaacattgaaagtgaaatctttcgtgtctgaacagtattcagatcttgtcgctcaatttgcgaagtactaaacaagacaccatttttctaagaggatcacgccttgtgacttgttgctttgtcacctgactttatgatgttacatgtgttggtggaaccatagtactgcacaatgaaaaggcacacgtcct

SEQ ID NO: 26833 - DNA, 5152 bp, Homo sapiens
  Clone ID: LIB4649-005-B4_FLI
gtcattcatgtatttattcatcattcatgtatttatcattcatatattcatcagcacacaattgtggggcacctcctcaattctgggcctgcacaagataaaagggaagggatctctgtcccaaaggcaggccaagggtgtgcgcccagtggaccaacagtcagtgctgaatgaatgtcatttcagtgagggggtgttgtggagctggtggagccctgaggcagtctccatcgctgtggaccagtaaggaacctcatccctctacccagcctgtgaggtcatcctccttcctcagcccacctccctcaggagacactcaggcttggcttcatgcacgtgtggctgcgcactcacctggatgccaggaaaatgctcctgggccagtggctaccagcaccaaagcagggctggaaacgtgtgcacctaccccacgacctcatagctttgccgcctcatcccacatcaggtggagtgggagggggcactcagacccaccaaccaagctcagtcttgaggggtggtctgggctagagaagacttcccagctccaagaagcagcccagatgggccaagacagggggtgggaggggctgccctgcattctgatgctgcttctttccaggacctgggagtggaggaggacaagaaggaggtgaggacagtgatgccgggcagcaggccaggtgttcaaaggcacaatctggttctgatgttctctttcagcaaacacagtgcctggagcttgggaggaaagttcccaacagcgtctccccctccactgctttctttaataacaaagacttgtccctgccaagcaataactttctcgccttgtctcctacagggaaaccaatgaaaagcgtgctggtggtggctctccttgtcattttccaggtgaggttctctgccaaggaaagctctgttcccttctccacacggcctcccaagtcaggggtttagtggaggagctgggcatttgctagaagatacaagacccagacataagcccgcctgccactcattaagctaatggctgccccctcaccatctgctgagtgaccctggagagccacagatgttctctggacttcctttactccatttaggttaaaacatgggggaaaataacttaccaccttccctatcccacctccaatctccctgcccaggagacagaaatatggactctgagttcttagagagagaagagctgcaaaaagcaaaaaatgttactgggttttgtgcacgtgtgctgagaaaatcaccctggatctggcgatcttgttactatcctatcgccccaaagttgtctctttccaaccttcacccaaaggcttccctcgcagcccccgttttctttggtgaaatagagacccatccggcctccctggcaggggagggaagagaggatggggccctagggatggggagaggggtggatgagcacacactttatagcaggcctgaactcggcaggaacaaagaccctcactttacaaagttctgtttctccatccagaaacagacagaaagtgtgcctcaccaagtgccaaagttagaagaaactgtaactcgcagagtcaactttctcccatttgttagaggtgggagctcagagtaggggtaggggagtccaactgaggccagagctagagaggcagtgcttcagaattcggctcatccccaggtctggaggccagaggggcagctttccagaagctcaggccagaggcaggccccaagctgggcactgttcccaaaaccccatcccagaggccccccggagcctgggctgcagcccatagcctggcccccttccccatcaccactccctcctctctctcccctgtctccaggactctggggggctgtattgctggcagtggaggctggaagggtgggaaggggaggaggacagctgaggctcattcttccctttcacttggggagggggtgctcagatagggcaggatgtggtggggctgtgggctgcagaggcagtgaggctaggggagggagaattataaaacaggaacaaggttcaaggggagaagggaaggcaggactggatgatgcagagtgcacttcatagaggccgggagtactgccctccaggaaggctgagaccccctcatgtccagggaccccgggtctaaggccttgggccgtaaccatggctgggccaaaggcagcagcctccttcagggctcccaggctgcagccatgcccaggaaagggaagaggggttgccactgacttttcgtctcaggctagcaatggccaaagaaaaggctcctggacatcattttgtcctcaccatgttcccaagcaggacagtgatgaatccagaacttgggtgtgaaaaagagatagagacaagatgcggtgaatccctccagcataaatggatagaaacccaccgtcgctgagctgctgaatctggttcctggtgatagaaccatgagcctcgtgaggcaggtcctccagcccagctccctgccctgcacaaacccgtccatcgctgtgcgcagaggcaggggcaggcatggaccccctccttcattgataaaatcacagcaggctgctgaaccttcacccgaccctgcagacggctaaaaaaagctccagcagctgagtcctgctgattgggatctgccggaagagatgcgaggaagagagaggcagagaggtggggggagagggcgggagcacagagggagagtgggagatgagagctgcgcttccttccagggacacagctgctgaggagtcctcgcccccacccccatggcccatcatccattcacggagtttatggcacttgggctcacgttgcctgagctcctgctgggtgctaagaggggacccaggatctagagtctctccaggtcacccaccacccatgatcacagcagtttgccccaaacccaaggcttcatggcctcaaaatgggagcatttgccttcctctcttcttactccaggccctcctcaaccttgacccccaggtggattttccccctaaagctgaggtcttttgtaagccccctggaaaactccaccaagttctaaaggagggtcaagaagaaagacacatgttccctctctcacggagcttccagggggcaaaattaaagctccatggagaggaaatggtgctggagcctgggctaggtacctcacagcaaccatgggaagcaaataggattcatctccatttcacagaagagaaaactgaggctctgagagagagagagagagacagaaagagtttaaccagctcaaggctcatctggccccagagcccagctgatttccagtcccctgtcagcacatgtagagtctctcagacttggcaaaatcagccacttgctacttactagcagaactgtagaatctcaggccccaccttagcctactgattcaggatagacatgttcacaggattaatcaggtgatgcgtattggagttaaaatttgagaagcactgatttaaaaccaaagaatcacctggagactttaggaaaacacagattcccagacccatcacttgagattctggttcagaattctcaggtggggcctgagaacctgcattcctaacaagttcccaggtgatgctatgatactgatgatgcggacctcacgatgaaaccactattcctcccgcctgggcaacatggcagaatcccatctctactaaaaatacaaaaattcgctgggtgtggtggcataaggctgtggtcccagctactcaggaggccgaagtggaaggatcacccgagcccggagaggccgaggctgcagggagccatgattgcaccactgcactccagcctgggcaacagagcgagaccatgtctcaagaaaaaaaaaaaagaaagaaaccactgctctaggctaaatcccagccagagttggagccacccagctaaactggcctgttttccctcatttccttccccgaaggtatgcctgtgtcaagatgaggtcacggacgattacatcggagacaacaccacagtggactacactttgttcgagtctttgtgctccaagaaggacgtgcggaactttaaagcctggttcctccctatcatgtactccatcatttgtttcgtgggcctactgggcaatgggctggtcgtgttgacctatatctatttcaagaggctcaagaccatgaccgatacctacctgctcaacctggcggtggcagacatcctcttcctcctgacccttcccttctgggcctacagcgcggccaagtcctgggtcttcggtgtccacttttgcaagctcatctttgccatctacaagatgagcttcttcagtggcatgctcctacttctttgcatcagcattgaccgctacgtggccatcgtccaggctgtctcagctcaccgccaccgtgcccgcgtccttctcatcagcaagctgtcctgtgtgggcatctggatactagccacagtgctctccatcccagagctcctgtacagtgacctccagaggagcagcagtgagcaagcgatgcgatgctctctcatcacagagcatgtggaggcctttatcaccatccaggtggcccagatggtgatcggctttctggtccccctgctggccatgagcttctgttaccttgtcatcatccgcaccctgctccaggcacgcaactttgagcgcaacaaggccatcaaggtgatcatcgctgtggtcgtggtcttcatagtcttccagctgccctacaatggggtggtcctggcccagacggtggccaacttcaacatcaccagtagcacctgtgagctcagtaagcaactcaacatcgcctacgacgtcacctacagcctggcctgcgtccgctgctgcgtcaaccctttcttgtacgccttcatcggcgtcaagttccgcaacgatctcttcaagctcttcaaggacctgggctgcctcagccaggagcagctccggcagtggtcttcctgtcggcacatccggcgctcctccatgagtgtggaggccgagaccaccaccaccttctccccataggcgactcttctgcctggactagagggacctctcccagggtccctggggtggggatagggagcagatgcaatgactcaggacatccccccgccaaaagctgctcaggg

SEQ ID NO: 26834 - DNA, 4793 bp, Homo sapiens
  Clone ID: LIB4649-008-H7_FLI
gcaaagcacctgtgagcttgcggaagtcagttcagactccagcccgctccagcccggcccgacccgaccgcacccggcgcctgccctcgctcggcgtccccggccagccatgggcccttggagccgcagcctctcggcgctgctgctgctgctgcaggtctcctcttggctctgccaggagccggagccctgccaccctggctttgacgccgagagctacacgttcacggtgccccggcgccacctggagagaggccgcgtcctgggcagagtgaattttgaagattgcaccggtcgacaaaggacagcctatttttccctcgacacccgattcaaagtgggcacagatggtgtgattacagtcaaaaggcctctacggtttcataacccacagatccatttcttggtctacgcctgggactccacctacagaaagttttccaccaaagtcacgctgaatacagtggggcaccaccaccgccccccgccccatcaggcctccgtttctggaatccaagcagaattgctcacatttcccaactcctctcctggcctcagaagacagaagagagactgggttattcctcccatcagctgcccagaaaatgaaaaaggcccatttcctaaaaacctggttcagatcaaatccaacaaagacaaagaaggcaaggttttctacagcatcactggccaaggagctgacacaccccctgttggtgtctttattattgaaagagaaacaggatggctgaaggtgacagagcctctggatagagaacgcattgccacatacactctcttctctcacgctgtgtcatccaacgggaatgcagttgaggatccaatggagattttgatcacggtaaccgatcagaatgacaacaagcccgaattcacccaggaggtctttaaggggtctgtcatggaaggtgctcttccaggaacctctgtgatggaggtcacagccacagacgcggacgatgatgtgaacacctacaatgccgccatcgcttacaccatcctcagccaagatcctgagctccctgacaaaaatatgttcaccattaacaggaacacaggagtcatcagtgtggtcaccactgggctggaccgagagagtttccctacgtataccctggtggttcaagctgctgaccttcaaggtgaggggttaagcacaacagcaacagctgtgatcacagtcactgacaccaacgataatcctccgatcttcaatcccaccacgtacaagggtcaggtgcctgagaacgaggctaacgtcgtaatcaccacactgaaagtgactgatgctgatgcccccaataccccagcgtgggaggctgtatacaccatattgaatgatgatggtggacaatttgtcgtcaccacaaatccagtgaacaacgatggcattttgaaaacagcaaagggcttggattttgaggccaagcagcagtacattctacacgtagcagtgacgaatgtggtaccttttgaggtctctctcaccacctccacagccaccgtcaccgtggatgtgctggatgtgaatgaagcccccatctttgtgcctcctgaaaagagagtggaagtgtccgaggactttggcgtgggccaggaaatcacatcctacactgcccaggagccagacacatttatggaacagaaaataacatatcggatttggagagacactgccaactggctggagattaatccggacactggtgccatttccactcgggctgagctggacagggaggattttgagcacgtgaagaacagcacgtacacagccctaatcatagctacagacaatggttctccagttgctactggaacagggacacttctgctgatcctgtctgatgtgaatgacaacgcccccataccagaacctcgaactatattcttctgtgagaggaatccaaagcctcaggtcataaacatcattgatgcagaccttcctcccaatacatctcccttcacagcagaactaacacacggggcgagtgccaactggaccattcagtacaacgacccaacccaagaatctatcattttgaagccaaagatggccttagaggtgggtgactacaaaatcaatctcaagctcatggataaccagaataaagaccaagtgaccaccttagaggtcagcgtgtgtgactgtgaaggggccgccggcgtctgtaggaaggcacagcctgtcgaagcaggattgcaaattcctgccattctggggattcttggaggaattcttgctttgctaattctgattctgctgctcttgctgtttcttcggaggagagcggtggtcaaagagcccttactgcccccagaggatgacacccgggacaacgtttattactatgatgaagaaggaggcggagaagaggaccaggactttgacttgagccagctgcacaggggcctggacgctcggcctgaagtgactcgtaacgacgttgcaccaaccctcatgagtgtcccccggtatcttccccgccctgccaatcccgatgaaattggaaattttattgatgaaaatctgaaagcggctgatactgaccccacagccccgccttatgattctctgctcgtgtttgactatgaaggaagcggttccgaagctgctagtctgagctccctgaactcctcagagtcagacaaagaccaggactaggactacttgaacgaatggggcaatcgcttcaagaagctggctgacatgtacggaggcggcgaggacgactaggggactcgagagaggcgggccccagacccatgtgctgggaaatgcagaaatcacgttgctggtggtttttcagctcccttcccttgagatgagtttctggggaaaaaaaagagactggttagtgatgcagttagtatagctttatactctctccactttatagctctaataagtttgtgttagaaaagtttcgacttatttcttaaagcttttttttttttcccatcactctttacatggtggtgatgtccaaaagatacccaaattttaatattccagaagaacaactttagcatcagaaggttcacccagcaccttgcagattttcttaaggaattttgtctcacttttaaaaagaaggggagaagtcagctactctagttctgttgttttgtgtatataattttttaaaaaaaatttgtgtgcttctgctcattactacactggtgtgtccctctgccttttttttttttttaagacagggtctcattctatcggccaggctggagtgcagtggtgcaatcacagctcactgcagccttgtcctcccaggctcaagctatccttgcacctcagcctcccaagtagctgggaccacaggcatgcaccactacgcatgactaattttttaaatatttgagacggggtctccctgtgttacccaggctggtctcaaactcctgggctcaagtgatcctcccatcttggcctcccagagtattgggattacagacatgagccactgcacctgcccagctccccaactccctgccattttttaagagacagtttcgctccatcgcccaggcctgggatgcagtgatgtgatcatagctcactgtaacctcaaactctggggctcaagcagttctcccaccagcctcctttttatttttttgtacagatggggtcttgctatgttgcccaagctggtcttaaactcctggcctcaagcaatccttctgccttggccccccaaagtgctgggattgtgggcatgagctgctgtgcccagcctccatgttttaatatcaactctcactcctgaattcagttgctttgcccaagataggagttctctgatgcagaaattattgggctcttttagggtaagaagtttgtgtctttgtctggccacatcttgactaggtattgtctactctgaagacctttaatggcttccctctttcatctcctgagtatgtaacttgcaatgggcagctatccagtgacttgttctgagtaagtgtgttcattaatgtttatttagctctgaagcaagagtgatatactccaggacttagaatagtgcctaaagtgctgcagccaaagacagagcggaactatgaaaagtgggcttggagatggcaggagagcttgtcattgagcctggcaatttagcaaactgatgctgaggatgattgaggtgggtctacctcatctctgaaaattctggaaggaatggaggagtctcaacatgtgtttctgacacaagatccgtggtttgtactcaaagcccagaatccccaagtgcctgcttttgatgatgtctacagaaaatgctggctgagctgaacacatttgcccaattccaggtgtgcacagaaaaccgagaatattcaaaattccaaatttttttcttaggagcaagaagaaaatgtggccctaaagggggttagttgaggggtagggggtagtgaggatcttgatttggatctctttttatttaaatgtgaatttcaacttttgacaatcaaagaaaagacttttgttgaaatagctttactgtttctcaagtgttttggagaaaaaaatcaaccctgcaatcactttttggaattgtcttgatttttcggcagttcaagctatatcgaatatagttctgtgtagagaatgtcactgtagttttgagtgtatacatgtgtgggtgctgataattgtgtattttctttgggggtggaaaaggaaaacaattcaagctgagaaaagtattctcaaagatgcatttttataaattttattaaacaattttgtt

SEQ ID NO: 26835 - DNA, 2441 bp, Homo sapiens
  Clone ID: LIB4649-035-D9_FLI
gatcgaaaagattcttaggaacgccgtaccagccgcgtctctcaggacagcaggcccctgtccttctgtcgggcgccgctcagccgtgccctccgcccctcaggttctttttctaattccaaataaacttgcaagaggactatgaaagattatgatgaacttctcaaatattatgaattacatgaaactattgggacaggtggctttgcaaaggtcaaacttgcctgccatatccttactggagagatggtagctataaaaatcatggataaaaacacactagggagtgatttgccccggatcaaaacggagattgaggccttgaagaacctgagacatcagcatatatgtcaactctaccatgtgctagagacagccaacaaaatattcatggttcttgagtactgccctggaggagagctgtttgactatataatttcccaggatcgcctgtcagaagaggagacccgggttgtcttccgtcagatagtatctgctgttgcttatgtgcacagccagggctatgctcacagggacctcaagccagaaaatttgctgtttgatgaatatcataaattaaagctgattgactttggtctctgtgcaaaacccaagggtaacaaggattaccatctacagacatgctgtgggagtctggcttatgcagcacctgagttaatacaaggcaaatcatatcttggatcagaggcagatgtttggagcatgggcatactgttatatgttcttatgtgtggatttctaccatttgatgatgataatgtaatggctttatacaagaagattatgagaggaaaatatgatgttcccaagtggctctctcccagtagcattctgcttcttcaacaaatgctgcaggtggacccaaagaaacggatttctatgaaaaatctattgaaccatccctggatcatgcaagattacaactatcctgttgagtggcaaagcaagaatccttttattcacctcgatgatgattgcgtaacagaactttctgtacatcacagaaacaacaggcaaacaatggaggatttaatttcactgtggcagtatgatcacctcacggctacctatcttctgcttctagccaagaaggctcggggaaaaccagttcgtttaaggctttcttctttctcctgtggacaagccagtgctaccccattcacagacatcaagtcaaataattggagtctggaagatgtgaccgcaagtgataaaaattatgtggcgggattaatagactatgattggtgtgaagatgatttatcaacaggtgctgctactccccgaacatcacagtttaccaagtactggacagaatcaaatggggtggaatctaaatcattaactccagccttatgcagaacacctgcaaataaattaaagaacaaagaaaatgtatatactcctaagtctgctgtaaagaatgaagagtactttatgtttcctgagccaaagactccagttaataagaaccagcataagagagaaatactcactacgccaaatcgttacactacaccctcaaaagctagaaaccagtgcctgaaagaaactccaattaaaataccagtaaattcaacaggaacagacaagttaatgacaggtgtcattagccctgagaggcggtgccgctcagtggaattggatctcaaccaagcacatatggaggagactccaaaaagaaagggagccaaagtgtttgggagccttgaaagggggttggataaggttatcactgtgctcaccaggagcaaaaggaagggttctgccagagacgggcccagaagactaaagcttcactataatgtgactacaactagattagtgaatccagatcaactgttgaatgaaataatgtctattcttccaaagaagcatgttgactttgtacaaaagggttatacactgaagtgtcaaacacagtcagattttgggaaagtgacaatgcaatttgaattagaagtgtgccagcttcaaaaacccgatgtggtgggtatcaggaggcagcggcttaagggcgatgcctgggtttacaaaagattagtggaagacatcctatctagctgcaaggtataattgatggattcttccatcctgccggatgagtgtgggtgtgatacagcctacataaagactgttatgatcgctttgattttaaagttcattggaactaccaacttgtttctaaagagctatcttaagaccaatatctctttgtttttaaacaaaagatattattttgtgtatgaatctaaatcaagcccatctgtcattatgttactgtcttttttaatcatgtggttttgtatattaataattgttgactttcttagattcacttccatatgtgaatgtaagctcttaactatgtctctttgtaatgtgtaatttctttctgaaataaaaccatttgtgaatat

SEQ ID NO: 26836 - DNA, 2880 bp, Homo sapiens
  Clone ID: LIB4649-040-A1_FLI
agaaaatgtgtcggatattttggggcggtcacgtgggcgggcgggctccgagaggccccgggacagtcccagcctagagccgtgcccccccaggagccccccagtacggcgagccccggacattgcgacgctccatccaagagactgcccgacgccgggacctcggggctccgccgcctcccttccccctcccactccagcagctacggcccagttccctcaacctgacccagtatgtagaagccagtctctgcaggcggccagcgggacttttggaggcccagtgggcaggccaggcagggcgggtacggagcctcccaggctggggcagtgggcatgggcaggggctgtggctgaagacctcgcccgcccactgcagaccccaggggactctcacaccgcagctgccatggccaccaataaggagcgactctttgcggctggtgccctggggcctggatctggctacccaggggcaggtttccccttcgccttcccaggggcactcagggggtctccgcctttcgagatgctgagccctagcttccggggcctgggccagcctgacctccccaaggagatggcctctctgtcggtggagacacagagcaccagctcagaggagatggtgcccagctcgccctcgccccctccgcctcctcgggtctacaagccatgcttcgtgtgcaatgacaagtcctctggctaccactatggggtcagctcttgtgaaggctgcaagggcttctttcgccgaagcatccagaagaacatggtgtacacgtgtcaccgcgacaaaaactgtatcatcaacaaggtgaccaggaatcgctgccagtactgccggctacagaagtgcttcgaagtgggcatgtccaaggaagctgtgcgaaatgaccggaacaagaagaagaaagaggtgaaggaagaagggtcacctgacagctatgagctgagccctcagttagaagagctcatcaccaaggtcagcaaagcccatcaggagactttcccctcgctctgccagctgggcaagtataccacgaactccagtgcagaccaccgcgtgcagctggatctggggctgtgggacaagttcagtgagctggctaccaagtgcatcatcaagatcgtggagtttgccaagcggttgcctggctttacagggctcagcattgctgaccagatcactctgctcaaagctgcctgcctagatatcctgatgctgcgtatctgcacaaggtacaccccagagcaggacaccatgaccttctccgacgggctgaccctgaaccggacccagatgcacaatgccggcttcgggcccctcacagaccttgtctttgcctttgctgggcagctcctgcccctggagatggatgacaccgagacagggctgctcagcgccatctgcctcatctgcggagaccgcatggacctggaggagcccgaaaaagtggacaagctgcaggagccactgctggaagccctgaggctgtacgcccggcgccggcggcccagccagccctacatgttcccaaggatgctaatgaaaatcaccgacctccggggcatcagcactaagggagctgaaagggccattactctgaagatggagattccaggcccgatgcctcccttaatccgagagatgctggagaaccctgaaatgtttgaggatgactcctcgcagcctggtccccaccccaatgcctctagcgaggatgaggttcctgggggccagggcaaagggggcctgaagtccccagcctgaccagggcccctgacctccccgctgtgggggttggggcttcaggcagcagactgaccatctcccagaccgccagtgactgggggaggacctgctctgccctctccccaccccttccgatgagctccttgtttttgccaaagtttctaggggtgcctctgtgttcatccccttcctgatctaaccggctccctcgccagtcccgggggcctgccctgctcccaccaggagagagggcaaagggatgagcctgggtttggactctaaaatctcagcactgccccatgggtcctagacttcccagggcaagaggaagaccctgccattccacagccccttcctctgccaggtgcttggctctctgagagcaaacaggaacactagagaccaaaaaggggacaaaggagaagggctgagcccaccttcttgctcctacccttggtgcctaatgctgtgtgatgcacctgcagggtgtgtgctagcctctgtgccccgtccttgtgccaggtcaaggtgggggcaggctgggccctgcatttctggggcaggaacagagggtgaaagggacagatagatgcaggtccattctgcacctcttggctcgggtgcagagttcaccctgtgccctccgttataagtccctcccccagccctgtcatgtgccttgggctcctcctgccctccatctcagccattggggcagggaccctcctacactacagaggggccaggggatccctctctccctagtgccttccaccctttactccccagagcagcttggcccagggaggggggatgctgcttagctgatcccgccctgacccagaggaagcctctatttatttattagcttttgtttacaccgtggaattgaccccttcctccaggggtcttgggtgggggagcccagggcccctgtgacccctcctttcttcctccaatccccagtttgtatttagctgccaaataagattcccattggctccctgtgttctcttggggggtcagggtgctgtcccctcccctctgtttacatctcccctctaccccgctgtatcgcatattgctgagttttctatttttgcaaaataaagtgatggaaactc

SEQ ID NO: 26837 - DNA, 3775 bp, Homo sapiens
  Clone ID: LIB4649-040-B3_FLI
gcaatatcgaaggcgtctacgagaagaattctctttcattccttctgcagcacttgatttattggaccacatgctgacactagatcctagtaagcggtgcacagctgaacagaccctacagagcgacttccttaaagatgtcgaactcagcaaaatggctcctccagacctcccccactggcaggattgccatgagttgtggagtaagaaacggcgacgtcagcgacaaagtggtgttgtagtcgaagagccacctccatccaaaacttctcgaaaagaaactacctcagggacaagtactgagcctgtgaagaacagcagcccagcaccacctcagcctgctcctggcaaggtggagtctggggctggggatgcaataggccttgctgacatcacacaacagctgaatcaaagtgaattggcagtgttattaaacctgctgcagagccaaaccgacctgagcatccctcaaatggcacagctgcttaacatccactccaacccagagatgcagcagcagctggaagccctgaaccaatccatcagtgccctgacggaagctacttcccagcagcaggactcagagaccatggccccagaggagtctttgaaggaagcaccctctgccccagtgatcctgccttcagcagaacagacgacccttgaagcttcaagcacaccagctgacatgcagaatatattggcagttctcttgagtcagctgatgaaaacccaagagccagcaggcagtctggaggaaaacaacagtgacaagaacagtgggccacaggggccccgaagaactcccacaatgccacaggaggaggcagcagcatgtcctcctcacattcttccaccagagaagaggccccctgagccccccggacctccaccgccgccacctccaccccctctggttgaaggcgatctttccagcgccccccaggagttgaacccagccgtgacagccgccttgctgcaacttttatcccagcctgaagcagagcctcctggccacctgccacatgagcaccaggccttgagaccaatggagtactccacccgaccccgtccaaacaggacttatggaaacactgatgggcctgaaacagggttcagtgccattgacactgatgaacgaaactctggtccagccttgacagaatccttggtccagaccctggtgaagaacaggaccttctcaggctctctgagccaccttggggagtccagcagttaccagggcacagggtcagtgcagtttccaggggaccaggacctccgttttgccagggtccccttagcgttacacccggtggtcgggcaaccattcctgaaggctgagggaagcagcaattctgtggtacatgcagagaccaaattgcaaaactatggggagctggggccaggaaccactggggccagcagctcaggagcaggccttcactgggggggcccaactcagtcttctgcttatggaaaactctatcgggggcctacaagagtcccaccaagagggggaagagggagaggagttccttactaacccagagacttcagtgtcctgaaagattcctttcctatccatccttccatccagttctctgaatctttaatgaaatcatttgccagagcgaggtaatcatctgcatttggctactgcaaagctgtccgttgtattccttgctcacttgctactagcaggcgacttacgaaataatgatgttggcaccagttccccctggatgggctatagccagaacatttacttcaactctaccttagtagatacaagtagagaatatggagaggatcattacattgaaaagtaaatgttttattagttcattgcctgcacttactgatcggaagagagaaagaacagtttcagtattgagatggctcaggagaggctctttgatttttaaagttttggggtggggggttgtgtgtggtttctttcttttgaattttaatttaggtgttttgggtttttttcctttaaagagaatagtgttcacaaaatttgagctgctctttggcttttgctataagggaaacagagtggcctggctgatttgaataaatgtttctttcctctccaccatctcacattttgcttttaagtgaacactttttccccattgagcatcttgaacatactttttttccaaataaattactcatccttaaagtttactccactttgacaaaagatacgcccttctccctgcacataaagcaggttgtagaacgtggcattcttgggcaagtaggtagactttacccagtctctttccttttttgctgatgtgtgctctctctctctctttctctctctctctctctctctctctctctctgtctgtctcgcttgctcgctctcgctgtttctctctctttgaggcatttgtttggaaaaaatcgttgagatgcccaagaacctgggataattctttactttttttgaaataaaggaaaggaaattcagactcttacattgttctctgtaactcttcaattctaaaatgttttgttttttaaaccatgttctgatggggaagttgatttgtaagtgtggacagcttggacattgctgctgagctgtggttagagatgatgcctccattcctagagggctaataacagcatttagcatattgtttacacatatatttttatgtcaaaaaaaaaacaaaaacctttcaaacagagcattgtgatattgtcaaagagaaaaacaaatcctgaagatacatggaaatgtaacctagtttagggtgggtatttttctgaagatacatcaatacctgaccttttttaaaaaaataattttaaaacagcatactgtgaggaagaacagtattgacatacccacatcccagcatgtgtaccctgccagttcttttagggatttttcctccaaagagatttggatttggttttggtaaaaggggttaaattgtgcttccaggcaagaactttgccttatcataaacaggaaatgaaaaagggaagggctgtcaggatgggataatttgggaggcttctcattctggcttctatttctatgtgagtaccagcatatagagtgttttaaaaacagatacatgtcatataatttatctgcacagacttagaccttcaggaaacataggttaagcccccttttacaaagaaaaagtaaacatacttcagcatcttggagggtagttttcaaaactcaagtttcatgtttcaatgccaagttcttattttaaaaaataaaatctacttataagagaaaggtgcattacttaaaaaaaaaaaaaactttaaagaaatgaaagaagaaccctcttcagatacttacttgaagactgttttcccctgttaatgagatatagctagatatcggtgtgtgtatttctttattattctctggtttttgatctggccttgcctccagggccaaacactgatttagaaagagagccttctagctattttggcattgatggctttttataccagtgtgtccagttagatttactaggcttactgacatgctattggtaaatcgcattaaagttcatctgaaccttctgtctgttgacttcttagtcctcagacatgggcctttgtgttttagaatatttgaatttgagttattgggccccactccctgttttttattaaagaacgtgagcctgggatactttcagaagtatctgttcaatgaaaaaaagttggtttcccatcaaatatgaataaaattctctatatatttcattgt

SEQ ID NO: 26838 - DNA, 2522 bp, Homo sapiens
  Clone ID: LIB4649-043-C11_FLI
cggcgcagtgttgggactgtctgggtatcggaaagcaagcctacgttgctcactattacgtataatccttttcttttcaagatgcctgaggaagtgcaccatggagaggaggaggtggagacttttgcctttcaggcagaaattgcccaactcatgtccctcatcatcaataccttctattccaacaaggagattttccttcgggagttgatctctaatgcttctgatgccttggacaagattcgctatgagagcctgacagacccttcgaagttggacagtggtaaagagctgaaaattgacatcatccccaaccctcaggaacgtaccctgactttggtagacacaggcattggcatgaccaaagctgatctcataaataatttgggaaccattgccaagtctggtactaaagcattcatggaggctcttcaggctggtgcagacatctccatgattgggcagtttggtgttggcttttattctgcctacttggtggcagagaaagtggttgtgatcacaaagcacaacgatgatgaacagtatgcttgggagtcttctgctggaggttccttcactgtgcgtgctgaccatggtgagcccattggcaggggtaccaaagtgatcctccatcttaaagaagatcagacagagtacctagaagagaggcgggtcaaagaagtagtgaagaagcattctcagttcataggctatcccatcaccctttatttggagaaggaacgagagaaggaaattagtgatgatgaggcagaggaagagaaaggtgagaaagaagaggaagataaagatgatgaagaaaagcccaagatcgaagatgtgggttcagatgaggaggatgacagcggtaaggataagaagaagaaaactaagaagatcaaagagaaatacattgatcaggaagaactaaacaagaccaagcctatttggaccagaaaccctgatgacatcacccaagaggagtatggagaattctacaagagcctcactaatgactgggaagaccacttggcagtcaagcacttttctgtagaaggtcagttggaattcagggcattgctatttattcctcgtcgggctccctttgacctttttgagaacaagaagaaaaagaacaacatcaaactctatgtccgccgtgtgttcatcatggacagctgtgatgagttgataccagagtatctcaattttatccgtggtgtggttgactctgaggatctgcccctgaacatctcccgagaaatgctccagcagagcaaaatcttgaaagtcattcgcaaaaacattgttaagaagtgccttgagctcttctctgagctggcagaagacaaggagaattacaagaaattctatgaggcattctctaaaaatctcaagcttggaatccacgaagactccactaaccgccgccgcctgtctgagctgctgcgctatcatacctcccagtctggagatgagatgacatctctgtcagagtatgtttctcgcatgaaggagacacagaagtccatctattacatcactggtgagagcaaagagcaggtggccaactcagcttttgtggagcgagtgcggaaacggggcttcgaggtggtatatatgaccgagcccattgacgagtactgtgtgcagcagctcaaggaatttgatgggaagagcctggtctcagttaccaaggagggtctggagctgcctgaggatgaggaggagaagaagaagatggaagagagcaaggcaaagtttgagaacctctgcaagctcatgaaagaaatcttagataagaaggttgagaaggtgacaatctccaatagacttgtgtcttcaccttgctgcattgtgaccagcacctacggctggacagccaatatggagcggatcatgaaagcccaggcacttcgggacaactccaccatgggctatatgatggccaaaaagcacctggagatcaaccctgaccaccccattgtggagacgctgcggcagaaggctgaggccgacaagaatgataaggcagttaaggacctggtggtgctgctgtttgaaaccgccctgctatcttctggcttttcccttgaggatccccagacccactccaaccgcatctatcgcatgatcaagctaggtctaggtattgatgaagatgaagtggcagcagaggaacccaatgctgcagttcctgatgagatcccccctctcgagggcgatgaggatgcgtctcgcatggaagaagtcgattaggttaggagttcatagttggaaaacttgtgcccttgtatagtgtccccatgggctcccactgcagcctcgagtgcccctgtcccacctggctccccctgctggtgtctagtgtttttttccctctcctgtccttgtgttgaaggcagtaaactaagggtgtcaagccccattccctctctactcttgacagcaggattggatgttgtgtattgtggtttattttattttcttcattttgttctgaaattaaagtatgcaaaataaag

SEQ ID NO: 26839 - DNA, 2902 bp, Homo sapiens
  Clone ID: LIB4649-060-B1_FLI
tgtggctgtgccgttggtcctgtgcggtcacttagccaagatgcctgaggaaacccagacccaagaccaaccgatggaggaggaggaggttgagacgttcgcctttcaggcagaaattgcccagttgatgtcattgatcatcaatactttctactcgaacaaagagatctttctgagagagctcatttcaaattcatcagatgcattggacaaaatccggtatgaaagcttgacagatcccagtaaattagactctgggaaagagctgcatattaaccttataccgaacaaacaagatcgaactctcactattgtggatactggaattggaatgaccaaggctgacttgatcaataaccttggtactatcgccaagtctgggaccaaagcgttcatggaagctttgcaggctggtgcagatatctctatgattggccagttcggtgttggtttttattctgcttatttggttgctgagaaagtaactgtgatcaccaaacataacgatgatgagcagtacgcttgggagtcctcagcagggggatcattcacagtgaggacagacacaggtgaacctatgggtcgtggaacaaaagttatcctacacctgaaagaagaccaaactgagtacttggaggaacgaagaataaaggagattgtgaagaaacattctcagtttattggatatcccattactctttttgtggagaaggaacgtgataaagaagtaagcgatgatgaggctgaagaaaaggaagacaaagaagaagaaaaagaaaaagaagagaaagagtcggaagacaaacctgaaattgaagatgttggttctgatgaggaagaagaaaagaaggatggtgacaagaagaagaagaagaagattaaggaaaagtacatcgatcaagaagagctcaacaaaacaaagcccatctggaccagaaatcccgacgatattactaatgaggagtacggagaattctataagagcttgaccaatgactgggaagatcacttggcagtgaagcatttttcagttgaaggacagttggaattcagagcccttctatttgtcccacgacgtgctccttttgatctgtttgaaaacagaaagaaaaagaacaacatcaaattgtatgtacgcagagttttcatcatggataactgtgaggagctaatccctgaatatctgaacttcattagaggggtggtagactcggaggatctccctctaaacatatcccgtgagatgttgcaacaaagcaaaattttgaaagttatcaggaagaatttggtcaaaaaatgcttagaactctttactgaactggcggaagataaagagaactacaagaaattctatgagcagttctctaaaaacataaagcttggaatacacgaagactctcaaaatcggaagaagctttcagagctgttaaggtactacacatctgcctctggtgatgagatggtttctctcaaggactactgcaccagaatgaaggagaaccagaaacatatctattatatcacaggtgagaccaaggaccaggtagctaactcagcctttgtggaacgtcttcggaaacatggcttagaagtgatctatatgattgagcccattgatgagtactgtgtccaacagctgaaggaatttgaggggaagactttagtgtcagtcaccaaagaaggcctggaacttccagaggatgaagaagagaaaaagaagcaggaagagaaaaaaacaaagtttgagaacctctgcaaaatcatgaaagacatattggagaaaaaagttgaaaaggtggttgtgtcaaaccgattggtgacatctccatgctgtattgtcacaagcacatatggctggacagcaaacatggagcgaatcatgaaagctcaagccctaagagacaactcaacaatgggttacatggcagcaaagaaacacctggagataaaccctgaccattccattattgagaccttaaggcaaaaggcagaggctgataagaacgacaagtctgtgaaggatctggtcatcttgctttatgaaactgcgctcctgtcttctggcttcagtctggaagatccccagacacatgctaacaggatctacaggatgatcaaacttggtctgggtattgatgaagatgaccctactgctgatgataccagtgctgctgtaactgaagaaatgccaccccttgaaggagatgacgacacatcacgcatggaagaagtagactaatctctggctgagggatgacttacctgttcagtactctacaattcctctgataatatattttcaaggatgtttttctttatttttgttaatattaaaaagtctgtatggcatgacaactactttaaggggaagataagatttctgtctactaagtgatgctgtgataccttaggcactaaagcagagctagtaatgctttttgagtttcatgttggtttattttcacagattggggtaacgtgcactgtaagacgtatgtaacatgatgttaactttgtggtctaaagtgtttagctgtcaagccggatgcctaagtagaccaaatcttgttattgaagtgttctgagctgtatcttgatgtttagaaaagtattcgttacatcttgtaggatctactttttgaacttttcattccctgtagttgacaattctgcatgtactagtcctctagaaataggttaaactgaagcaacttgatggaaggatctctccacagggcttgttttccaaagaaaagtattgtttggaggagcaaagttaaaagcctacctaagcatatcgtaaagctgttcaaaaataactcagacccagtcttgtggatggaaatgtagtgctcgagtcacattctgcttaaagttgtaacaaatacagatgagttaaaag

SEQ ID NO: 26840 - DNA, 1652 bp, Homo sapiens
  Clone ID: LIB4651-002-H7_FLI
gcactgcagcgtggtggaggtgacagaggaggaggttaagaactcagtcaggctcatccccagctggaccacggtgatcctggtgaagtccatgctgaggaagcgttcctttgggaacccgtttgagccccaagcacggagggaagagcgatccatgtctgctccaggaaacctactggtgaaagaagggtttggtgaagggggcaagagcccagagctccccggcgtccaggaagacgaggctgcatcctgagcccctgcatgcacccagggccacccggcagcacactcatcccgcgcctccagaggcccacccctcatgcaacagccgcccccgcaggcagggggctggggactgcagccccactcccgcccctcccccatcgtgctgcatgacctccacgcacgcacgtccagggacagactggaatcccaagattatttggcagccaagtggatggaactaactttcctggactgtgtttcgcattcggcgttatctggaaagtggactgaacggaatcaagctctgagcagaggcctgaagcggaagcaccacatcgtccctgcccatctcactctctcccttgatgatgcccctagagctgaggctggagaagacaccagggctgactttgactgagggccatggacgcgacaggcctgtggccctgcgcatgctgaaataactggaacccagcctctcctcctacaccggcctacccatctgggcccaagagctgcactcacactcctacaacgaaggacaaactgtccaggtcggagggatcacgagacacagaacctggaggggtgtgcacgctggcaggtggcctctgcggcaattgcctcaccctgaggacatcagcagtcagcctgctcagagcgggggtgctggagcgcgtgcagacacagctcttccggagcagccttcaccttctctctgggatcagtgtccggctggccgacgtggcatttgctgaccgaatgctcatagaggttgacccccacagggtcacgcaggactcggacactgccctggaaacatggatggacaagggcttttggccacaggtgtgggtgtcctgttggaggagggcttgtttggagaagggaggctggctgggggagaaacccggatcccgctgcatctccgcgcctgtgggtgcatgtcgcgtgctcatctgttgcacacagctcactcgtatgtcctgcactggtacatgcatctgtaatacagtttctacgtctatttaaggctaggagccgaatgtgccccattgtcagtgggtccacgtttctccccggctcctctgggctaaggcagtgtggcccgaggcttaaaaagttactcggtactgtttttaagaacacttttatagagttagtggaaggcaagttaagagccaatcactgatccccaagtgtttcttgagcatctggtctggggggaccactttgatcggacccacccttggaaagctcaggggtgggcccaggtgggatgctcaccctgtcactgagggttttggttggcatcgttgtttttgaatgtagcacaagcgatgagcaaactctataagagtgttttaaaaattaacttcccaggaagtgagttaaaaacaataaaagccctttcttgagttaaaaag

SEQ ID NO: 26841 - DNA, 2880 bp, Homo sapiens
  Clone ID: LIB4651-010-C11_FLI
agaaaatgtgtcggatattttggggcggtcacgtgggcgggcgggctccgagaggccccgggacagtcccagcctagagccgtgcccccccaggagccccccagtacggcgagccccggacattgcgacgctccatccaagagactgcccgacgccgggacctcggggctccgccgcctcccttccccctcccactccagcagctacggcccagttccctcaacctgacccagtatgtagaagccagtctctgcaggcggccagcgggacttttggaggcccagtgggcaggccaggcagggcgggtacggagcctcccaggctggggcagtgggcatgggcaggggctgtggctgaagacctcgcccgcccactgcagaccccaggggactctcacaccgcagctgccatggccaccaataaggagcgactctttgcggctggtgccctggggcctggatctggctacccaggggcaggtttccccttcgccttcccaggggcactcagggggtctccgcctttcgagatgctgagccctagcttccggggcctgggccagcctgacctccccaaggagatggcctctctgtcggtggagacacagagcaccagctcagaggagatggtgcccagctcgccctcgccccctccgcctcctcgggtctacaagccatgcttcgtgtgcaatgacaagtcctctggctaccactatggggtcagctcttgtgaaggctgcaagggcttctttcgccgaagcatccagaagaacatggtgtacacgtgtcaccgcgacaaaaactgtatcatcaacaaggtgaccaggaatcgctgccagtactgccggctacagaagtgcttcgaagtgggcatgtccaaggaagctgtgcgaaatgaccggaacaagaagaagaaagaggtgaaggaagaagggtcacctgacagctatgagctgagccctcagttagaagagctcatcaccaaggtcagcaaagcccatcaggagactttcccctcgctctgccagctgggcaagtataccacgaactccagtgcagaccaccgcgtgcagctggatctggggctgtgggacaagttcagtgagctggctaccaagtgcatcatcaagatcgtggagtttgccaagcggttgcctggctttacagggctcagcattgctgaccagatcactctgctcaaagctgcctgcctagatatcctgatgctgcgtatctgcacaaggtacaccccagagcaggacaccatgaccttctccgacgggctgaccctgaaccggacccagatgcacaatgccggcttcgggcccctcacagaccttgtctttgcctttgctgggcagctcctgcccctggagatggatgacaccgagacagggctgctcagcgccatctgcctcatctgcggagaccgcatggacctggaggagcccgaaaaagtggacaagctgcaggagccactgctggaagccctgaggctgtacgcccggcgccggcggcccagccagccctacatgttcccaaggatgctaatgaaaatcaccgacctccggggcatcagcactaagggagctgaaagggccattactctgaagatggagattccaggcccgatgcctcccttaatccgagagatgctggagaaccctgaaatgtttgaggatgactcctcgcagcctggtccccaccccaatgcctctagcgaggatgaggttcctgggggccagggcaaagggggcctgaagtccccagcctgaccagggcccctgacctccccgctgtgggggttggggcttcaggcagcagactgaccatctcccagaccgccagtgactgggggaggacctgctctgccctctccccaccccttccaatgagctccttgtttttgccaaagtttctaggggtgcctctgtgttcatccccttcctgatctaaccggctccctcgccagtcccgggggcctgccctgctcccaccaggagagagggcaaagggatgagcctgggtttggactctaaaatctcagcactgccccatgggtcctagacttcccagggcaagaggaagaccctgccattccacagccccttcctctgccaggtgcttggctctctgagagcaaacaggaacactagagaccaaaaaggggacaaaggagaagggctgagcccaccttcttgctcctacccttggtgcctaatgctgtgtgatgcacctgcagggtgtgtgctagcctctgtgccccgtccttgtgccaggtcaaggtgggggcaggctgggccctgcatttctggggcaggaacagagggtgaaagggacagatagatgcaggtccattctgcacctcttggctcgggtgcagagttcaccctgtgccctccgttataagtccctcccccagccctgtcatgtgccttgggctcctcctgccctccatctcagccattggggcagggaccctcctacactacagaggggccaggggatccctctctccctagtgccttccaccctttactccccagagcagcttggcccagggaggggggatgctgcttagctgatcccgccctgacccagaggaagcctctatttatttattagcttttgtttacaccgtggaattgaccccttcctccaggggtcttgggtgggggagcccagggcccctgtgacccctcctttcttcctccaatccccagtttgtatttagctgccaaataagattcccattggctccctgtgttctcttggggggtcagggtgctgtcccctcccctctgtttacatctcccctctaccccgctgtatcgcatattgctgagttttctatttttgcaaaataaagtgatggaaactc

SEQ ID NO: 26842 - DNA, 3791 bp, Homo sapiens
  Clone ID: LIB4651-024-E4_FLI
ctgccggagacacaggttttctgagcgcaccagcggctccaaaagcagagggaagagccctgcgtgcaggtctggtgaagctgggggttcactgcgtcacctgccagaaggtggccatcaagatcgtcaaccgtgagaagctcagcgagtcggtgctgatgaaggtggagcgggagatcgcgatcctgaagctcattgagcacccccacgtcctaaagctgcacgacgtttatgaaaacaaaaaatatttgtacctggtgctagaacacgtgtcaggtggtgagctcttcgactacctggtgaagaaggggaggctgacgcctaaggaggctcggaagttcttccggcagatcatctctgcgctggacttctgccacagccactccatatgccacagggatctgaaacctgaaaacctcctgctggacgagaagaacaacatccgcatcgcagactttggcatggcgtccctgcaggttggcgacagcctgttggagaccagctgtgggtccccccactacgcctgccccgaggtgatccggggggagaagtatgacggccggaaggcggacgtgtggagctgcggcgtcatcctgttcgccttgctggtgggggctctgcccttcgacgatgacaacttgcgacagctgctggagaaggtgaagcggggcgtgttccacatgccgcactttatcccgcccgactgccagagtctgctacggggcatgatcgaggtggacgccgcacgccgcctcacgctagagcacattcagaaacacatatggtatatagggggcaagaatgagcccgaaccagagcagcccattcctcgcaaggtgcagatccgctcgctgcccagcctggaggacatcgaccccgacgtgctggacagcatgcactcactgggctgcttccgagaccgcaacaagctgctgcaggacctgctgtccgaggaggagaaccaggagaagatgatttacttcctcctcctggaccggaaagaaaggtacccgagccaggaggatgaggacctgcccccccggaacgagatagaccctccccggaagcgtgtggactccccgatgctgaaccggcacggcaagcggcggccagaacgcaaatccatggaggtgctcagcgtgacggacggcggctccccggtgcctgcgcggcgggccattgagatggcccagcacggccagagtaaagcaatgttcagtaaaagcctggatatcgctgaggcccatccccaattcagcaaagaagacaggtctcggtccatcagcggtgcctcctcaggcctttccaccagcccactcagcagcccccgggtgacccctcacccctcaccaaggggcagtcccctccccacccccaaggggacacctgtccacacgccaaaggagagcccggctggcacgcccaaccccacgcccccgtccagccccagcgtcggaggggtgccctggagggcgcggctcaactccatcaagaacagctttctgggctcaccccgcttccaccgccggaaactgcaagttccgacgccggaggagatgtccaacctgacaccagagtcgtccccagagctggcgaagaagtcctggtttgggaacttcatcagcctggagaaggaggagcagatcttcgtggtcatcaaagacaaacctctgagctccatcaaggctgacatcgtgcacgccttcctgtcgattcccagtctcagccacagcgtcatctcccaaacgagcttccgggccgagtacaaggccacgggggggccagccgtgttccagaagccggtcaagttccaggttgatatcacctacacggagggtggggaggcgcagaaggagaacggcatctactccgtcaccttcaccctgctctcaggccccagccgtcgcttcaagagggtggtggagaccatccaggcccagctgctgagcacacacgacccgcctgcggcccagcacttgtcagaaccccccccaccagcgccaggactaagctggggtgctgggcttaagggccagaaggtggccaccagctacgagagtagcctctgacgctggcaggaattatcccgaaaagttaacatgtcacctccacgaggccatcctctgtgaccgaaggcagctgctgcggacccgccctccctccgctcctgctgttgctgccgggcagtgaggcccagcccagcgccccgtccaccccgcggcagctcctcgcctcagctccgcacggcccgtgggaggaaggccaggctcgggggagcctcctccagcccggccgacccggactcccggtcacctgacccctcagcaagaacagcctgcctggtggccttctggggccaggacccctggtgggcaacgtagccacaggaacaggccccgtccaccgcctccacgccgcacctggaggcctcctcgcaggcccgtgccccgcctccctggccgcgccgcctccgtgtagtcttggcctcctcaggctgcctcccgtcctctcgtctcacccgcgcctcccttgcctcatctggggcggctgtgggctctggcgctcctctctggctgaggtggaaacagagacaccctgcggcaccagagccttcccagcaggccaggccgctgggctgggatcagtgttatttatttgccgttttaatttatggattctccgcacctctgttcagggaagggcggcggccacatcccctgccgtctgcgtgtctcaggcagtgggggggctggggccagggcgccctctgaggacagagctggtggggcgcgggggggctggcgagctactgtaaactttaaagaattcctgcaagatatttttataaacttttttttcttggtggtttttggaaaagggtgtgggggtgggggcgccgctggggcagggccaggttttgtgttttagtcccttgctcctgcttctttctacacacacatctaaagacggtgcggctcgctctgtcatgggttccgtctctctgtggagaagcagctccacctctgggggggctcggggcagaggggcggtgtctcgtagcgggcggcagcgccagcgcccctctgtcaggctggggcaatcttggttttgtgtccaaaggtgaaggggtaggaggagggccctcagctggccctccccacacacaggacggcaggggcactgtgaggcttttcttattaaaatgaaaaaattgaaaaaaaaggacaaagagtcggtggcgctcctctgcagggcgttctgtgcagagcgaggcccagggcgcagccctcagagggctgcaggcccaccctgcccagtgcccgccgccgtgcttcaccccagctccagcttctgtgttcccttccgcccatgtgcccagccctcccaggcgggcacagcccgggtgcggcggccgtgggggacggcgggtctgatgcatgcctctgccatggagtcgtctgtctgcttcggtgcctgcccctgcctcccacccacctcgtgtatagattttaacgcttctgttaacattagacctctgccacaggctgggatttctatacataagaacaaaagcaaacacctaggacagcaaacgccaggcggtacaggcgggaaggggctctccacggagatcgaggacacgaagcaaactgcctcttgcttgccttccccttttgtgcttcggacacacgcggactccagcaggcgccacggaaatgggcaagcccctgcagtgtacccctgtcataactgtgagcagctgcagctccggaacaataaatcccttccgc

SEQ ID NO: 26843 - DNA, 4212 bp, Homo sapiens
  Clone ID: LIB4651-030-F8_FLI
gggctcgtggctgagccagcagctgcagcagctacgggagtggccgggtggccggcgggtgccagccgccatggaggccgtgccccgcatgcccatgatctggctggacctgaaggaggccggtgactttcacttccagccagctgtgaagaagtttgtcctgaagaattatggagagaacccagaagcctacaatgaagaactgaagaagctggagttgctcagacagaatgctgtccgtgtcccacgagactttgagggctgtagtgtcctccgcaagtacctcggccagcttcattacctgcagagtcgggtccccatgggctcgggccaggaggccgctgtccctgtcacctggacagagatcttctcaggcaagtctgtggcccatgaggacatcaagtacgagcaggcctgtattctctacaaccttggagcgctgcactccatgctgggggccatggacaagcgggtgtctgaggagggcatgaaggtctcctgtacccatttccagtgcgcagccggcgccttcgcctacctacgggagcacttccctcaagcctacagcgtcgacatgagccgccagatccttacgctcaacgtcaacctcatgctgggccaggctcaggagtgcctcctggagaagtcgatgttggacaacaggaagagctttctggtggcccgcatcagtgcacaggtggtagattactacaaggaggcatgccgggccttggagaaccccgacactgcctcactgctgggccggatccagaaggactggaagaaacttgtgcagatgaagatctactacttcgcagccgtggctcatctgcacatgggaaagcaggccgaggagcagcagaagttcggggagcgggttgcatacttccagagcgccctggacaagctcaatgaagccatcaagttggccaagggccagcctgacactgtgcaagacgcgcttcgcttcactatggatgtcattgggggaaagtacaattctgccaagaaggacaacgacttcatttaccatgaggctgtcccagcattggacacccttcagcctgtaaaaggagcccccttggtgaagcccttgccagtgaaccccacagacccagctgttacaggccctgacatctttgccaaactggtacccatggctgcccacgaggcctcgtcactgtacagtgaggagaaggccaagctgctccgggagatgatggccaagattgaggacaagaatgaggtcctggaccagttcatggattcaatgcagttggatcccgagacggtggacaaccttgatgcctacagccacatcccaccccagctcatggagaagtgcgcggctctcagcgtccggcccgacactgtcaggaaccttgtacagtccatgcaagtgctgtcaggtgtgttcacggatgtggaggcttccctgaaggacatcagagatctgttggaggaggatgagctgctagagcagaagtttcaggaggcggtgggccaggcaggggccatctccatcacctccaaggctgagctggcagaggtgaggcgagaatgggccaagtacatggaagtccatgagaaggcctccttcaccaacagtgagctgcaccgtgccatgaacctgcacgtcggcaacctgcgcctgctcagcgggccgcttgaccaggtccgggctgccctgcccacaccggccctctccccagaggacaaggccgtgctgcaaaacctaaagcgcatcctggctaaggtgcaggagatgcgggaccagcgcgtgtccctggagcagcagctgcgtgagcttatccagaaagatgacatcactgcctcgctggtcaccacagaccactcagagatgaagaagttgttcgaggagcagctgaaaaagtatgaccagctgaaggtgtacctggagcagaacctggccgcccaggaccgtgtcctctgtgcactgacagaggccaacgtgcagtacgcagccgtgcggcgggtactcagcgacttggaccaaaagtggaactccacgctgcagaccctggtggcctcgtatgaagcctatgaggacctgatgaagaagtcgcaggagggcagggacttctacgcagatctggagagcaaggtggctgctctgctggagcgcacgcagtccacctgccaggcccgcgaggctgcccgccagcagctcctggacagggagctgaagaagaagccgccgccacggcccacagccccaaagccgctgctgccccgcagggaggagagtgaggcagtggaagcaggagacccccctgaggagctgcgcagcctcccccctgacatggtggctggcccacgactgcctgacaccttcctgggaagtgccaccccgctccactttcctcccagccccttccccagctccacaggcccaggaccccactatctctcaggccccttgccccctggtacctactcgggccccacccagctgatacagcccagggccccagggccccatgcaatgcccgtagcacctgggcctgccctctacccagcccctgcctacacaccggagctgggccttgtgccccgatcctccccacagcatggcgtggtgagcagtccctatgtgggggtagggccggccccaccagttgcaggtctcccctcggccccacctcctcaattctcaggccccgagttggccatggcggttcggccagccaccaccacagtagatagcatccaggcgcccatccccagccacacagccccacggccaaaccccacccctgctcctcccccgccctgcttccctgtgcccccaccgcagccactgcccacgccttacacctaccctgcaggggctaagcaacccatcccagcacagcaccacttctcttctgggatccccgcaggttttccagccccaaggattgggccccagccccagccccatcctcagccccatccttcacaagcgtttgggcctcagcccccacagcagccccttccactccagcatccacatctcttcccaccccaggccccaggactcctacccccacaatccccctacccctatgcccctcagcctggggtcctggggcagccgccaccccccctacacacccagctctacccaggtcccgctcaagaccctctgccagcccactcaggggctctgcctttccccagccctgggccccctcagcctccccatcccccactggcatatggtcctgccccttctaccagacccatgggcccccaggcagcccctcttaccattcgagggccctcgtctgctggccagtccacccctagtccccacctggtgccttcacctgccccatctccagggcctggtccggtaccccctcgccccccagcagcagaaccacccccttgcctgcgccgaggcgccgcagctgcagacctgctctcctccagcccggagagccagcatggcggcactcagtctcctgggggtgggcagcccctgctgcagcccaccaaggtggatgcagctgagggtcgtcggccgcaggccctgcggctgattgagcgggacccctatgaacatcctgagaggctgcggcagttgcagcaggagctggaggcctttcggggtcagctgggggatgtgggagctctggacactgtctggcgagagctgcaagatgcgcaggaacatgatgcccgaggccgttccatcgccattgcccgctgctactcactgaagaaccggcaccaggatgtcatgccctatgacagtaaccgtgtggtgctgcgctcaggcaaggatgactacatcaatgccagctgcgtggaggggctctccccatactgccccccgctagtggcaacccaggccccactgcctggcacagctgctgacttctggctcatggtccatgagcagaaagtgtcagtcattgtcatgctggtttctgaggctgagatggagaagcaaaaagtggcacgctacttccccaccgagaggggccagcccatggtgcacggtgccctgagcctggcattgagcagcgtccgcagcaccgaaacccatgtggagcgcgtgctgagcctgcagttccgagaccagagcctcaagcgctctcttgtgcacctgcacttccccacttggcctgagttaggcctgcccgacagccccagcaacttgctgcgcttcatccaggaggtgcacgcacattacctgcatca

SEQ ID NO: 26844 - DNA, 2305 bp, Homo sapiens
  Clone ID: LIB4651-038-H5_FLI
gcatccgaagcgcggccaggcaatgtggctgaaggtggggggcctacttcgggggaccggtggacagctgggccagactgttggttggccttgtggggccctggggcctgggccccaccgctggggaccatgtggaggttcttgggcccaaaagttttaccaggatgggcctgggagaggcctgggtgaggaggacattcgcagggcacgggaggcccgtcccaggaagacaccccggccccagctgagtgaccgctctcgagaacgcaaggtgcctgcctcccgcatcagccgcttggccaactttgggggactggctgtgggcttggggctaggagtactggccgagatggctaagaagtccatgccaggaggtcgtctgcagtcagagggtggttctgggctggactccagccccttcctgtcggaggccaatgccgagcggattgtgcagaccttatgtacagttcgaggggccgccctcaaggttggccagatgctcagcatccagggtacagcatgaccctcgactcctgacccctgacctcccttctaccccagccctacccaccaacaggccccaacttcagatactcacacggggtccctcctcacctcttcgcttacttcccccctggttccactgtctcccaagacaacagcttcatcagccctcagctgcagcacatctttgagcgggtccgccagagcgccgacttcatgccccgctggcagatgctgagagttcttgaagaggagctcggcagggactggcaggccaaggtggcctccttggaggaggtgccctttgccgctgcctcaattgggcaggtgcaccagggcctgctgagggacgggacggaggtggccgtgaagatccagtaccccggcatagcccagagcattcagagcgatgtccagaacctgctggcagtactcaagatgagcgcggccctgcccgcgggcctgtttgccgagcagagcctgcaggccttgcagcaggagctggcttgggagtgtgactaccgtcgtgaggcggcttgtgcccagaatttcaggcagctgctggcaaatgaccccttcttccgggtcccagccgtggttaaggagctgtgcacgacacgggtgctgggcatggagctggctggaggggtccccctggaccagtgccagggcctaagccaggacctgcggaaccagatttgcttccagctcctgacgctgtgtctgcgggagctgtttgagttccgattcatgcagactgaccccaactgggccaacttcctgtatgatgcctccagccaccaggtgaccctgctggactttggtgcaagccgggagtttgggacagagttcacagaccattacatcgaggtggtgaaggctgcagctgatggagacagagactgtgtcctgcagaagtccagggacctcaaattcctcacaggctttgaaaccaaggcattctccgacgcccacgtggaggcagtgatgatcctgggggagcctttcgccacccagggcccttatgactttgggtcgggggaaacggcccgccgcatacaggacctcatcccggtgctgctgcggcaccggctgtgtcccccacccgaggagacctatgccctgcaccgcaagctggcaggggctttcctggcctgtgcccacctccgagcccacatcgcctgcagggacctcttccaggacacctaccaccgctactgggccagtcgccagccagacgcagccactgccggcagcctccccaccaaaggggactcctgggtggatccctcatgacagcctccatgggggattcagtccccagagcaggccgtaccctgctgtagtgcctcttatcccttccccgtctgccctgggtcagaggagcccccttgggcttcccagtcttgcctggctctcctccttggcccaggagctcaggatccctggggctggggaactcccaacttcgtgccctagatcctgcacctccccactcgaaagtgggtatccgaaaactaagccagggaagcggttaacttatctttgccaacatttgagggagccttgggccgctgcatgtcgttatgcagatcagactcatcagggggagccctcacctctgcctcaagcctcccgtggaaggcgagatggtcctggaggcagtcctcacctctgcctccctcgctcctccaacagctgccttctcccgggttccagcctctcagtgtgttggagaggtaggggtgcggggtgggggggagctgaatcttcaatcggaataaaagcagccctccccttc

SEQ ID NO: 26845 - DNA, 5210 bp, Homo sapiens
  Clone ID: LIB4651-049-E11_FLI
ggagccccagccgctagtgctggtggccgccgctgctgccccagctggagcccgagccgccgcctctgcgtccgcgcgtcgctgcttcccagggcggcggtatgctggggaaaggagtagtcggcggtggcggcggcaccaaggcccccaagccctccttcgtgtcgtacgtacgccctgaggaaattcacacaaacgaaaaggaagtaacagagaaggaagtaactcttcacttgttgccaggtgaacagctgctttgtgaagccagcacagtactgaagtatgtccaggaagattcctgtcagcatggggtctatgggaggcttgtctgcacagacttcaagattgccttcttgggtgatgatgaatctgcattggataatgatgaaactcaatttaagaataaggttataggagaaaatgacattacactccactgtgttgatcagatttatggagtgtttgatgagaaaaagaaaactctctttggacaactgaagaaataccctgagaagctcatcatccactgcaaagaccttcgagtgttccagttttgtctgaggtacacaaaggaagaggaagtcaaaaggattgtcagtggcataattcatcatacccaggctcctaaactgcttaaacgattatttctgttttcctatgcgactgctgcacaaaacaatacagtcactgatcccaagaaccataccgtaatgtttgacacacttaaggactggtgttgggaactggaacggaccaaaggcaacatgaagtacaaagcagtgagtgtcaacgaaggctataaagtctgtgagagtgtaacacggtggctggcttctaagaggagctcaataaataggagacagaaggaaaagccccatttgtatttagagggggacctgcgtcagtttggattgccagcatactttgttgtccccacccctcttcctgaagagaatgtgcagcgctttcagggtcatggcataccaatatggtgttggtcctgccacaatggaagtgcccttttgaaaatgtcagcactgcccaaagaacaggatgacggcattttacaaatccaaaagagcttcttagatggaatttacaagaccatccacaggccaccctatgaaattgttaaaacggaagacctgtcaagcaacttcctgtccctgcaggaaatccagactgcatactctaaatttaaacagctatttctgatagataacagtactgaattttgggacacagatataaaatggttttctctgttggaaagtagcagctggcttgacataatcagacgttgcctgaaaaaagcaatagagattacagaatgtatggaagcacaaaacatgaatgttcttcttttagaggagaatgcatccgacctctgctgtctcatttcctctctggtgcaactgatgatggacccccactgcagaaccagaattggtttccagagcctcatccaaaaggagtgggtcatgggtggccactgtttcttggatcgctgcaaccatctccgccagaacgacaaagaggaggttcctgtgttcctgcttttcctagattgtgtctggcagctggtgcaccagcatcccccggcatttgaattcacagagacttacctgactgttttgtcagatagcctgtatatacctatttttagcaccttcttcttcaattcacctcatcaaaaagatactaacatgggtagagaaggccaggatacacaaagcaagcctttgaatctgctcaccgtgtgggattggtcggtgcagtttgaacccaaagcccagacattgctcaaaaaccctctttatgtggaaaagccaaaactggacaaaggccaacggaaaggaatgcgcttcaaacatcaacgacaactttctttgccacttacacaatctaagtcatctcccaaaagaggatttttcagggaagaaacagatcatttaattaaaaaccttctgggcaagagaattagcaaacttattaattcttctgatgagctccaagacaactttcgagagttctatgacagctggcatagcaagtccactgactaccatggtttgttgttaccgcatatcgaggggcccgaaatcaaagtctgggcccagcgctacctacgttggattccagaagcccaaatcctaggtggtggccaagtggccactctgagcaaactcttggaaatgatggaggaagtccagagtttacaagagaagatcgacgagagacaccacagccagcaggccccccaggctgaggccccctgcctgctgaggaactctgcccgcctctcgtctttgtttcctttcgctctgctccagcgacattcctctaagcccgtcttacccaccagtggctggaaagctttgggagatgaagacgatttggccaaacgagaagatgagttcgtggacctaggggatgtgtgacctgtttgttgagtgattgtgaaagaggaatgtgggagattgggacagctgatccctggatttgtgtcacgctacagctcatgctggctgggtccttagcccggcactccgttagaataaacctgggccttcgggaaaagaggtggctctcattatttttcatgattctaaaagactatgcaattaaaaccgcatctgtagtattattaattggaaggaattattacttgacccgtaatagggttgtggccgttttctgatgcctaagtattatacagagcccacaatggccagtttactaccagaaagggcttcagtaagatattcttggacttgatactttcttcagatcctctttgtgccaagataatttatccagtcattgggaatagtaagtttctgtgtaacccatctcaattatagaagcaagttcagctttatgtatttgtatggggagttgaagattcagatagaggtattaagatgtgtggcatttacttaaaccatcacatttttttctttctacgcccccttgcctgtaaaacacctgggaagttccactggtgtcatccatcctgatgcttcagaccaccctcccttcttcacagaccgtgtcactttgcctgtgggtgggggctagccagccaccaccctcttttctgtgctgccagccccaggtcttcctccgcctgctccacaccactcgccgctgtccctctgcactccctgccttggtgcgtgtagtcccagtgtctcactgccaaacctcttggttacgctgcggggatctgtttctttgcctgagatccttcctgaggagcgtccattcctctggagtctctccttgtttggaacaaatcgcttcgcctttttctacttgcctgctgaagctttggagcacttgtgattgcagttttctgccgcaacccctgagccgagttcctcacattcttttacctttatggactgatgggattgggtcacttttgaatgtggctttcataggaaagcagcttaaacataaatatcagaagtgatgattatcatatgatacctcagtgattttaaaagccatagaagaaacttgactatgcctggtcaccttcttggatctgctgtctaaatgatatatatatgatatatatgtgatatatatatatcatatatatgatatatatatatatatcacatatatatgatatatatatgatatatatatatcacatatatatgatatatatatcatatatatgatatatattttttttaatgcaggaaagtatactttgtaaggagcagatttttttgttctcagtggaaccctgtcaaatcgcataaaagaggaaaaaaacaaaactcattagaatgttttaaattgaatgttcgccttttacatatatttgctcttcagtatggatcccaatttgaatgttacatgttcggaaaaactttcagttgctcaagggcaataagaaaatttgaggccgggtgtggtggctcacgcctgtaatcccagcactttgggaggctcaggtgggcgaattgcttgagcccaggagttcgagaccagccggggcaacatggcaaaaccctgtctctactaaaaatacaaaaattagctgggtgtggtggtgcatgcctgtagtcccagctactcgggaggctgaggtgggaggatcccgtgagcctgggaggtggagtttgcagtgagctaagatcgtgccactgcactccggcctgggtgatggagcaagacctcgtctcagaaaattggaaactattgactaagagaagtttctaggtttgcactgaattgtcttttgtacatacagtgaattgttttgctgttctccccactccatattaatgcaggagccaggttggtctgttaggatgaacaaaggttgaggggagggcaggattcgtgcatctgggggccaaacacatgttccgtcttgattgccttaagagttactagcgaggtcagtgttaggcttgcaatagggattttaaaatacactaactagttccttagctaccttcacatacattctataggccttcttaaattagcactaacctccacttccttctctgccccattgcctcccaaatatgctatggagctatttttgttaccacgttataacgtgaatatttatacagtagcctcttcaggctttgtaattttcattccaaaaatgcccggtgtgatgctttacactctacaaagtatggtttaaaggcacaaggtcatggcctttgtcatagcagttgaatgtgcattgacatatttttctatgattttttaaaattacaatagaaaaataagctgttgtaacgtgtaaggtcatgacaatttttgtatttatatttgaaatcagatttctataactcttatttgtgtacagaattctcaatggatttatatattgtgaaatttttatctgagattgggatgtggattatgcttaacagtgagagctgaaatgagaccatttactttgtttaaaatgctgtactgtgcaagtttggaaatgtaaattaatttactgtatataatatcttgagtttgtttatacctccaagtttttacactgaagataaactagctttaattcaaaactttttttttctttataagggaataagctgttgagctaaacctgtatacttgtgctttttattttctggatgcacaatgaaagtttatacttgtatctcactgcatcatatctgattgcagaaattaaagcacaatttacaagc

SEQ ID NO: 26846 - DNA, 2912 bp, Homo sapiens
  Clone ID: LIB4651-051-G5_FLI
cgtcccggtgtggctgtgccgttggtcctgtgcggtcacttagccaagatgcctgaggaaacccagacccaagaccaaccgatggaggaggaggaggttgagacgttcgcctttcaggcagaaattgcccagttgatgtcattgatcatcaatactttctactcgaacaaagagatctttctgagagagctcatttcaaattcatcagatgcattggacaaaatccggtatgaaagcttgacagatcccagtaaattagactctgggaaagagctgcatattaaccttataccgaacaaacaagatcgaactctcactattgtggatactggaattggaatgaccaaggctgacttgatcaataaccttggtactatcgccaagtctgggaccaaagcgttcatggaagctttgcaggctggtgcagatatctctatgattggccagttcggtgttggtttttattctgcttatttggttgctgagaaagtaactgtgatcaccaaacataacgatgatgagcagtacgcttgggagtcctcagcagggggatcattcacagtgaggacagacacaggtgaacctatgggtcgtggaacaaaagttatcctacacctgaaagaagaccaaactgagtacttggaggaacgaagaataaaggagattgtgaagaaacattctcagtttattggatatcccattactctttttgtggagaaggaacgtgataaagaagtaagcgatgatgaggctgaagaaaaggaagacaaagaagaagaaaaagaaaaagaagagaaagagtcggaagacaaacctgaaattgaagatgttggttctgatgaggaagaagaaaagaaggatggtgacaagaagaagaagaagaagattaaggaaaagtacatcgatcaagaagagctcaacaaaacaaagcccatctggaccagaaatcccgacgatattactaatgaggagtacggagaattctataagagcttgaccaatgactgggaagatcacttggcagtgaagcatttttcagttgaaggacagttggaattcagagcccttctatttgtcccacgacgtgctccttttgatctgtttgaaaacagaaagaaaaagaacaatatcaaattgtatgtacgcagagttttcatcatggataactgtgaggagctaatccctgaatatctgaacttcattagaggggtggtagactcggaggatctccctctaaacatatcccgtgagatgttgcaacaaagcaaaattttgaaagttatcaggaagaatttggtcaaaaaatgcttagaactctttactgaactggcggaagataaagagaactacaagaaattctatgagcagttctctaaaaacataaagcttggaatacacgaagactctcaaaatcggaagaagctttcagagctgttaaggtactacacatctgcctctggtgatgagatggtttctctcaaggactactgcaccagaatgaaggagaaccagaaacatatctattatatcacaggtgagaccaaggaccaggtagctaactcagcctttgtggaacgtcttcggaaacatggcttagaagtgatctatatgattgagcccattgatgagtactgtgtccaacagctgaaggaatttgaggggaagactttagtgtcagtcaccaaagaaggcctggaacttccagaggatgaagaagagaaaaagaagcaggaagagaaaaaaacaaagtttgagaacctctgcaaaatcatgaaagacatattggagaaaaaagttgaaaaggtggttgtgtcaaaccgattggtgacatctccatgctgtattgtcacaagcacatatggctggacagcaaacatggagagaatcatgaaagctcaagccctaagagacaactcaacaatgggttacatggcagcaaagaaacacctggagataaaccctgaccattccattattgagaccttaaggcaaaaggcagaggctgataagaacgacaagtctgtgaaggatctggtcatcttgctttatgaaactgcgctcctgtcttctggcttcagtctggaagatccccagacacatgctaacaggatctacaggatgatcaaacttggtctgggtattgatgaagatgaccctactgctgatgataccagtgctgctgtaactgaagaaatgccaccccttgaaggagatgacgacacatcacgcatggaagaagtagactaatctctggctgagggatgacttacctgttcagtactctacaattcctctgataatatattttcaaggatgtttttctttatttttgttaatattaaaaagtctgtatggcatgacaactactttaaggggaagataagatttctgtctactaagtgatgctgtgataccttaggcactaaagcagagctagtaatgctttttgagtttcatgttggtttattttcacagattggggtaacgtgcactgtaagacgtatgtaacatgatgttaactttgtgtggtctaaagtgtttagctgtcaagccggatgcctaagtagaccaaatcttgttattgaagtgttctgagctgtatcttgatgtttagaaaagtattcgttacatcttgtaggatctactttttgaacttttcattccctgtagttgacaattctgcatgtactagtcctctagaaataggttaaactgaagcaacttgatggaaggatctctccacagggcttgttttccaaagaaaagtattgtttggaggagcaaagttaaaagcctacctaagcatatcgtaaagctgttcaaaaataactcagacccagtcttgtggatggaaatgtagtgctcgagtcacattctgcttaaagttgtaacaaatacagatgagttaaaag

SEQ ID NO: 26847 - DNA, 1949 bp, Homo sapiens
  Clone ID: LIB4653-002-E1_FLI
aaggctcagtctggagcaaattcagaaacatccttggtacctaggcgggaaacacgagccagacccgtgcctggagccagcccctggccgccgggtagccatgcggagcctgccatccaacggagagctggaccccgacgtcctagagagcatggcatcactgggctgcttcagggaccgcgagaggctgcatcgcgagctgcgcagtgaggaggagaaccaagaaaagatgatatattatctgcttttggatcggaaggagcggtatcccagctgtgaggaccaggacctgcctccccggaatgatgttgaccccccccggaagcgtgtggattctcccatgctgagccgtcacgggaagcggcgaccagagcggaagtccatggaagtcctgagcatcaccgatgccgggggtggtggctcccctgtacccacccgacgggccttggagatggcccagcacagccagagatcccgtagcgtcagtggagcctccacgggtctgtcctccagccctctaagcagcccaaggagtccggtcttttccttttcaccggagccgggggctggagatgaggctcgaggcgggggctccccgacttccaaaacgcagacgctgccttctcggggccccaggggtgggggcgccggggagcagcccccgccccccagtgcccgctccacacccctgcccggccccccaggctccccgcgctcctctggcgggacccccttgcactcgcctctgcacacgccccgggccagtcccaccgggaccccggggacaacaccaccccccagccccggcggtggcgtcgggggagccgcctggaggagtcgtctcaactccatccgcaacagcttcctgggctcccctcgctttcaccggcgcaagatgcaggtccctaccgctgaggagatgtccagcttgacgccagagtcctccccggagctggcaaaacgctcctggttcgggaacttcatctccttggacaaagaagaacaaatattcctcgtgctaaaggacaaacctctcagcagcatcaaagcagacatcgtccatgcctttctgtcgatccccagcctgagtcacagtgtgctgtcacagaccagcttcagggccgagtacaaagccagtggcggcccctccgtcttccaaaagcccgtccgcttccaggtggacatcagctcctctgagggtccagagccctccccgcgacgggacggcagcggaggtggtggcatctactccgtcaccttcactctcatctcgggtcccagccgtcggttcaagcgagtggtggagaccatccaggcacagctcctgagcactcatgaccagccctccgtgcaggccctggcagacgagaagaacggggcccagacccggcctgctggtgccccaccccgaagcctgcagcccccacccagccgcccagacccagagctgagcagctctccccgccgaggcccccccaaggacaagaagctcctggccaccaacgggacccctctgccctgaccccacggggccggggagggaggggacccccctccaccccccttccgtgccccccaactgtgaatctgtaaataaggcccaaggaacatgtcgggaggggggtggacacaaaaaccggccttgccctgcagggatggggctccacaggccgtgcccaactgggggtggttctaggggaacagggggcgggggagctgtttctattttatttattgattaatttattattttatttattgatcaatctctctgcggggtggggtgggggagggacgggagctggttggggtggcttagcagatccggacagggccctctgtccctgtgtcgtccccaaccccctcttcccgggcccctcctcccctggtcctccccccacgaccttctgtacggatttgctctccggaaggaattctggtttcgcgtg

SEQ ID NO: 26848 - DNA, 3838 bp, Homo sapiens
  Clone ID: LIB4654-015-F10_FLI
cggctcgggaggtgcgcgccggctccgcccccgggccccgcccgtccgccgcgcgcccgcgcctcccaattcccagagccggggctggggctctaggctgccgcggcggctctaggctgggctgctgggcgcgaggccagggcgggccgggagaggctgcgccggcggcggatcgcgcagagggcggtggcctgggctggccgaaccatggcggccccggagccggcgccgaggcgggcccgggaacgggagcgggagcgggaggacgagagcgaggacgagagcgacatcctggaggaaagcccgtgtggtcgctggcaaaagcgacgggagcaggtaaaccaagggaacatgccagggcttcagagcaccttcctagccatggacacggaggagggggtagaggtggtgtggaacgagctccacttcggagacaggaaggccttcgcggcgcacgaggagaagatccagaccgtgttcgagcagctggtgctggtggaccacccgaacatcgtgaagttgcacaagtactggctggatacctctgaggcctgcgcgagggtcatcttcatcacagagtacgtgtcatcaggcagcctcaagcaattcctcaaaaagaccaagaagaaccacaaggccatgaacgcccgggtatggggagcgggctggggcagccacggggacaggacggggttggggcagcctcggggactgggatggtgagggggtgcccggcggcctcggacaggggctgggcgaggatgcggggcgggctccgcaggcccagccgcctctcctgcgcccacccgaccgacggagtcgtgcgtccgccgccaggcctggaagcgctggtgcacgcagatcctgtctgcgctcagcttcctgcacgcctgcagccccccaatcatccacgggaacctgaccagcgacaccatcttcattcagcacaacggcctcatcaagatcggctccgtgtggcaccgaatcttctccaatgcacttccagatgatctccgaagccccatccgcgctgagcgagaggaacttcggaacctgcacttcttccccccagagtatggagaggtggccgatgggaccgctgtggacatcttctcctttgggatgtgtgcgctggagatggctgtactggaaatccagaccaatggggacacccgggtcacagaggaggccattgctcgcgccaggcactcgctgagtgaccccaacatgcgggagttcatcctttgctgcctggcccgggaccctgcccgccggccctctgcccacagcctcctcttccaccgcgtgctcttcgaggtgcactcgctgaagctcctggcagcccactgcttcatccagcaccagtacctcatgcctgagaatgtggtggaggagaagaccaaggccatggacctgcacgcggtcttggcggagcttccccggccccgcaggcccccgctgcagtggcggtactcggaagtctccttcatggagctggacaaattcctggaggatgtcaggaatggaatctacccactgatgaactttgcagccactcgacccctggggctgccccgtgtgctggccccacccccggaggaggtccaaaaggccaagaccccgacgccagagccctttgactctgagaccagaaaggtcatccagatgcagtgcaacctggagagaagcgaggacaaggcgcgctggcatctcactctgcttctggtgctggaagaccggctgcaccggcagctgacctacgacctgctcccaacggacagcgcccaggacctcgcctcggagctcgtgcactatggcttcctccacgaggacgaccggatgaagctggctgccttcctggagagcaccttcctcaagtaccgtgggacccaggcctgacccggagccccagccccaggggaccatgccggggtgctgcctgggcaggccatgttggggagactccagcaccgtggggctgccctcctccatgcgcctgggagcacaaaggccccggtagtgaaggaaccccccgtctcctgagagtggggctgaccctgccttgggcgccgaggggttggggggtgggtgtgggggagccgttaggcctcccaggtccttaggatcagggttgcccccagaaccccttcccatatcctccattctccgccctgagttcctacccaggctgcctggccggggccactgcctcctcagcatgcaggaggctgccctgtagggaaccccagctctggggcttgggggtgagggtcagccctggacagacctctgcccagggaactgctccatggggtctgggagagcagccatcccctgctggcaccatagacccacacaaggagcctgcacagcaagccagcggtgacacacctgcaggtgtcaggcatggcactgggcacaacagggacctggcaggagaaacagaccacagagaggtctggagttgaggctgttgtcagcaaagcccctggtcccacacagctctgccctagagccacctctttgaccctttacccaccctgagaccagaacttgcagcccctctgcagatctcctctggccactgcagcccctccaatgggctttttctctcatgcattccctggcctggaggcgtcagggaccccacatcctccctgctcctcagactcacagcccctccatgttacctcccgcacctcctccctggggcagctgctccctgggcctctgaggatgtcagctcctggctccctgcctctctcccactccactcctggctcagtcttagagatttctatgccctcatggattctacccctgccttcctggcctcttgattcttggcttgcctctcctccaattccaaacttagtgaaatggccttaagcattttaaactgtatgtatacattagcgcattcatgcctttctaaacgcatttcaaatgtcaaccaggaaggcacaccactgtattagttttatactgccgctgtaaaatttaccacaaacttagtgacttaacacaaatttattgcaattctgtaggctggaagtctgactatgggtctcactggactagaatcaaggctggcaggctgccttccttcctggaggttctaggggagactctgtctcctgctccttcaggctgctggcagaatccacatcctttcggtggcagggccaaggtccccactttcttgctgactgtaaactaaggccacttccagcttgtagaggctgcctacattccttggctcttggccccctcctccatcttcagagctagcaggttcagtctgtgtcacgaaccatttctctggttccctgcagacaggaaaggttgtccctaaggactcatgagattaggttgggcccagccagataatacatgataatctccctcctcaaggtttttaatattaaacacatctgcaggacacattttgccatgtaaactaacattcactggttccagggattaaggaatgaacctcttttgttggggaagggtggcattctgctgaccacagcactccaaccaaaagccaaaaaccaaagcaagacttactaacgcatatcaaataaattaaaggtacaaaatcgtgaatctcagttatcttaaatattccaatactatttacaaaattattcaaattctcacgccttccaactcaaaattagcaatctaaagtaatttccatatcctagatggaaaccctcatgctaaactgtctgattatgcatggttctaaatggtttcagtggcaaatacataacattgtactactgattaaactgaacttaaaagcatcaataccaccattgctgcactt

SEQ ID NO: 26849 - DNA, 2880 bp, Homo sapiens
  Clone ID: LIB4654-022-E3_FLI
ccgaagcggctgcatctggcgccgcgtctgccccgcgtgctcggagcggattctgcccgccgtccccggagccctcggcgccccgctgagcccgcgatcacttcctccctgtgaccaaccggcgctgcaggttagagcctggcaatgccgtttgggtgtgtgactctgggcgacaagaagaactataaccagccatcggaggtgactgacagatatgatttgggacaggtcatcaagactgaggagttttgtgaaatcttccgggccaaggacaagacgacaggcaagctgcacacctgcaagaagttccagaagcgggacggccgcaaggtgcggaaagctgccaagaacgagataggcatcctcaagatggtgaagcatcccaacatcctacagctggtggatgtgtttgtgacccgcaaggagtactttatcttcctggagctggccacggggagggaggtgtttgactggatcctggaccagggctactactcggagcgagacacaagcaacgtggtacggcaagtcctggaggccgtggcctatttgcactcactcaagatcgtgcacaggaatctcaagctggagaacctggtttactacaaccggctgaagaactcgaagattgtcatcagtgacttccatctggctaagctagaaaatggcctcatcaaggagccctgtgggacccccgagtatctggccccagaggtggtaggccggcagcggtatggacgccctgtggactgctgggccattggagtcatcatgtacatcctgctttcaggcaatccacctttctatgaggaggtggaagaagatgattatgagaaccatgataagaatctcttccgcaagatcctggctggtgactatgagtttgactctccatattgggatgatatttcgcaggcagccaaagacctggtcacaaggctgatggaggtggagcaagaccagcggatcactgcagaagaggccatctcccatgagtggatttctggcaatgctgcttctgataagaacatcaaggatggtgtctgtgcccagattgaaaagaactttgccagggccaagtggaagaaggctgtccgagtgaccaccctcatgaaacggctccgggcaccagagcagtccagcacggctgcagcccagtcggcctcagccacagacactgccacccccggggctgcagaccgtagtgccaccccagccacagatggaagtgccaccccagccactgatggcagtgtcaccccagccaccgatggaagcatcactccagccactgatgggagtgtcaccccagccactgacaggagcgctactccagccactgatgggagagccacaccagccacagaagagagcactgtgcccaccacccaaagcagtgccatgctggccaccaaggcagctgccacccctgagccggctatggcccagccggacagcacagccccagagggcgccacaggccaggctccaccctctagtaaaggggaagaggctgctggttatgcccaggagtctcaaagggaggaggccagctgagtaggcagcctggtgagggggggcaggggatgggcaggagggtgggagagtggatgaggggcttctcactgtacatagagtcactggcatgatgccctcgctcccccatgcccccacatcccagtggggcataactaggggtcacgggagagcagtctcgtctcctgtgtgtatgtgtgtgagtggtgggcaggccagtggcagggccggccccagcccctgcatggattccttgtggcttttctgtcttttgctagcttcaccagtttctgttccttgtgggatgctgctctagggatactcagggggctcctgctctccttccccttcccttcttgcctcaccattcccctaggcaggccctgcaggtcccacactctcccaggccctaaacttgggcggccttgccctgagagctggtcctccagcgaggccctgtcagcggtcttaggctcctgcacatgaaggtgtgtgcctgtggtgtgtgggctgctctaggagcagatacaggctggtatagaggatgcagaaaggtagggcagtatgtttaagtccagacttggcacatggctagggatactgctcactagctgtggaggtcctcaggagtggagagaatgagtaggagggcagaagcttccatttttgtccttcctaagaccctgttatttgtgttatttcctgcctttccgagtcctgcagtgggctgccctgtaccctgaacctcatgagcctctaagggaaaggaggaacaattaggacgtggcaatgagacctggcagggcagagtacaagcccagcacccagtgtcccagccttactgggtccttaccctgggccaaacagggagggctgatacctccttgctcttcctagatgcccacctcctacaatctcagcccacaagtcctctccaccctagggggcttgctgcatggcaataactcataatctgatttggaggtttgccctttacaggggcagattttctgctcagttcaacaatgaaatgaagaggaactccctctttctacagctcacttctatcagaggcccaggtgcctcagagccacattgagttgctttttctgggatgaggaagtagggttaaactccccagtttcctgagggaggctcctgacaggtgccctttgtcagaccctaccacagcctggataggcagccacattggtcctcgcccttgctcggcactccgtggtggtcctgcccttctccctgcatgcctgtgggtctgctctggtgtgtgaaggtcggtgggttaactgtgtgcctactgaacctggcaaataaacatccccctgc

SEQ ID NO: 26850 - DNA, 3715 bp, Homo sapiens
  Clone ID: LIB4654-025-F6_FLI
ggggaaacgggaatagtgagagatcaaaaataaacctcttatgtcaagccgggaaggaagtataaataagaagggctcggcagcccactcggtgcttcccggggtggggaggaggcaggaggcggctgcgcggggctggcgcgggcaggggcggaggacgggcgcacgcgggccggggccagctgctcgcgctcggctcgggggcggcggcgcgggaggagcgggctgcgccagccagaggggccgccgggggagcgctcccgccgccgggcctcgcgggccgagtcggccttgcacccgattgattccgcttttcctggagagagcggccgggccgcgctcgggccgccagcacctgcccgcgcctggcgggcttcttccctctcctgcgcgcagccaccgccgcagcccccatgctccccgcccccgccgccccccggtggcctccgctcctgctgctgctgctgctgctgccgctggcccgcggcgccccggcccggcccgcagccggggggcaggcctcggagctggtggtgcccacgcggttgcccggcagcgcgggcgagctcgcgctccacctgtccgccttcggcaagggcttcgtgctgcgcctggcgcccgacgacagcttcctggcgcccgacttcaagatcgagcgcctcgggggctccggccgggcgaccgggggcgagcgggggctgcgcggctgcttcttctccggcaccgtgaatggggagcccgagtcgctggcggcggtcagcctgtgccgcgggctgagcggctccttcctgctggacggcgaggagttcaccatccagccgcagggcgcggggggctccctggctcagccgcaccgcctgcagcgctggggtcccgccggagcccgccccctcccgcgaggacccgagtgggaggtggagacgggagagggtcagaggcaggagagaggagaccaccaggaggacagcgaggaggagagccaagaagaggaggcagaaggcgctagcgagccgccaccgcccctgggggccacgagtaggaccaagcggtttgtgtctgaggcgcgcttcgtggagacgctgctggtggccgatgcgtccatggctgccttctacggggccgacctgcagaaccacatcctgacgttaatgtctgtggcagcccgaatctacaagcaccccagcatcaagaattccatcaacctgatggtggtaaaagtgctgatcgtagaagatgaaaaatggggcccagaggtgtccgacaatggggggcttacactgcgtaacttctgcaactggcagcggcgtttcaaccagcccagcgaccgccacccagagcactacgacacggccatcctgctcaccagacagaacttctgtgggcaggaggggctgtgtgacaccctgggtgtggcagacatcgggaccatttgtgaccccaacaaaagctgctccgtgatcgaggatgaggggctccaggcggcccacaccctggcccatgaactagggcacgtcctcagcatgccccacgacgactccaagccctgcacacggctcttcgggcccatgggcaagcaccacgtgatggcaccgctgttcgtccacctgaaccagacgctgccctggtccccctgcagcgccatgtatctcacagagcttctggacggcgggcacggagactgtctcctggatgcccctgctgcggccctgcccctccccacaggcctcccgggccgcatggccctgtaccagctggaccagcagtgcaggcagatctttgggccggatttccgccactgccccaacacctctgctcaggacgtctgcgcccagctttggtgccacactgatggggctgagcccctgtgccacacgaagaatggcagcctgccctgggctgacggcacgccgtgcgggcctgggcacctctgctcagaaggcagctgtctacctgaggaggaagtggagaggcccaagcccgtggtagatggaggctgggcaccgtggggaccctggggagaatgttctcggacctgtggaggaggagtacagttttcacaccgtgagtgcaaggaccccgagcctcagaatggaggaagatactgcctgggtcggagagccaagtaccagtcatgccacacggaggaatgcccccctgacgggaaaagcttcagggagcagcagtgtgagaagtataatgcctacaattacactgacatggacgggaatctcctgcagtgggtccccaagtatgctggggtgtccccccgggaccgctgcaagttgttctgccgagcccgggggaggagcgagttcaaagtgttcgaggccaaggtgattgatggcaccctgtgtgggccagaaacactggccatctgtgtccgtggccagtgtgtcaaggccggctgtgaccatgtggtggactcgcctcggaagctggacaaatgcggggtgtgtgggggcaaaggcaactcctgcaggaaggtctccgggtccctcacccccaccaattatggctacaatgacattgtcaccatcccagctggtgccactaatattgacgtgaagcagcggagccacccgggtgtgcagaacgatgggaactacctggcgctgaagacggctgatgggcagtacctgctcaacggcaacctggccatctctgccatagagcaggacatcttggtgaaggggaccatcctgaagtacagcggctccatcgccaccctggagcgcctgcagagcttccggcccttgccagagcctctgacagtgcagctcctgacagtccctggcgaggtcttccccccaaaagtcaaatacaccttctttgttcctaatgacgtggactttagcatgcagagcagcaaagagagagcaaccaccaacatcatccagccgctgctccacgcacagtgggtgctgggggactggtctgagtgctctagcacctgcggggccggctggcagaggcgaactgtagagtgcagggacccctccggccaggcctctgccacctgcaacaaggctctgaaacccgaggatgccaagccctgcgaaagccagctgtgccccctgtgattcaggggggcaggggccagtcttgtgctcctggacatgcggtactgaggtgcagacaagggtctccactgtggtgactgggtcccttggccatatcaaggcagcacggcccacccaggcctcccattgccgcaacccctccagtactgcacaaattcctaagggggaagaggagagggtatggggcggcagaccctatcatcaactgtccagtggactggaccttgctcgggttcaagtagagggcataggttaaaaggtaaaagtgcacttattgactcagacaggacactcagcgtcagtctgtttgcaaaggactagcaaacttaaatgaaaaaaaaaaaattctatctggtttccccgataaataatctacctcacaggggaaaaaattagtacaagagaggcgtggggcagggagtcaatggtgaatgtcaaagcaggctccaaagctggaccccaagctgtcttcaagaatgaccacgactgtcttcagtgttaaaatccatcacctaaagggccgcagcgtcgcagggtttggagagccacatgttctcaggctgccacctgcaggggtggatccatttcaagtatttatgcaaatgtgtctctgaactaaagtgtgatcttatgcc

SEQ ID NO: 26851 - DNA, 4848 bp, Homo sapiens
  Clone ID: LIB4654-036-D4_FLI
gcggctccgagccaggggctattgcaaagccagggtgcgctaccggacggagaggggagagccctgagcagagtgagcaacatcgcagccaaggcggaggccgaagaggggcgccaggcaccaatctccgcgttgcctcagccccggaggcgccccagagcgcttcttgtcccagcagagccactctgcctgcgcctgcctctcagtgtctccaactttgcgctggaagaaaaacttcccgcgcgccggcagaactgcagcgcctcctcttagtgactccgggagcttcggctgtagccggctctgcgcgcccttccaacgaataatagaaattgttaattttaacaatccagagcaggccaacgaggctttgctctcccgacccgaactaaagctccctcgctccgtgcgctgctacgagcggtgtctcctggggctccaatgcagcgagctgtgcccgaggggttcggaaggcgcaagctgggcagcgacatggggaacgcggagcgggctccggggtctcggagctttgggcccgtacccacgctgctgctgctcgccgcggcgctactggccgtgtcggacgcactcgggcgcccctccgaggaggacgaggagctagtggtgccggagctggagcgcgccccgggacacgggaccacgcgcctccgcctgcacgcctttgaccagcagctggatctggagctgcggcccgacagcagctttttggcgcccggcttcacgctccagaacgtggggcgcaaatccgggtccgagacgccgcttccggaaaccgacctggcgcactgcttctactccggcaccgtgaatggcgatcccagctcggctgccgccctcagcctctgcgagggcgtgcgcggcgccttctacctgctgggggaggcgtatttcatccagccgctgcccgccgccagcgagcgcctcgccaccgccgccccaggggagaagccgccggcaccactacagttccacctcctgcggcggaatcggcagggcgacgtaggcggcacgtgcggggtggtggacgacgagccccggccgactgggaaagcggagaccgaagacgaggacgaagggactgagggcgaggacgaagggcctcagtggtcgccgcaggacccggcactgcaaggcgtaggacagcccacaggaactggaagcataagaaagaagcgatttgtgtccagtcaccgctatgtggaaaccatgcttgtggcagaccagtcgatggcagaattccacggcagtggtctaaagcattaccttctcacgttgttttcggtggcagccagattgtacaaacaccccagcattcgtaattcagttagcctggtggtggtgaagatcttggtcatccacgatgaacagaaggggccggaagtgacctccaatgctgccctcactctgcggaacttttgcaactggcagaagcagcacaacccacccagtgaccgggatgcagagcactatgacacagcaattcttttcaccagacaggacttgtgtgggtcccagacatgtgatactcttgggatggctgatgttggaactgtgtgtgatccgagcagaagctgctccgtcatagaagatgatggtttacaagctgccttcaccacagcccatgaattaggccacgtgtttaacatgccacatgatgatgcaaagcagtgtgccagccttaatggtgtgaaccaggattcccacatgatggcgtcaatgctttccaacctggaccacagccagccttggtctccttgcagtgcctacatgattacatcatttctggataatggtcatggggaatgtttgatggacaagcctcagaatccatacagctcccaggcgatctccctggcacctcgtacgatgccaaccggcagtgccagtttacatttggggaggactccaaacactgccctgatgcagccagcacatgtagcaccttgtggtgtaccggcacctctggtggggtgctggtgtgtcaaaccaaacacttcccgtgggcggatggcaccagctgtggagaagggaaatggtgtatcaacggcaagtgtgtgaacaaaaccgacagaaagcattttgatgtgagtttttctactgaaacacattcagaattgaaaagaacaaagtgatggtaaaagatatgataccaagttaaacatccccatccgtgtcctctagcaggaatgcgagatagcttatttttagaactgattctttgtcccatgtggctttctttgataccctaaaagttctctttagataattctaatgctgatgatttatgtctccatttagacgccttttcatggaagctggggaatgtgggggccttggggagactgttcgagaacgtgcggtggaggagtccagtacacgatgagggaatgtgacaacccagtcccaaagaatggagggaagtactgtgaaggcaaacgagtgcgctacagatcctgtaaccttgaggactgtccagacaataatggaaaaacctttagagaggaacaatgtgaagcacacaacgagttttcaaaagcttcctttgggagtgggcctgcggtggaatggattcccaagtacgctggcgtctcaccaaaggacaggtgcaagctcatctgccaagccaaaggcattggctacttcttcgttttgcagcccaaggttgtagatggtactccatgtagcccagattccacctctgtctgtgtgcaaggacagtgtgtaaaagctggttgtgatcgcatcatagactccaaaaagaagtttgataaatgtggtgtttgcgggggaaatggatctacttgtaaaaaaatatcaggatcagttactagtgcaaaacctggatatcatgatatcatcacaattccaactggagccaccaacatcgaagtgaaacagcggaaccagaggggatccaggaacaatggcagctttcttgccatcaaagctgctgatggcacatatattcttaatggtgactacactttgtccaccttagagcaagacattatgtacaaaggtgttgtcttgaggtacagcggctcctctgcggcattggaaagaattcgcagctttagccctctcaaagagcccttgaccatccaggttcttactgtgggcaatgcccttcgacctaaaattaaatacacctacttcgtaaagaagaagaaggaatctttcaatgctatccccactttttcagcatgggtcattgaagagtggggcgaatgttctaagtcatgtgaattgggttggcagagaagactggtagaatgccgagacattaatggacagcctgcttccgagtgtgcaaaggaagtgaagccagccagcaccagaccttgtgcagaccatccctgcccccagtggcagctgggggagtggtcatcatgttctaagacctgtgggaagggttacaaaaaaagaagcttgaagtgtctgtcccatgatggaggggtgttatctcatgagagctgtgatcctttaaagaaacctaaacatttcatagacttttgcacaatggcagaatgcagttaagtggtttaagtggtgttagctttgagggcaaggcaaagtgaggaagggctggtgcagggaaagcaagaaggctggagggatccagcgtatcttgccagtaaccagtgaggtgtatcagtaaggtgggattatgggggtagatagaaaaggagttgaatcatcagagtaaactgccagttgcaaatttgataggatagttagtgaggattattaacctctgagcagtgatatagcataataaagccccgggcattattattattatttcttttgttacatctattacaagtttagaaaaaacaaagcaattgtcaaaaaaagttagaactattacaacccctgtttcctggtacttatcaaatacttagtatcatgggggttgggaaatgaaaagtaggagaaaagtgagattttactaagacctgttttactttacctcactaacaatggggggagaaaggagtacaaataggatctttgaccagcactgtttatggctgctatggtttcagagaatgtttatacattatttctaccgagaattaaaacttcagattgttcaacatgagagaaaggctcagcaacgtgaaataacgcaaatggcttcctctttccttttttggaccatctcagtctttatttgtgtaattcattttgaggaaaaaacaactccatgtatttattcaagtgcattaaagtctacaatggaaaaaaagcagtgaagcattagatgctggtaaaagctagaggagacacaatgagcttagtacctccaacttcctttctttcctaccatgtaaccctgctttgggaatatggatgtaaagaagtaacttgtgtctcatgaaaatcagtacaatcacacaaggaggatgaaacgccggaacaaaaatgaggtgtgtagaacagggtcccacaggtttggggacattgagatcacttgtcttgtggtggggaggctgctgaggggtagcaggtccatctccagcagctggtccaacagtcgtatcctggtgaatgtctgttcagctcttctgtgagaatatgattttttccatatgtatatagtaaaatatgttactataaattacatgtactttataagtattggtttgggtgttccttccaagaaggactatagttagtaataaatgcctataataacatatttatttttatacatttatttctaatgaaaaaaacttttaaattatatcgcttttgtggaagtgcatataaaatagagtatttatacaatatatgttactagaaataaaagaacacttttgg

SEQ ID NO: 26852 - DNA, 4035 bp, Homo sapiens
  Clone ID: LIB4654-056-G4_FLI
gtgctagaggcgactcgggggattctagggcgacggcgctgccgccattttgtggggtgtttgtcgcagcggccgaggagggaagacggcagtttggcgacatttctcggccgaagggccatttgcttttgcggagatgcggcattccaaaagaactcactgtcctgattgggatagcagagaaagctggggacatgaaagctatcgtggaagtcacaagcggaagaggagatctcatagtagcacacaagagaacaggcattgtaaaccacatcaccagtttaaagaatctgattgtcattatttagaagcaaggtccttgaatgagcgagattatcgggaccggagatacgttgacgaatacaggaatgactactgtgaaggatatgttcctagacattatcacagagacattgaaagcgggtatcgaatccactgcagtaaatcttcagtccgcagcaggagaagcagtcctaaaaggaagcgcaatagacactgttcaagtcatcagtcacgttcggtatgattggttttgttttcaatttgagtggagttttatttgtgtgtactcttaacgagctgataagtttctaattttttatatatatatatataaaatactatttggatatattataattgtatttatattacttaaatccttaaaggaaacctccaaattcttgtagctgatctgtatatttattagctagccctcatttgcccacatttcctcatattctgcagaccagataatgagtttattgattttaataataaaactatttttttatttgtaacatattcttatgaaaaaatcatgcacccatatcttttctttcatcttaagcattttttttcttagaaaccctttatctggtacttgaaaataaatgtgaaatattgcactggtggacacctgaatgttactaacctgcatagagcatagttccatagtccagtgcatcattgtctgcaatgaattcttttgaagttgtgaaaatgggtgctgaatgggaaacatccaaaaagtctgcccccccctttttttttttttaacactcagacatcttcacctgcttgaacagtgaactttgaattagtttctccccaagttttcttcagtaaaactagtttttattagattgaacattgaaattaactagcctttattttccccttttattttaatcatgtatattttaaaatattgctaaattagaataatttcaaatagtcttgacattttaaaacatttttctgaaaaactagacatctcaattcacagcatatgctgtttatagcaagagataagtaaatcatgacattgcattctttaaatttcagacttcaattaaatcagtattttaaagagacaattgtgttgtttttttctattgccactttaagtatcttatctgaaaatctgttccttgccatgtttttcttctgtaacataaactgtgccctgtgaatttctggggactgaatttgaaattgctcctgccaactgttcgtggcctggtgcttatctgaatgcctgaatatctccccgctgaatgaattgcgtattctgccctgaattcactctgatatattgattggctggacgatcttggtgctgcccacttgccgttccagaagagccaccgaaggaaaagatccaggagtatagaggatgatgaggagggtcacctgatctgtcaaagtggagacgttctaagagcaagatgtatagaatatttttcaacactttttaaactttgcagaaagaataatctttttaagaatagtttgtcagcggggggctaaagaactcttcattgcttttttattttgctttttgtgggtttgtttgttcttttatatttcttcttttctgtagaatttaaatatttctattctaaagttccaaaataatcagtggaatttgagattagagcaagaaagatagctctatctaattgtttttgtagcagctgaaactaaaataatttgagtgctgaaaccttagttatgctttgttagagatcatttgaaaatattccacacttaagcattcattgtttgaagaactagacagtttgtactcaggtacttacacctctttttccctcctcactctagatgaaatcgtggacactttgggtgaaggagcctttggcaaagttgtagagtgcattgatcatggcatggatggcatgcatgtagcagtgaaaatcgtaaaaaatgtaggccgttaccgtgaagcagctcgttcagaaatccaagtattagagcacttaaatagtactgatcccaatagtgtcttccgatgtgtccagatgctagaatggtttgatcatcatggtcatgtttgtattgtgtttgaactactgggacttagtacttacgatttcattaaagaaaacagctttctgccatttcaaattgaccacatcaggcagatggcgtatcagatctgccagtcaataaattttttacatcataataaattaacccatacagatctgaagcctgaaaatattttgtttgtgaagtctgactatgtagtcaaatataattctaaaatgaaacgtgatgaacgcacactgaaaaacacagatatcaaagttgttgactttggaagtgcaacgtatgatgatgaacatcacagtactttggtgtctacccggcactacagagctcccgaggtcattttggctttaggttggtctcagccttgtgatgtttggagcataggttgcattcttattgaatattaccttggtttcacagtctttcagactcatgatagtaaagagcacctggcaatgatggaacgaatattaggacccataccacaacacatgattcagaaaacaagaaaacgcaagtattttcaccataaccagctagattgggatgaacacagttctgctggtagatatgttaggagacgctgcaaaccgttgaaggaatttatgctttgtcatgatgaagaacatgagaaactgtttgacctggttcgaagaatgttagaatatgatccaactcaaagaattaccttggatgaagcattgcagcatcctttctttgacttattaaaaaagaaatgaaatgggaatcagtggtcttactatatacttctctagaagagattacttaagactgtgtcagtcaactaaacattctaatatttttgtaaacattaaattattttgtacagttaagtgtaaatattgtatgttttgtatcaatagcataattaacttgttaagcaagtatggtcttgataatgcattagaaaaattaaaattaatttttctttttgaaattaccatttttaaatacctttgaaatatcctttgtgtccagtgataaatgtgattgatcttgccttttgtacatggaggtcacctctgaagtgattttttttgagtaaaaggaaatcttgactactttatattcttaaaggaatattctttatatacttcaaatttagaacttaactttaaaagtttttcttctgtaattgttgaacgggtgattattattaactctagataagcaggtactagaaaccaaaactcagaaaatgtttactgttagaattctattaaattttaagtgttgtattctttttcattgggtgatgtcagggtgataaccagacattcatggaaaggcatgcagtttgtccattgtgacagtttgtttaataaaaccacatacacactttatttaagattaaaatctaactggaaagtcagcttggaaaatggacatttccaagtatgtttggtgagtcacagatataaaaatagaaattctgatgagaggtttcagtttttaataccaagtccttaggagtcttaacattggccagcatctgtttatcaaatgacataaatacgtaaacctataagaattaagtttattaattaggcaatttatgtctgtgataattcttacgggagaaagaggatttgattggaaagcagtttgggaagaaagtgctgctgaaatttccagaatttaattgattggttacat

SEQ ID NO: 26853 - DNA, 950 bp, Zea mays
  Clone ID: LIB4667-022-C7_FLI
ctcgaggccggccgggagcaatcaccccaaatcctagggttctagtcgcttctcgtcgtttcgttcgtaggtgcgcccctctcatctgcactaaacctgagtcctgattagggttctacataatcgcttctctttgcctgattgatttgataccctacatccgtggtcgccggttcttccggattagccggatctgttggtctccggttcgtgtgtgctgtaccggatttgggatcacagagacaatggtgaaggcagttgctgtcctcgccggcactgatgtcaagggcaccatcttcttttcacaggagggggatggtccgaccaccgtgactggaagtatctctggcctcaagccagggctccatgggttccatgtgcacgcgcttggcgacgccaccaacggctgcatgtcgactgggccacacttcaatcctgttggcaaggagcatggcgcaccggaagatgaggaccgccatgccggtgatcttgggaatgtgacagcgggagaagatggtgttgttaatgtcaatattactgacagccagatacctcttgctggaccccactcgatcattggccgagctgttgttgtccatgctgatccggatgatcttggcaaaggtggacatgagcttagcaagagcacgggaaatgctggcggacgtgttgcctgtggtatcattgggctccaaggctaaagcagttaacctccgaggcaaacaccatagaaggtcgaagcgagcacctcaggatgttgctgttccatttcccctgtattggcaacacaatttgagtactccaaataagcgcctgatccatgatcagagagcactattcatgccattctgtatatgaacaatgttgcgcacctgcttaagtgtctgttccaacaaatgcttaagaagacactactggaggtgtactatggagtactaccagcagcatcc

SEQ ID NO: 26854 - DNA, 1365 bp, Zea mays
  Clone ID: LIB4667-022-C9_FLI
ctcgaggccggccgggaccacctgttctagttctagtgatcagaggggagggaaggggaggtgaacggagggagcggaggaagatctcgggctctcagagctgcatcctgaacccatcgcgtaggaaggggcaaaggagtcggagctgatccggcagtcgctctctctcggattgagtacgatttgacgcatttgcggccgagctttcttgcacccaagatgagtgggcatggtgacactgcgacctcagctaagatggcgaaactgaaggagttgttgcaaaagagtgaaaaccacatttgtgctgactgtggtgcatctgatcccaaatgggcatcagctaatattggggtattcatttgcgtaaaatgttctggcgtccatagaagtctcggtacacatatttcaaaggttctgtcagtgacactggacaagtggtctgacagtgaagttgactccatgatagaagttggtgggaattctcaggcaaacgcagtatatgaggcttttataccagagggctaccagaagccacattcagattctacccaggaagagcgagaaaaattcatcaggtctaaatatgagctgcaggaatttctgaagccaagcttgcgcattgtttctcatcagcctagtgactctggaaaacatgccggaaatgcttctcattctgatggttccaagagtcaagtcggcatgatcgagttcattggaatattgaatgtcaaggtgattggaggcaccaacctagccatcagggatatgtcaagcagtgacccttatgtcgtcctgacacttgggcaacagaaggcacaaacttcagtaatcaatggcaacctgaatcctgtctggaatgaagaactgaagctctctgttccccagcaatatggacctctgaagctgcaagtgttcgatcatgacatggtgtccaaggacgacctcatgggtgaggccgagatcgacctgcagacaatgatcaacgctgccgcagcatttggcgacccggagctgctgggcgacattcagatcggccggtggctcaagtccgaggataacgctctcgtcagggacagcgccgtggtggtctctggtggcaaggtgaagcaagggatggcactgaagctgcagcacaccgagtccggcgagctggagttggagatggagtggatgccgcttaacgtgtagaaatctgctcaagttgccacctttataatgggtgtgggatacaaagaatttgttttgcttttgttgccaagagaaattgttatattttggtaattggcaagggctctcttcaaaataaagatctgaatcgctaaaaggtgtgttgtggatactaaaatttgagagatgattcacaag

SEQ ID NO: 26855 - DNA, 2639 bp, Homo sapiens
  Clone ID: LIB4676-011-A2_FLI
gggaggtgccagaagttgagccctgaggccctgctggcccctgggcgcaggcccagctcaggcccccagggatggacgtcgtggaccctgacattttcaatagagacccccgggaccactatgacctgctacagcggctgggtggcggcacgtatggggaagtctttaaggctcgagacaaggtgtcaggggacctggtggcactgaagatggtgaagatggagcctgatgatgatgtctccacccttcagaaggaaatcctcatattgaaaacttgccggcacgccaacatcgtggcctaccatgggagttatctctggttgcagaaactctggatctgcatggaattctgtggggctggttctctccaggacatctaccaagtgacaggctccctgtcagagctccagattagctatgtctgccgggaagtgctccagggactggcctatttgcactcacagaagaagatacacagggacatcaagggagctaacatcctcatcaatgatgctggggaggtcagattggctgactttggcatctcggcccagattggggctacactggccagacgcctctctttcattgggacaccctactggatggctccggaagtggcagctgtggccctgaagggaggatacaatgagctgtgtgacatctggtccctgggcatcacggccatcgaactggccgagctacagccaccgctctttgatgtgcaccctctcagagttctcttcctcatgaccaagagtggctaccagcctccccgactgaaggaaaaaggcaaatggtcggctgccttccacaacttcatcaaagtcactctgactaagagtcccaagaaacgacccagcgccaccaagatgctcagtcatcaactggtatcccagcctgggctgaatcgaggcctgatcctggatcttcttgacaaactgaagaatcccgggaaaggaccctccattggggacattgaggatgaggagcccgagctaccccctgctatccctcggcggatcagatccacccaccgctccagctctctggggatcccagatgcagactgctgtcggcggcacatggagttcaggaagctccgaggaatggagaccagacccccagccaacaccgctcgcctacagcctcctcgagacctcaggagcagcagccccaggaagcaactgtcagagtcgtctgacgatgactatgacgacgtggacatccccacccctgcagaggacacacctcctccacttccccccaagcccaagttccgttctccatcagacgagggtcctgggagcatgggggatgatgggcagctgagcccgggggtgctggtccggtgtgccagtgggcccccaccaaacagcccccgtcctgggcctcccccatccaccagcagcccccacctcaccgcccattcagaaccctcactctggaacccaccctcccgggagcttgacaagcccccacttctgccccccaagaaggaaaagatgaagagaaagggatgtgcccttctcgtaaagttgttcaatggctgccccctccggatccacagcacggccgcctggacacatccctccaccaaggaccagcacctgctcctgggggcagaggaaggcatcttcatcctgaaccggaatgaccaggaggccacgctggaaatgctctttcctagccggactacgtgggtgtactccatcaacaacgttctcatgtctctctcaggaaagaccccccacctgtattctcatagcatccttggcctgctggaacggaaagagaccagagcaggaaaccccatcgctcacattagcccccaccgcctactggcaaggaagaacatggtttccaccaagatccaggacaccaaaggctgccgggcgtgctgtgtggcggagggtgcgagctctgggggcccgttcctgtgcggtgcattggagacgtccgttgtcctgcttcagtggtaccagcccatgaacaaattcctgcttgtccggcaggtgctgttcccactgccgacgcctctgtccgtgttcgcgctgctgaccgggccaggctctgagctgcccgctgtgtgcatcggcgtgagccccgggcggccggggaagtcggtgctcttccacacggtgtgctttggcgcgctctcttgctggctgggcgagatgagcaccgagcacaggggacccgtgcaggtgacccaggtagaggaagatatggtgatggtgttgatggatggctctgtgaagctggtgaccccggaggggtccccagtccggggacttcgcacacctgagatccccatgaccgaagcggtggaggccgtggctatggttggaggtcagcttcaggccttctggaagcatggagtgcaggtgtgggctctaggctcggatcagctgctacaggagctgagagaccctaccctcactttccgtctgcttggctcccccaggcctgtagtggtggagacacgcccagtggatgatcctactgctcccagcaacctctacatccaggaatgagtccctaggggggtgtcaggaactagtccttgcaccccctcccccatagacacactagtggtcatggcatgtcctcatctcccaataaacatgactttagcc

SEQ ID NO: 26856 - DNA, 1662 bp, Zea mays
  Clone ID: LIB4701-004-F4_FLI
tcgaggccggccgggctggggcctggggcgccgaggacggcggcggcgaggagcgtccgccgcggcgacaacgcttcgtattccgcatcgcagtttgttgaccggattggctggatgggccgaaccaggtcaagtggagatggagagagtcctggtgtggtgcgggccgcaagtgtgagtgagacgtcaccatcgaatcccaccacaaaagctcctttcgtcacaccggccagcacccagcttctcctctcctcacccccacgccccaccccaccaaacaatggcgccggcggcgacttccacagcctctgcgccctcctccttccactccaccggtaggcatagggccagggtcggggcccggccatcgctcgtctctctccgcgtcagagcagccaatcccaacgttaccgccgatcccgcaccggccttccagtccgtcacggccttcgcgccagccaccgtcgccaacctcggcccgggcttcgacttcctcggatgcgccgtcgccgacgcctccctctccctgggtgacaccgtcaccgcaaccctggacccgtcactcccgcccgccaccgtctccatcgcctccgtcacatccccgtcccgccccaacctcgccgagcgcctctctagggacccgctccgcaactgcgcgggcgtcgccgccatcgccgcgctccgcgccctcggcgtccgctcccacgccgtgtccatccacctcaccaagggcctgccgctcggctcggggctcggctcctccgcggcctccgccgccgccgccgccaaggccgtcgacgccctcttcggctcgcgcctcggccgcgacgacctcgtcctcgcggggctcgagtcggagaaggccgtcagcggcttccacgccgacaacatcgcccccgccatcctcggcggcttcgtcctcgtccgcagctacgacccctttcacctcgtcccgctttccttcccgccagcgctccgcctccacttcgtcctggtcacccccgacttcgaggcgcccacgagcaagatgcgcgccgcgctgcccaggcaggtcgacgtccagcagcacgtgcgcaactccagccaggcagcggcgctcgtggcggcggtgctgcagggggacgcgggcctcatcggctccgcgatgtcgtccgacggcatcgtggagcccaccagggcacccctcatacctggcatggcggccgtaaaggcggcggccctgcaagctggagcgctgggctgcacaattagcggcgcgggccccacagcggtggccgtcatccaaggggaggaaaggggggaggaggttgcccgcaggatggtggacgcgttctggagcgcaggcaagctcaaggcgacagcaaccgtcgcgcagctcgatacccttggtgccagggtcatcgccacgtcatccttgaactagcaaaagattcggaaagtggtactgcaattgtatcaccaaacaaggaagaatgaaggggaaccccatggatttgtatgttttctcttctttcttgcatctttaggtggttaattggctttggaataagtgagatggaggacatcgctagaacaattctgttccgtgggctgtaatttcaatttgggctggtttcttcatcatgccatggataattatgaataaatttgaggtagtttgtg

SEQ ID NO: 26857 - DNA, 2072 bp, Zea mays
  Clone ID: LIB4704-005-D11_FLI
aagaacaaccaccacactcgcctccctccctccccgcccacactccaccacccgcgccccgccgcccgccccgccgccgcctcctacttcgcctcggccgcctcggatccggaccgagcgccggccatggcgctcgccttcgacgagttcgggcgccccttcatcatcctgcgggagcaggagaagaagacgcgcctgcgggggctcgacgcgcagaaggccaacatcggcgcgggcaaggccgtcgcgcggatcctccgcacctcgctcggccccaagggcgcggacaagatgctccagtcccccgacggcgacgtcatcatcacaaatgatggggcgaccatcctggagcagatggatgttgacaaccagatcgcaaagctgatggtggagctgtcccgtagtcaagactacgaaatcggggatggtaccaccggtgtggtagtcatggcaggggcgctccttgagcaggccgagaagcttttagaacgtggtattcaccccattagggttgctgaaggctatgagatggcgtcaaaggtagcttttgatcacctagaacgaatctccgaaaagtttgagttcagtgcagacaacattgagcccctggttcagacatgcatgacaactctatcctcaaagattgttaaccgttgcaagcgggcattggcagagattgctgtcaaagcagtacttgcggtcgcagatttggagaggaaggatgttaacttggatttaattaaagtagaaggcaaggttggtgggaagctggaggacaccgagcttgtatatggaattattgttgacaaagatatgagccatccacaaatgccaaagagaattgaggatgctaagattgccatcctgacatgcccatttgagccaccgaagcctaagaccaagcataaggttgacattgatactgtcgagaaattccagacactgcgtgagcaagagcagaaatacttcgatgaaatggttcagaagtgcaaagatgctggtgcaaccctggttatttgtcagtggggttttgatggtgaagccaatctttgttgatgcatagaaagctgccagctgtcagatgggttggtggtgttgaattggaattgattgccattgcaacaggaggacgaattgttccgagattccaagagttgagtcctgaaaagcttgggaaggctggattagtcagagagaaatcattcggaacaacaaaggacaggatgctttacattgagcagtgtgccaattccagagctgtaactatcttcattcgtggtggaaacaaaatgatgattgaggagaccaagcgcagtcttcatgatgctctttgtgtggcaaggaatctgatccggaacaactcaatcgtgtacggcggtggctcagcagagatatcttgctcaattgctgtcgaaactgctgcagatcggcaccctggagttgagcagtacgctatcaggtcattcgctgatgcattagacgctgttccactagccttggctgaaaacagtggtttgtcaccaattgataccttgaccgcggtaaaagctcagcaagttaaggagagcaacccccactgcggcatagactgcaacgatgtaggcaccaacgacatgaaagagcagaacgtctttgagaccctgattggcaagcagcagcagatcctgctagcaactcaggtggtgaagatgatcctgaagatcgacgacgtcatctcaccgtccgagtactgatgaagcctgaaggaaggaggaaaaaaagagaggaacaggtggctatgctggatgagagtttagtaggcagcattgctgatgtgttgattggtttactccttgttcaggcgtgctccttgtatcttatgagctgcctagcacctttttgtgtgagggattgtttgtattgcacgatattgcatcgaggaatacgtatggacgtgttgtcaagaccctaggcaattctcttcagggctgtgagatagttggggtactgctaccttttttttgtattgttttcatttcaccacttagctgaagctgtcctttttgttttatgaatgctgcaatagtttggcg

SEQ ID NO: 26858 - DNA, 1808 bp, Zea mays
  Clone ID: LIB4704-005-E4_FLI
gagacatatatgcaccacgcacgcgcgggcaccacagctagtagagcctgcctacctccccactgtcgtcattaattcaccaggctagagctagctctaccgccgttccccgatcgagcgtccgtcatggagattgatgagatggagagtggtgtcgtcaatggaagcggcggcggcggcggcgggtcgttccggcgggcgaggtgctgggagctgctgtgctcggcggcgggcaaggtcgtcgggttcgcccgcaagctgggcaggatcgcgagggacgacccccggcgggtggcgcactccatcaaggtcggcctggcgctcacgctcgtgtccgtgctctactacgtcaggccgctcttcaacaactggggggtctccaccatgtgggccgtgctcaccgtcgtcgtcgtcatggagtacaccgtcggtggcacgctgagcaaaggcctgaacagagcgtgcgggacgctggccgccggcttcatcgccgtcggggctcacaaggtggcctacctgtgcggcgacaaggccgagcccgtgctgctcgccgtcttcgtcttcttgctctcgtcggcggcgacgttctcgcggttcatcccggaggtgaaggcgcggtacgactacggcgtgaccatcttcatcctcaccttcagcctggtggccgtgtccagctaccgcgtcgacgagctcatccgcctcgcccaccagcgcttctccaccatcgtcgtcggcgtcggcacatgcctctgcaccaccgtcttcgtcttcccggtctgggccggggaggacctccacaggctcgccatcggaaacctcaacaagctggccgagttctttgaaggactcgagtctgaatgcttcagagagaacgccacgttcgagaacttggaagcaaaacccttcctccaagtgtacaagagcgtcctcaattccaaggccaccgaagactctttgtgcaattttgccaagtgggagccctgccatggcaagttcaagttccggcacccatggagccagtaccagaagctcggcgctctctctcgccagtgcgcttcctcaatggaggctctcgcttcctacgtcatcaccctcacaagaaccgagtaccctgaagcgcggcccgagctacgctcggaggttcgaacagcgtgccgccagatgagcctgcactcggccaaggcgctccgcgagctctcggcggcgatgcggacgatggccgtgccgccgtccccggccaacgctcacatgtccgcggcagccaaagcggccaaggacctcagggtcgagctagaggacgcggacctggcgcaggcgatgcacgtcgctgttgtcgcgtctctgctctcggacctggtgaccaaggcgaagcagatcacggaatctgtcggtacccttgcgcgacttgcccgcttcgtcaagaacaacaaccatgagaacaacgctgacgacaaggatattgcggctatcgatgcagtgagctgagaaagctagcagacggtcttgtggcggcaaaaatatatcctaattaaccgtgcatccagacgttcatagctatctaattcgcacatatcgaaatcgaagatgggtacattttacatagggtaccctttttacataaaaccacatcaggcgatatgcctgtatgcgaatcggatggctctgaacgtctagatgcatagttgcacagggtaatatgagtgcacaatatatatgtgttgccggcaatcttttcggtgggacttgactagtgatgaaatatttggcgtggtggggaatacatgtatcagaagcctttgctaaatgcg

SEQ ID NO: 26859 - DNA, 1135 bp, Zea mays
  Clone ID: LIB4719-003-H5_FLI
ctcgaggccggccgggttttagttcagtttaccattcgtcgattcgagttccgctcgccttcgtcttcgtctcggcccacggcccacggtccatcagcgctcgtcctcccttcctccctctagcgcctgctgcctctctcactccatggcgtggatctggatggtcctcgcggcgggagccgtgctcctgtgggcgatctctttgggtcgggtcctctcctgcgccgcgccgtcctgtgtgcccccgagcccgcagttcatgccccctctcagcggtgacaggaggagccgaaacgtgctgctggtcgtcgcccaccctgacgacgagtccatgttcttcgctccaaccattcttttcctcaagtcgaaaggccacagtattcacattctgtgcatgtctcgaggtaatgctgatggtctgggagatactcgtaaggaagaattgtaccatgcctgtgtcagcctcaagattccacatgaacaagtcaaagtcttggaccacccaaaattgcaggatggatttcatgagaaatgggaccatggactagtagcagaacttaccatggagcatgtccaactgtgggccattgacacgattgttacatttgattcatatggagtatcaggccatccaaaccacaaagatgttcatcacggcatatgcaagtttctccatacgaacaagcaagggaacgtggaagcttgggaactagcaagtctcagtattcttcgcaagtacagtggtccgattgacatttggctttcttcattgacgtccttcgcaaggtcaaaacagccaatctatactctagttaacagtagcccgtccaaaagctatgaggcaatggctgcacacagaagtcagtgggtttggtttagaagattgtttgtcatgttctcgagttatacatacataaatatgctacggagaatttaacatgtgatgtggcgtcataccagagcaagccgccattgtcgtctccaatgttgtacttgtgcatcgtcaattgtacatctatatgtatcaatggattttagttgtacattctctataggcagtgctcatagggtgactgtagaatttcttatccccaattcagaattgcactgaatggctgaaatacagttgtctttt

SEQ ID NO: 26860 - DNA, 1130 bp, Zea mays
  Clone ID: LIB4719-003-H8_FLI
cctcgaggccggccccgcctacgccccctcccgccgccgcacgatgagcacttctcccgccgccgccgacgtttcgcctttgccgcctactgctgccgccgacgaggccgcgcgggcgacagagacggtggtggtcgatgagagggtcgcctcacacgtggacccgttcctcgtcgaggcgctcgacaaccctcgtcaccgtctcatggttctacggatggaactggatatacaaaactttatgcagaaccctcagctgcaggagtttgaattccagaactttccgacttcttacctccgctgtgctgctcatcgtgttgcacaacattatggcttagagactatagtagcagatagtttagtagaaggctcagttagcaggattgttgcaagaaaaacagcagaaagcaggcccaaagcattccaaaatggaagcgctgattctagaaacaagagtggtgtaccaaaaactgttgatgagagaatagaggaatataataaagcacgagcacgcatcttcaatggttccatttctgcagattctgatgctgcaagtattatgggaactctttctactggcaaagatgaaccagtaaatgttgacccttctgttgatgaaatcaaagtcagcacaatgaacagtcgttccagagttgctgtttttaaggatactgaaaaggatcgtagtgacccagactacgatcgaaactacaaaagtttatgcagtatggcattggttatgtgcaatctcctggcatgtccacaaaccagcatactatgtactttggccagcctgatctaacaatagggtcttctagagctgctgtttatcgacattggccaaccccaacaatgatgtatccccattgctatgataatgttagtccaatgatgtctcaggttcctctgtaccagtctttcaaccatgattaggagattctgcttgctggaaagttgggaacaattctctgttgaacttgctatgttgtgttgtcctatgttaagtggagttcctttagattcgagccgtttttattacaaaaaattgtataaggagtcctaattcgttgaaactatttcgtgaactagtctggaactgtgatgcttgtctaatgtctagttctcgtttg

SEQ ID NO: 26861 - DNA, 996 bp, Zea mays
  Clone ID: LIB4719-003-H9_FLI
gggagcgcccgtcgcctccctttccccttccctccctccctctccccgcgggccgccagaggcaatttcgccctcgattcgaccccgattcgtccgcccgcgaccgggattccctccgccaagcgcggatctgaacgctgcgctccgtgtcgccgctcgaatccgccatgaagggggccaaatccaagggcgccgccaaggccgatgccaagctggcggtgaagagcaagggggcggagaagcccgccaagggcaggaaagggaaggccggcaaggaccccaacaagcctaagagggctcccagcgctttcttcgtgttcatggaggaatttcgcaaggagttcaaggagaagaaccctaagaacaagtctgtcgctgcggtggggaaagctgctggcgacaggtggaaatccctgagcgagtcggacaaggctccctatgtagccaaggctaacaagctcaagctcgagtacaacaaggccatcgctgcctacaacaagggcgagagcactgcagctaagagggctcctgccaaggaggaagaggaggaagatgaagaggagtctgacaagtccaagtcggaggtcaatgacgaggatgatgaagagggtagtgaggaggatgaagatgatgacgagtgatggagctcctcgagacaatggaccgtgcttcatccaacaatggagcggctacacaaggccccgtggcgatcacaaaaaaggagcctatatccatgtactagaattattcagtttcactccacatcgtgatgttttatttttacttttgtcgtgctataacggatagcgctcctcgttggcgccactggcgggtggttctgcctctggtctggtgtgtttgtgtgtggtcacacttgccagccagcagaggcgcctgcttgtacctagattactgtttccattgtcgtcatcatcggctaacattgtcataatgtcagtttgggtaatgttagattaagtaattattgtgttcaag

SEQ ID NO: 26862 - DNA, 1189 bp, Zea mays
  Clone ID: LIB4720-002-F3_FLI
tatctggcttcggctgccgtcgcctccctccccgccctgcgcaacccctcctcgccgcgccgtcaagacgcctgtcttcttctcatctcgtcggcgctcgtcctccctccctccctcccccaggtcctgcttcctccccatggcgtggatctggatggtcctcgcggcgggagccgtgctcctgtgggcgatctctctgggaaggatcttctcctccgccgcgccgtcctgtgtgcccctgagcccgcagttcatgccccctctccgcggcgacaggaggacccggaacgtgatgctcgtcgtcgcccaccccgacgacgagtccatgttctttgctccaactatccttttcctcaagtcaaaaggtcacaacattcacattctgtgcatgtctcgaggtaatgctgatggtctcggagatactcgtaaataagaattgtaccatgcctgtgaaacccttaagattccacatgaacaagttgaagtcttggaccacccgaaattgcaggatggatttcatgagaaatgggaccatgaactagtatcagaacttgtcatggagcatgtccaactatgggtcattgacatgattgtgacatttgattcatatggagtatcgggccacccaaaccacagagatgttcattacggcatatgcaagtttctccatgcgaataggcaaggaaatgttgaagcttgggaactagcaagcctgaatattcttcgcaagtacagtggtccggttgacatttggctttcttcgctgatctccgtctcaaggtcaaagcagtcaatctatactctagttaacagtagcccgcccagaagctatgaggcaatggctgcacacagaagtcagtgggtttggtttagaagagtgttcgtcatgctctcaagttatacctacataaacatgctacagaaaatttagcacgtgatacgacgtcatatcagagcgagccgccattgtcgtctccaatgtcgtacttgtgcgttgtcaattgtatatttgtactgtatgtatcaatgattttataggcagtgctcatagggtgactgtacggcttcttgttcccaattctctaccatagtatatttgtaagttcttgggtgtggtcaaacgatttctggttcgatttaacgtccttgacgaactgacctgctaactaatcaatccttccgttctatg

SEQ ID NO: 26863 - DNA, 1060 bp, Zea mays
  Clone ID: LIB4720-002-G8_FLI
tcgaggccggccgggcgccgccacgttcgccaaggtgcccgcgctgaacgggatcttccgccaggcggttcgggcgctgcacgcccaagtgcgcatcgagctcaacgcgcctgtgaaattggggaagaaggatgccggtcaaaccggtgagggaaaggaggaggcattggtggtgctggccacacagctcgctagagcagtgcaggcactgtgcaggttgagtgtcgcccgggcaaggctctgtgccgagagatttgctgatgctgagcttcgggataagcttactgctggcattagcgtcgatgatttgagggggatgcttgacaaggttttgattgattcagatgcagtgtcagtcttgaagggggtgtacaaccacttgctcaagttcagggactttctctcctgggaagcagctatggccatggcagtaattgaaacagacagttcagttgagaagccgcaatctgctgttgacaacgaagcagctggttcaagtgaaaaggcacaggctggtggggacaaagcaaagggtgacaagaagagcaagaagaagaaaactttggggaagggtacatctgctgtgctgatgctgcttagggaccatgtgacaaatggaagtactgttgcttccgtgaattctgtgcttgttgcagagtgggcagcctctctctcattgctctttgatcctaaatgtcccggattggtgtcccttgtggagaaagtgaaggagattgttgagagcaatgaagtcaggagattgcctaaaattcctaaggtgataatcatattgttcgcagacggcgctgttttatttatatggtctaattagtggtacccatattgtaatgctgttccctttcctcacttttctaaatgtttgtgcttactcctgttagggtacacgtgactttgggaaagagcaaatggcgataagagagcgagcattttcaattataactagtgtattcaagatgcacggtgctactgcacttgatacccctgtatttgagctgagagaaacccttatgggaaaatatggtgaagactcaaaattgat

SEQ ID NO: 26864 - DNA, 1024 bp, Zea mays
  Clone ID: LIB4720-003-A9_FLI
ggccggccggggctccggacgcagagacgcgcgccccggcaacgattcgtaccgcggcgaccgtgtgtagcgaggaaatttctggaccttgatgcattgctatcacatgcttatgatacatgcaaggccggtttgaagacaaaacacttggggtttcacaaagcactgtgtgttctgatggggtggaattggcatgttgctccagacacatctaaatcacatcactccattccatctgaggaagtaaatgccatgaggggagacctcatgctgtggcctccagttgttgtgatacataacagctcgactggtcatgaggcaaaggatactgatgcaaagattgtgtccatagaagaaatcgaaggtgtattggcagatattggggtagcgcatgagaaggctagggttagccatggaagatcagccaatcagagcgtgttcctggtgaagttccagccaacaatatctgggttccaagaagccatgagagtgcatacccatttctccaccagaaaccatggcaaggaagagttccagctgatgaaaggcagcaaaggtaagaaggctacctccactgatagcctggaagagctgctgtatgcgcatattggggtcgtggaagacctggggctgctggatgagggaacaaagaagagatgcaaggtcatgaggaagaaggaaattgaggcaaatgcagaggcaacactgaatttagaagtttattaggtctagtactaggatccgaaccatttgaagtggtcctcttttgcttcatcttgcagctgcttgcttgtccttgcggctgtaacgtcaaaagaagaaaaaaagtgtaaattctgcttttgccattaaagagtgacgaaactcagttggcttctgtctgctggggaaggcctgcctcggtttgcatggcatggcaaggacataattttgtggctagatggggacaccttaacggcaaaagcagaattacctggtcgaagaaccgagtttaatcttttattatggaatcccttcttttttg

SEQ ID NO: 26865 - DNA, 801 bp, Zea mays
  Clone ID: LIB4720-003-G10_FLI
ggccggccaggactcttcctgtctcctcgtcttgctggagccagtattaacagatccgggttcgagcgtccagtctcgccggacctccgactggcggtcgctgctatctctctggtaccgcggtctcttgcgcgcttctctccattcgctcccactcaccggcttgggggaatgaagaatgtggtagggagcccggggacctggagtggcatggcgctgcggttgtcgcaatgcgtgtccgctggcgcatccatgggcgctatggccacagcgtacggcttctccaactacactgctttctgctacttgattgcttcaatgggcctacaacttctttggagttttggccttgcttgtcttgatgtctactctttggagactaaaagagatcttcacaaccctgtgcttgtaagcctttttgttgttggggactgggtcactgcaattctgtcgtttgctgccgcgtcggcgtccgcgggcgtgaccatcctgttcgagagggacgtccacttctgcaggatgtacccgcagttgtcgtgcggccggtacgcgctctcggtggtgctggcgttcatcacctggtccttcatcgcaacttctgctgtctccatgttctggttgctgccgtcgctctgatgtggcacggaaggagcctgccgtgtcgtcctgtttagatccgtttgcttcagcagctggttgatgccctgggtcgctctgggttgtgtgcttaagtaactatcaggatcctgatcttaaccggatgtactctgctggagacgagaaattatctagtgtatttgt

SEQ ID NO: 26866 - DNA, 1805 bp, Zea mays
  Clone ID: LIB4721-012-G8_FLI
ctcgaggccggccgggagccaaaacacgcttctcccttcccatcttttcctttcctctccctcgtctcgtctcgtcttcgttcccctttcctcctgcgcaccccgtcttctcctcaccgcgtcaaaccccagcacaaatcaaccgcccgccgcctccgctcccctcccgtcccgaatcagccgctgcggtgcccaatccggccgatcccccctcctatccgccgcagaggcggcgcctctgggcctaccccgatgtatagcaacttcaaggagcaggcgatcgagtacgtcaagcaggcggtccaggaggacaatgccggcaactacgtcaaggcgttccctctctacatgaacgcgctcgagtacttcaagacccatctcaagtacgagaagaaccccaagatcaaggaggccatcaccgccaagttcaccgagtacctccgccgcgccgaggagatccgggccgtcctcgacgagggcggcgcggggccgggggccaacggaggtgacgcagccgtcgccacgcgccccaagaccaagggcaaggacggcgacgggggcaacggaggggatgactccgagcagtccaagctcagggcggggctcaactctgccatcatcaccgagaagcccaacgtcaagtggaacgacgttgctggcctcgagagcgccaagcaagctctgcaggaggccgtcatattgccggtcaagttcccacagttcttcacgggcaagcggaggccttggagggcgtttcttttatatggccctcctggaacaggaaagtcttacttggcaaaagccgtcgcaaccgaggctgattcaacatttttcagtatatcttcttcagatctggtttcaaagtggatgggtgaaagcgagaaattagccgcaaatcttttccaaatggctcgtgaaaatgccccttccattatctttattgatgaaattgattctttatgcggtcaacgtggagaaggtaatgaaagtgaagcatctaggaggattaagactgaacttcttgtgcaaatgcagggtgttggtcataatgatgataaagttcttgttcttgctgccacgaatacgccatatgctctggaccaggctgtgcggcgaagatttgacaagcgtatctacattccgctacctgacacgaaagcaaggcagcatatgtttaaggtccatctcggggatacactacacagtttaactgaaagcgatttcgagagcttggcccgtcgaacagatggattttctggttctgatgttgctgtttgtgttaaggatgtcttatttgaacctgtgcgcaaaacacaggatgccatgttcttcttcaaggcagacggtgacatgtggatgccatgtggaccaaaacaaccggggtctgtacagaccacaatgcaggagcttgcatccaagggcctcgctgcaaagatccttccaccacctatctcaaggacggattttgagaaggtcttgtcgaggcagaggccgacagttagcaagaaggatctggaggtgcatgagaggttcactaaggagttcggcgaggagggctgatacaccgcgcgcggacacacacccatgcacagctgcaccacagaaatgtatattgtttatcacttcgattgttctgcttggaagttgcattcacaggattgtacatttggtagcccaactatgagtaatcatggcagctgctttaccgtgttgggctaccgatgggcctctgttgtcaacttatttcaatttttatttatgcacatgaaaattttccgcaggtgtattattgaataataattctt

SEQ ID NO: 26867 - DNA, 2895 bp, Homo sapiens
  Clone ID: LIB4654-060-E3_FLI
gccgaagcggctgcatctggcgccgcgtctgccccgcgtgctcggagcggattctgcccgccgtccccggagccctcggcgccccgctgagcccgcgatcacttcctccctgtgaccaaccggcgctgcaggttagagcctggcaatgccgtttgggtgtgtgactctgggcgacaagaagaactataaccagccatcggaggtgactgacagatatgatttgggacaggtcatcaagactgaggagttttgtgaaatcttccgggccaaggacaagacgacaggcaagctgcacacctgcaagaagttccagaagcgggacggccgcaaggtgcggaaagctgccaagaacgagataggcatcctcaagatggtgaagcatcccaacatcctacagctggtggatgtgtttgtgacccgcaaggagtactttatcttcctggagctggccacggggagggaggtgtttgactggatcctggaccagggctactactcggagcgagacacaagcaacgtggtacggcaagtcctggaggccgtggcctatttgcactcactcaagatcgtgcacaggaatctcaagctggagaacctggtttactacaaccggctgaagaactcgaagattgtcatcagtgacttccatctggctaagctagaaaatggcctcatcaaggagccctgtgggacccccgagtatctggccccagaggtggtaggccggcagcggtatggacgccctgtggactgctgggccattggagtcatcatgtacatcctgctttcaggcaatccacctttctatgaggaggtggaagaagatgattatgagaaccatgataagaatctcttccgcaagatcctggctggtgactatgagtttgactctccatattgggatgatatttcgcaggcagccaaagacctggtcacaaggctgatggaggtggagcaagaccagcggatcactgcagaagaggccatctcccatgagtggatttctggcaatgctgcttctgataagaacatcaaggatggtgtctgtgcccagattgaaaagaactttgccagggccaagtggaagaaggctgtccgagtgaccaccctcatgaaacggctccgggcaccagagcagtccagcacggctgcagcccagtcggcctcagccacagacactgccacccccggggctgcagaccgtagtgccaccccagccacagatggaagtgccaccccagccactgatggcagtgtcaccccagccaccgatggaagcatcactccagccactgatgggagtgtcaccccagccactgacaggagcgctactccagccactgatgggagagccacaccagccacagaagagagcactgtgcccaccacccaaagcagtgccatgctggccaccaaggcagctgccacccctgagccggctatggcccagccggacagcacagccccagagggcgccacaggccaggctccaccctctagtaaaggggaagaggctgctggttatgcccaggagtctcaaagggaggaggccagctgagtaggcagcctggtgagggggggcaggggatgggcaggagggtgggagagtggatgaggggcttctcactgtacatagagtcactggcatgatgccctcgctcccccatgcccccacatcccagtggggcataactaggggtcacgggagagcagtctcgtctcctgtgtgtatgtgtgtgagtggtgggcaggccagtggcagggccggccccagcccctgcatggattccttgtggcttttctgtcttttgctagcttcaccagtttctgttccttgtgggatgctgctctagggatactcagggggctcctgctctccttccccttcccttcttgcctcaccattcccctaggcaggccctgcaggtcccacactctcccaggccctaaacttgggcggccttgccctgagagctggtcctccagcgaggccctgtcagcggtcttaggctcctgcacatgaaggtgtgtgcctgtggtgtgtgggctgctctaggagcagatacaggctggtatagaggatgcagaaaggtagggcagtatgtttaagtccagacttggcacatggctagggatactgctcactagctgtggaggtcctcaggagtggagagaatgagtaggagggcagaagcttccatttttgtccttcctaagaccctgttatttgtgttatttcctgcctttccgagtcctgcagtgggctgccctgtaccctgaacctcatgagcctctaagggaaaggaggaacaattaggacgtggcaatgagacctggcagggcagagtacaagcccagcacccagtgtcccagccttactgggtccttaccctgggccaaacagggagggctgatacctccttgctcttcctagatgcccacctcctacaatctcagcccacaagtcctctccaccctagggggcttgctgcatggcaataactcataatctgatttggaggtttgccctttacaggggcagattttctgctcagttcaacaatgaaatgaagaggaactccctctttctacagcttacttctatcagaggcccaggtgcctcagagccacattgagttgctttttctgggatgaggaagtagggttaaactccccagtttcctgagggaggctcctgacaggtgccctttgtcagaccctaccacagcctggataggcagccacattggtcctcgcccttgctcggcactccgtggtggtcctgcccttctccctgcatgcctgtgggtctgctctggtgtgtgaaggtcggtgggttaactgtgtgcctactgaacctggcaaataaacatcaccctgcaaagcctctggccc

SEQ ID NO: 26868 - DNA, 1400 bp, Homo sapiens
  Clone ID: LIB4655-027-G6_FLI
attgatgcttttaagttcagtttaatcagtagtacaatgttatgtatttgccactgaaaccatttagaaccatgcataatcagacagtttagcatgagggtttccatctaggatatggaaattactttagattgctaattttgagttggaaggcgtgagaatttgaataattttgtaaatagtattggaatatttaagataactgagattcacgattttgtacctttaatttatttgatatgcgttagtaagtcttgctttggtttttggcttttggttggagtgctgtggtcagcagaatgccacccttccccaacaaaagaggttcattccttaatccctggaaccagtgaatgttagtttacatggcaaaatgtgtcctgcagatgtgtttaatattaaaaaccttgaggagggagattatcatgtattatctggctgggcccaacctaatctcatgagtccttagggacaacctttcctgtctgcagggaaccagagaaatggttcgtgacacagactgaacctgctagctctgaagatggaggagggggccaagagccaaggaatgtaggcagcctctacaagctggaagtggccttagtttacagtcagcaagaaagtggggaccttggccctgccaccgaaaggatgtggattctgccagcagcctgaaggagcaggagacagagtctcccctagaacctccaggaaggaaggcagcctgccagccttgattctagtccagtgagacccatagtcagacttccagcctacagaattgcaataaatttgtgttaagtcactaagtttgtggtaaattttacagcggcagtataaaactaatacagtggtgtgccttcctggttgacatttgaaatgcgtttagaaaggcatgaatgcgctaatgtatacatacagtttaaaatgcttaaggccatttcactaagtttggaattggaggagaggcaagccaagaatcaagaggccaggaaggcaggggtagaatccatgagggcatagaaatctctaagactgagccaggagtggagtgggagagaggcagggagccaggagctgacatcctcagaggcccaggatgtcgctctcgtcctcgctctcgtcctcccgctcccgctcccgttcccgggcccgcctcggcgccggctccggggccgccatggttcggccagcccaggccaccgccctctgcgcgatccgccgccggcgcagcctctcccggcccgccctggcctcgcgcccagcagcccagcctagagccgccgcggcagcctagagccccagccccggctctgggaattgggaggcgcgggcgcgcggcggacgggcggggcccgggggcggagccggcgcgcacctcccgagccgcctgtgcctgc

SEQ ID NO: 26869 - DNA, 1463 bp, Homo sapiens
  Clone ID: LIB4655-049-H9_FLI
gtcatggccgtggcgctgtctgcgccggcgatccgcctttcggactgaggcccagcgcagcgcttgcaaagagcagctacctggcaactgaacccatcatcaccacagccactcctgcagctgccacggtttctgccacctctaagatgtgccctggtaactggctttgggcttctatgacttttatggcccgcttctcccggagtagctcaaggtctcctgttcgaactcgagggaccctggaggagatgccaaccgttcaacatcctttcctcaatgtcttcgagttggagcggctcctctacacaggcaagacagcctgtaaccatgccgacgaggtctggccaggcctctatctcggagaccaggacatggctaacaaccgccgggagcttcgccgcctgggcatcacgcacgtcctcaatgcctcacacagccggtggcgaggcacgcccgaggcctatgaggggctgggcatccgctacctgggtgttgaggcccacgactcgccagcctttgacatgagcatccacttccagacggctgccgacttcatccaccgggcgctgagccagccaggagggaagatcctggtgcattgtgctgtgggcgtgagccgatccgccaccctggtactggcctacctcatgctgtaccaccaccttaccctcgtggaggccatcaagaaagtcaaagaccaccgaggcatcatccccaaccggggcttcctgaggcagctcctggccctggaccgcaggctgcggcagggtctggaagcatgaggggagggggagagaggtcaggccaggcccgtgggtaggtccctggctcccagctggagataggaggcccaggtggcaggtagcaggaggcccagatcacccatcctcccctggggtcaggagaggccgagccccaggccactgtcactctttgtgggaggggacggggagtgaggttgggcagtgtggtggatgggcacccaggaagggttgaccagggaaggaggcagctaggctgtagatggaagatggtcctgggattcgaacaccgctgggatctggccagggtgctccctgggattcacagtcccttcccctctttgtgcccaagtgtttccctctctccctcaccaaaacaaaagggccatctctgccctgcacttgtgcagaaagtcagggatacggcaagcatgaatgcaatggtgtagagttgtgtgaaacccctagcatagagacagacagcgaagagatggtgtgaaaagcttgcagaaccagacagagaaccccacagactttccactccaagcacaggaggaggtagctagcgtgtgagggttggcactaggcccacggctgctgcttgggccaaaaacatacagaggtgcatggctggcagtcttgaaattgtcactcgcttactggatccaagcgtctcgaggataaataaagatcatgaaaaag

SEQ ID NO: 26870 - DNA, 3837 bp, Homo sapiens
  Clone ID: LIB4656-003-G12_FLI
gctctggctccggcaggcacaggcggctcgggaggtgcgcgccggctccgcccccgggccccgcccgtccgccgcgcgcccgcgcctcccaattcccagagccggggctggggctctaggctgccgcggcggctctaggctgggctgctgggcgcgaggccagggcgggccgggagaggctgcgccggcggcggatcgcgcagagggcggtggcctgggctggccgaaccatggcggccccggagccggcgccgaggcgggcccgggaacgggagcgggagcgggaggacgagagcgaggacgagagcgacatcctggaggaaagcccgtgtggtcgctggcaaaagcgacgggagcaggtaaaccaagggaacatgccagggcttcagagcaccttcctagccatggacacggaggagggggtagaggtggtgtggaacgagctccacttcggagacaggaaggccttcgcggcgcacgaggagaagatccagaccgtgttcgagcagctggtgctggtggaccacccgaacatcgtgaagttgcacaagtactggctggatacctctgaggcctgcgcgagggtcatcttcatcacagagtacgtgtcatcaggcagcctcaagcaattcctcaaaaagaccaagaagaaccacaaggccatgaacgcccgggtatggggagcgggctggggcagccacggggacaggacggggttggggcagcctcggggactgggatggtgagggggtgcccggcggcctcggacaggggctgggcgaggatgcggggcgggctccgcaggcccagccgcctctcctgcgcccacccgaccgacggagtcgtgcgtccgccgccaggcctggaagcgctggtgcacgcagatcctgtctgcgctcagcttcctgcacgcctgcagccccccaatcatccacgggaacctgaccagcgacaccatcttcattcagcacaacggcctcatcaagatcggctccgtgtggcaccgaatcttctccaatgcacttccagatgatctccgaagccccatccgcgctgagcgagaggaacttcggaacctgcacttcttccccccagagtatggagaggtggccgatgggaccgctgtggacatcttctcctttgggatgtgtgcgctggagatggctgtactggaaatccagaccaatggggacacccgggtcacagaggaggccattgctcgcgccaggcactcgctgagtgaccccaacatgcgggagttcatcctttgctgcctggcccgggaccctgcccgccggccctctgcccacagcctcctcttccaccgcgtgctcttcgaggtgcactcgctgaagctcctggcagcccactgcttcatccagcaccagtacctcatgcctgagaatgtggtggaggagaagaccaaggccatggacctgcacgcggtcttggcggagcttccccggccccgcaggcccccgctgcagtggcggtactcggaagtctccttcatggagctggacaaattcctggaggatgtcaggaatggaatctacccactgatgaactttgcagccactcgacccctggggctgccccgtgtgctggccccacccccggaggaggtccaaaaggccaagaccccgacgccagagccctttgactctgagaccagaaaggtcatccagatgcagtgcaacctggagagaagcgaggacaaggcgcgctggcatctcactctgcttctggtgctggaagaccggctgcaccggcagctgacctacgacctgctcccaacggacagcgcccaggacctcgcctcggagctcgtgcactatggcttcctccacgaggacgaccggatgaagctggccgccttcctggagagcaccttcctcaagtaccgtgggacccaggcctgacccggagccccagccccaggggaccatgccggggtgctgcctgggcaggccatgttggggagactccagcaccgtggggctgccctcctccatgcgcctgggagcacaaaggccccggtagtgaaggaaccccccgtctcctgagagtggggctgaccctgccttgggcgccgaggggttggggggtgggtgtgggggagccgttaggcctcccaggtccttaggatcagggttgcccccagaaccccttcccatatcctccattctccgccctgagttcctacccaggctgcctggccggggccactgcctcctcagcatgcaggaggctgccctgtagggaaccccagctctggggcttgggggtgagggtcagccctggacagacctctgcccagggaactgctccatggggtctgggagagcagccatcccctgctggcaccatagacccacacaaggagcctgcacagcaagccagcggtgacacacctgcaggtgtcaggcatggcactgggcacaacagggacctggcaggagaaacagaccacagagaggtctggagttgaggctgttgtcagcaaagcccctggtcccacacagctctgccctagagccacctctttgaccctttacccaccctgagaccagaacttgcagcccctctgcagatctcctctggccactgcagcccctccaatgggctttttctctcatgcattccctggcctggaggcgtcagggaccccacatcctccctgctcctcagactcacagcccctccatgttacctcccgcacctcctccctggggcagctgctccctgggcctctgaggatgtcagctcctggctccctgcctctctcccactccactcctggctcagtcttagagatttctatgccctcatggattctacccctgccttcctggcctcttgattcttggcttgcctctcctccaattccaaacttagtgaaatggccttaagcattttaaactgtatgtatacattagcgcattcatgcctttctaaacgcatttcaaatgtcaaccaggaaggcacaccactgtattagttttatactgccgctgtaaaatttaccacaaacttagtgacttaacacaaatttattgcaattctgtaggctggaagtctgactatgggtctcactggactagaatcaaggctggcaggctgccttccttcctggaggttctaggggagactctgtctcctgctccttcaggctgctggcagaatccacatcctttcggtggcagggccaaggtccccactttcttgctgactgtaaactaaggccacttccagcttgtagaggctgcctacattccttggctcttggccccctcctccatcttcagagctagcaggttcagtctgtgtcacgaaccatttctctggttccctgcagacaggaaaggttgtccctaaggactcatgagattaggttgggcccagccagataatacatgataatctccctcctcaaggtttttaatattaaacacatctgcaggacacattttgccatgtaaactaacattcactggttccagggattaaggaatgaacctcttttgttggggaagggtggcattctgctgaccacagcactccaaccaaaagccaaaaaccaaagcaagacttactaacgcatatcaaataaattaaaggtacaaaatcgtgaatctcagttatcttaaatattccaatactatttacaaaattattcaaattctcacgccttccaactcaaaattagcaatctaaagtaatttccatatcctagatggaaaccctcatgctaaactgtctgattatgcatggttctaaatggtttcagtggcaaatacataacattgtactactgattaaactgaacttaaaagc

SEQ ID NO: 26871 - DNA, 2260 bp, Homo sapiens
  Clone ID: LIB4656-015-B6_FLI
ggcccgggccccaccggccccccatggacgcccccagcacggggcgctgagacccccgcgtcgctgcccagcccggtccggcgcgccacgccgagggatctctggacaggacaagactccgaagctactcccccagcacacagcccgggacccacaaacccagcttgcccccagccctcccacctgccactccctggcccctcccaccgcccgccccccttggggcgcagggcatggtgtgaaaggccaagtgctgaggcgggtatcatgggtgctgtgccctagggcctgggtggcagggggtgggtggcctgtgggtgtgccgggggggccagtgtgcccaccccagtctcttggcgtgctggagggcatcctggatggaattgaagtgaatggaacagaagccaagcaaggtggagtgtgggtcagacccagaggagaacagtgccaggtcaccagatggaaagcgaaaaagaaagaacggccaatgttccctgaaaaccagcatgtcagggtatatccctagttacctggacaaagacgagcagtgtgtcgtgtgtggggacaaggcaactggttatcactaccgctgtatcacttgtgagggctgcaagggcttctttcgccgcacaatccagaagaacctccatcccacctattcctgcaaatatgacagctgctgtgtcattgacaagatcacccgcaatcagtgccagctgtgccgcttcaagaagtgcatcgccgtgggcatggccatggacttggttctagatgactcgaagcgggtggccaagcgtaagctgattgagcagaaccgggagcggcggcggaaggaggagatgatccgatcactgcagcagcgaccagagcccactcctgaagagtgggatctgatccacattgccacagaggcccatcgcagcaccaatgcccagggcagccattggaaacagaggcggaaattcctgcccgatgacattggccagtcacccattgtctccatgccggacggagacaaggtggacctggaagccttcagcgagtttaccaagatcatcaccccggccatcacccgtgtggtggactttgccaaaaaactgcccatgttctccgagctgccttgcgaagaccagatcatcctcctgaaggggtgctgcatggagatcatgtccctgcgggcggctgtccgctacgaccctgagagcgacaccctgacgctgagtggggagatggctgtcaagcgggagcagctcaagaatggcggcctgggcgtagtctccgacgccatctttgaactgggcaagtcactctctgcctttaacctggatgacacggaagtggctctgctgcaggctgtgctgctaatgtcaacagaccgctcgggcctgctgtgtgtggacaagatcgagaagagtcaggaggcgtacctgctggcgttcgagcactacgtcaaccaccgcaaacacaacattccgcacttctggcccaagctgctgatgaaggagagagaagtgcagagttcgattctgtacaagggggcagcggcagaaggccggccgggcgggtcactgggcgtccacccggaaggacagcagcttctcggaatgcatgttgttcagggtccgcaggtccggcagcttgagcagcagcttggtgaagcgggaagtctccaagggccggttcttcagcaccagagcccgaagagcccgcagcagcgtctcctggagctgctccaccgaagcggaattctccatgcccgagcggtctgtggggaagacgacagcagtgaggcggactccccgagctcctctgaggaggaaccggaggtctgcgaggacctggcaggcaatgcagcctctccctgaagccccccagaaggccgatggggaaggagaaggagtgccataccttctcccaggcctctgccccaagagcaggaggtgcctgaaagctgggagcgtgggctcagcagggctggtcacctcccatcccgtaagaccaccttcccttcctcagcaggccaaacatggccagactcccttgctttttgctgtgtagttccctctgcctgggatgcccttccccctttctctgcctggcaacatcttacttgtcctttgaggccccaactcaagtgtcacctccttccccagctcccccaggcagaaatagttgtctgtgcttccttggttcatgcttctactgtgacacttatctcactgttttataattagtcgggcatgagtctgtttcccaagct

SEQ ID NO: 26872 - DNA, 2605 bp, Homo sapiens
  Clone ID: LIB4656-018-D2_FLI
aacgtagcagggcacacgtctcgcctctttgcgactcggtgccccgtttctccccatcacctacttacttcctggttgcaacctctcttcctctgggacttttgcaccgggagctccagattcgccaccccgcagcgctgcggagccggcaggcagaggcaccccgtacactgcagagacccgaccctccttgctaccttctagccagaactactgcaggctgattccccctacacactctctctgctcttcccatgcaaagcagaactccgttgcctcaacgtccaacccttctgcagggctgcagtccggccaccccaagaccttgctgcagggtgcttcggatcctgatcgtgagtcgcggggtccactccccgcccttagccagtgcccagggggcaacagcggcgatcgcaacctctagtttgagtcaaggtccagtttgaatgaccgctctcagctggtgaagacatgacgaccctggactccaacaacaacacaggtggcgtcatcacctacattggctccagtggctcctccccaagccgcaccagccctgaatccctctatagtgacaactccaatggcagcttccagtccctgacccaaggctgtcccacctacttcccaccatcccccactggctccctcacccaagacccggctcgctcctttgggagcattccacccagcctgagtgatgacggctccccttcttcctcatcttcctcgtcgtcatcctcctcctccttctataatgggagcccccctgggagtctacaagtggccatggaggacagcagccgagtgtcccccagcaagagcaccagcaacatcaccaagctgaatggcatggtgttactgtgtaaagtgtgtggggacgttgcctcgggcttccactacggtgtgcacgcctgcgagggctgcaagggctttttccgtcggagcatccagcagaacatccagtacaaaaggtgtctgaagaatgagaattgctccatcgtccgcatcaatcgcaaccgctgccagcaatgtcgcttcaagaagtgtctctctgtgggcatgtctcgagacgctgtgcgttttgggcgcatccccaaacgagagaagcagcggatgcttgctgagatgcagagtgccatgaacctggccaacaaccagttgagcagccagtgcccgctggagacttcacccacccagcaccccaccccaggccccatgggcccctcgccaccccctgctccggtcccctcacccctggtgggcttctcccagtttccacaacagctgacgcctcccagatccccaagccctgagcccacagtggaggatgtgatatcccaggtggcccgggcccatcgagagatcttcacctacgcccatgacaagctgggcagctcacctggcaacttcaatgccaaccatgcatcaggtagccctccagccaccaccccacatcgctgggaaaatcagggctgcccacctgcccccaatgacaacaacaccttggctgcccagcgtcataacgaggccctaaatggtctgcgccaggctccctcctcctaccctcccacctggcctcctggccctgcacaccacagctgccaccagtccaacagcaacgggcaccgtctatgccccacccacgtgtatgcagccccagaaggcaaggcacctgccaacagtccccggcagggcaactcaaagaatgttctgctggcatgtcctatgaacatgtacccgcatggacgcagtgggcgaacggtgcaggagatctgggaggatttctccatgagcttcacgcccgctgtgcgggaggtggtagagtttgccaaacacatcccgggcttccgtgacctttctcagcatgaccaagtcaccctgcttaaggctggcacctttgaggtgctgatggtgcgctttgcttcgttgttcaacgtgaaggaccagacagtgatgttcctaagccgcaccacctacagcctgcaggagcttggtgccatgggcatgggagacctgctcagtgccatgttcgacttcagcgagaagctcaactccctggcgcttaccgaggaggagctgggcctcttcaccgcggtggtgcttgtctctgcagaccgctcgggcatggagaattccgcttcggtggagcagctccaggagacgctgctgcgggctcttcgggctctggtgctgaagaaccggcccttggagacttcccgcttcaccaagctgctgctcaagctgccggacctgcggaccctgaacaacatgcattccgagaagctgctgtccttccgggtggacgcccagtgacccgcccggccggccttctgccgctgcccccttgtacagaatcgaactctgcacttctctctcctttacgagacgaaaaggaaaagcaaaccagaatcttatttatattgttataaaatattccaagatgagcctctggccccctgagccttcttgtaaatacctgcctccctcccccatcaccgaacttcccctcctcccctatttaaaccactctgtctcccccacaaccctcccctggccctctgatttgttctgttcctgtctcaaatccaatagttcacagctg

SEQ ID NO: 26873 - DNA, 3846 bp, Homo sapiens
  Clone ID: LIB4656-027-G7_FLI
ggcacaggcggctcgggaggtgcgcgccggctccgcccccgggccccgcccgtccgccgcgcgcccgcgcctcccaattcccagagccggggctggggctctaggctgccgcggcggctctaggctgggctgctgggcgcgaggccagggcgggccgggagaggctgcgccggcggcggatcgcgcagagggcggtggcctgggctggccgaaccatggcggccccggagccggcgccgaggcgggcccgggaacgggagcgggagcgggaggacgagagcgaggacgagagcgacatcctggaggaaagcccgtgtggtcgctggcaaaagcgacgggagcaggtaaaccaagggaacatgccagggcttcagagcaccttcctagccatggacacggaggagggggtagaggtggtgtggaacgagctccacttcggagacaggaaggccttcgcggcgcacgaggagaagatccagaccgtgttcgagcagctggtgctggtggaccacccgaacatcgtgaagttgcacaagtactggctggatacctctgaggcctgcgcgagggtcatcttcatcacagagtacgtgtcatcaggcagcctcaagcaattcctcaaaaagaccaagaagaaccacaaggccatgaacgcccgggtatggggagcgggctggggcagccacggggacaggacggggttggggcagcctcggggactgggatggtgagggggtgcccggcggcctcggacaggggctgggcgaggatgcggggcgggctccgcaggcccagccgcctctcctgcgcccacccgaccgacggagtcgtgcgtccgccgccaggcctggaagcgctggtgcacgcagatcctgtctgcgctcagcttcctgcacgcctgcagccccccaatcatccacgggaacctgaccagcgacaccatcttcattcagcacaacggcctcatcaagatcggctccgtgtggcaccgaatcttctccaatgcacttccagatgatctccgaagccccatccgcgctgagcgagaggaacttcggaacctgcacttcttccccccagagtatggagaggtggccgatgggaccgctgtggacatcttctcctttgggatgtgtgcgctggagatggctgtactggaaatccagaccaatggggacacccgggtcacagaggaggccattgctcgcgccaggcactcgctgagtgaccccaacatgcgggagttcatcctttgctgcctggcccgggaccctgcccgccggccctctgcccacagcctcctcttccaccgcgtgctcttcgaggtgcactcgctgaagctcctggcagcccactgcttcatccagcaccagtacctcatgcctgagaatgtggtggaggagaagaccaaggccatggacctgcacgcggtcttggcggagcttccccggccccgcaggcccccgctgcagtggcggtactcggaagtctccttcatggagctggacaaattcctggaggatgtcaggaatggaatctacccactgatgaactttgcagccactcgacccctggggctgccccgtgtgctggccccacccccggaggaggtccaaaaggccaagaccccgacgccagagccctttgactctgagaccagaaaggtcatccagatgcagtgcaacctggagagaagcgaggacaaggcgcgctggcatctcactctgcttctggtgctggaagaccggctgcaccggcagctgacctacgacctgctcccaacggacagcgcccaggacctcgcctcggagctcgtgcactatggcttcctccacgaggacgaccggatgaagctggccgccttcctggagagcaccttcctcaagtaccgtgggacccaggcctgacccggagccccagccccaggggaccatgccggggtgctgcctgggcaggccatgttggggagactccagcaccgtggggctgccctcctccatgcgcctgggagcacaaaggccccggtagtgaaggaaccccccgtctcctgagagtggggctgaccctgccttgggcgccgaggggttggggggtgggtgtgggggagccgttaggcctcccaggtccttaggatcagggttgcccccagaaccccttcccatatcctccattctccgccctgagttcctacccaggctgcctggccggggccactgcctcctcagcatgcaggaggctgccctgtagggaaccccagctctggggcttgggggtgagggtcagccctggacagacctctgcccagggaactgctccatggggtctgggagagcagccatcccctgctggcaccatagacccacacaaggagcctgcacagcaagccagcggtgacacacctgcaggtgtcaggcatggcactgggcacaacagggacctggcaggagaaacagaccacagagaggtctggagttgaggctgttgtcagcaaagcccctggtcccacacagctctgccctagagccacctctttgaccctttacccaccctgagaccagaacttgcagcccctctgcagatctcctctggccactgcagcccctccaatgggctttttctctcatgcattccctggcctggaggcgtcagggaccccacatcctccctgctcctcagactcacagcccctccatgttacctcccgcacctcctccctggggcagctgctccctgggcctctgaggatgtcagctcctggctccctgcctctctcccactccactcctggctcagtcttagagatttctatgccctcatggattctacccctgccttcctggcctcttgattcttggcttgcctctcctccaattccaaacttagtgaaatggccttaagcattttaaactgtatgtatacattagcgcattcatgcctttctaaacgcatttcaaatgtcaaccaggaaggcacaccactgtattagttttatactgccgctgtaaaatttaccacaaacttagtgacttaacacaaatttattgcaattctgtaggctggaagtctgactatgggtctcactggactagaatcaaggctggcaggctgccttccttcctggaggttctaggggagactctgtctcctgctccttcaggctgctggcagaatccacatcctttcggtggcagggccaaggtccccactttcttgctgactgtaaactaaggccacttccagcttgtagaggctgcctacattccttggctcttggccccctcctccatcttcagagctagcaggttcagtctgtgtcacgaaccatttctctggttccctgcagacaggaaaggttgtccctaaggactcatgagattaggttgggcccagccagataatacatgataatctccctcctcaaggtttttaatattaaacacatctgcaggacacattttgccatgtaaactaacattcactggttccagggattaaggaatgaacctcttttgttggggaagggtggcattctgctgaccacagcactccaaccaaaagccaaaaaccaaagcaagacttactaacgcatatcaaataaattaaaggtacaaaatcgtgaatctcagttatcttaaatattccaatactatttacaaaattattcaaattctcacgccttccaactcaaaattagcaatctaaagtaatttccatatcctagatggaaaccctcatgctaaactgtctgattatgcatggttctaaatggtttcagtggcaaatacataacattgtactactgattaaactgaacttaaaagcatcaataccaccattgctgcactt

SEQ ID NO: 26874 - DNA, 2362 bp, Homo sapiens
  Clone ID: LIB4656-028-E10_FLI
gcggcagcggctgtggtggctgcggcgggtccgggcccatgaggcgacgaaggaggcgggacggcttttacccagccccggacttccgagacagggaagctgaggacatggcaggagtgtttgacatagacctggaccagccagaggacgcgggctctgaggatgagctggaggaggggggtcagttaaatgaaagcatggaccatgggggagttggaccatatgaacttggcatggaacattgtgagaaatttgaaatctcagaaactagtgtgaacagagggccagaaaaaatcagaccagaatgttttgagctacttcgggtacttggtaaagggggctatggaaaggtttttcaagtacgaaaagtaacaggagcaaatactgggaaaatatttgccatgaaggtgcttaaaaaggcaatgatagtaagaaatgctaaagatacagctcatacaaaagcagaacggaatattctggaggaagtaaagcatcccttcatcgtggatttaatttatgcctttcagactggtggaaaactctacctcatccttgagtatctcagtggaggagaactatttatgcagttagaaagagagggaatatttatggaagacactgcctggcttgagtggaacgctcttcacaccagttgttcctaacagaaccattctcattgcggctttctttccttgaattgcttttacttggcagaaatctccatggctttggggcatttacatcaaaaggggatcatctacagagacctgaagccggagaatatcatgcttaatcaccaaggtcatgtgaaactaacagactttggactatgcaaagaatctattcatgatggaacagtcacacacacattttgtggaacaatagaatacatggcccctgaaatcttgatgagaagtggccacaatcgtgctgtggattggtggagtttgggagcattaatgtatgacatgctgactggagcacccccattcactggggagaatagaaagaaaacaattgacaaaatcctcaaatgtaaactcaatttgcctccctacctcacacaagaagccagagatctgcttaaaaagctgctgaaaagaaatgctgcttctcgtctgggagctggtcctggggacgctggagaagttcaagctcatccattctttagacacattaactgggaagaacttctggctcgaaaggtggagcccccctttaaacctctgttgcaatctgaagaggatgtaagtcagtttgattccaagtttacacgtcagacacctgtcgacagcccagatgactcaactctcagtgaaagtgccaatcaggtctttctgggttttacatatgtggctccatctgtacttgaaagtgtgaaagaaaagttttcctttgaaccaaaaatccgatcacctcgaagatttattggcagcccacgaacacctgtcagcccagtcaaattttctcctggggatttctggggaagaggtgcttcggccagcacagcaaatcctcagacacctgtggaatacccaatggaaacaagtggcatagagcagatggatgtgacaatgagtggggaagcatcggcaccacttccaatacgacagccgaactctgggccatacaaaaaacaagcttttcccatgatctccaaacggccagagcacctgcgtatgaatctatgacagagcaatgcttttaatgaatttaaggcaaaaaaggtggagagggagatgtgtgagcatcctgcaaggtgaaacgactcaaaatgacagtttcagagagtcaatgtcattacatagaacacttcagacacaggaaaaataaacgtggattttaaaaaatcaatcaatggtgcaaaaaaaaacttaaagcaaaatagtattgctgaactcttaggcacatcaattaattgattcctcgcgacatcttctcaaccttatcaaggattttcatgttgatgactcgaaactgacagtattaagggtaggatgttgcttctgaatcactgttgagttctgattgtgttgaagaagggttatcctttcattaggcaaagtacaaaattgcctataatacttgcaactaaggacaaattagcatgcaagcttggtcaaactttttccagcaaaatggaagcaaagacaaaagaaacttaccaattgatgttttacgtgcaaacaacctgaatcttttttttatataaatatatatttttcaaatagatttttgattcagctcattatgaaaaacatcccaaactttaaaatgcgaaattattggttggtgtgaagaaagccagacaacttctgtttcttctcttggtgaaataataaaatgcaaatgaatcattgtt

SEQ ID NO: 26875 - DNA, 2412 bp, Homo sapiens
  Clone ID: LIB4656-038-E1_FLI
ggcgccgcggagagcggagggcgccgggctgcggaacgcgaagcggagggcgcgggaccctgcacgccgcccgcgggcccatgtgagcgccatgcggcgccgcgcagcccggggacccggcccgccgcccccagggcccggactctcgcggctgccgctgctgccgctgccgctgctgctgctgctggcgctggggacccgcgggggctgcgccgcgcccgcacccgcgccgcgcgccgaggacctcagcctgggagtggagtggctaagcaggttcggttacctgcccccggctgaccccacaacagggcagctgcagacgcaagaggagctgtctaaggccatcacagccatgcagcagtttggtggcctggaggccaccggcatcctggacgaggccaccctggccctgatgaaaaccccacgctgctccctgccagacctccctgtcctgacccaggctcgcaggagacgccaggctccagcccccaccaagtggaacaagaggaacctgtcgtggagggtccggacgttcccacgggactcaccactggggcacgacacggtgcgtgcactcatgtactacgccctcaaggtctggagcgacattgcgcccctgaacttccacgaggtggcgggcagcaccgccgacatccagatcgacttctccaaggccgaccataacgacggctaccccttcgacggccccggcggcaccgtggcccacgccttcttccccggccaccaccacaccgccggggacacccactttgacgatgacgaggcctggaccttccgctcctcggatgcccacgggatggacctgtttgcagtggctgtccacgagtttggccacgccattgggttaagccatgtggccgctgcacactccatcatgcggccgtactaccagggcccggtgggtgacccgctgcgctacgggctcccctacgaggacaaggtgcgcgtctggcagctgtacggtgtgcgggagtctgtgtctcccacggcgcagcccgaggagcctcccctgctgccggagcccccagacaaccggtccagcgccccgcccaggaaggacgtgccccacagatgcagcactcactttgacgcggtggcccagatccggggtgaagctttcttcttcaaaggcaagtacttctggcggctgacgcgggaccggcacctggtgtccctgcagccggcacagatgcaccgcttctggcggggcctgccgctgcacctggacagcgtggacgccgtgtacgagcgcaccagcgaccacaagatcgtcttctttaaaggagacaggtactgggtgttcaaggacaataacgtagaggaaggatacccgcgccccgtctccgacttcagcctcccgcctggcggcatcgacgctgccttctcctgggcccacaatgacaggacttatttctttaaggaccagctgtactggcgctacgatgaccacacgaggcacatggaccccggctaccccgcccagagccccctgtggaggggtgtccccagcacgctggacgacgccatgcgctggtccgacggtgcctcctacttcttccgtggccaggagtactggaaagtgctggatggcgagctggaggtggcacccgggtacccacagtccacggcccgggactggctggtgtgtggagactcacaggccgatggatctgtggctgcgggcgtggacgcggcagaggggccccgcgcccctccaggacaacatgaccagagccgctcggaggacggttacgaggtctgctcatgcacctctggggcatcctctcccccgggggccccaggcccactggtggctgccaccatgctgctgctgctgccgccactgtcaccaggcgccctgtggacagcggcccaggccctgacgctatgacacacagcgcgagcccatgagaggacagaggcggtgggacagcctggccacagagggcaaggactgtgccggagtccctgggggaggtgctggcgcgggatgaggacgggccaccctggcaccggaaggccagcagagggcacggcccgccagggctgggcaggctcaggtggcaaggacggagctgtcccctagtgagggactgtgttgactgacgagccgaggggtggccgctccagaagggtgcccagtcaggccgcaccgccgccagcctcctccggccctggagggagcatctcgggctgggggcccacccctctctgtgccggcgccaccaaccccacccacactgctgcctggtgctcccgccggcccacagggcctccgtccccaggtccccagtggggcagccctccccacagacgagccccccacatggtgccgcggcacgtcccccctgtgacgcgttccagaccaacatgacctctccctgctttgtt

SEQ ID NO: 26876 - DNA, 896 bp, Zea mays
  Clone ID: LIB4665-001-C8_FLI
gaagggtggaatagggaacggccatacaccatggcggatttctccaaggaatcttgcccttctgtgaagaacattttacttctggattctgaaggaaagcgtgttgctgtaaagtatttctcagatgattggccgactaatgcatcaaagttagcctacgaaaagtctgtttttactaaaactctaaagacaaatgcacggacagaagctgagataacattgtttgatggttatattgtcgtttacaagtttgtacatgaccttcacttttttgtcaccgctggagatgatgagaatgagctcatcttagcaagtgtactacatggtttttctgattctgttggtcttctactcaggttgtctattttctgttattactgcatatatatttgcctttgtatgtggttgttttgacgtgccgcttactgtgctttaggggtgatgttgagaagcggactgcgcttgagaacttggatttgatacttctctgcattgatgaaattgtagatgggggaatcatcctggaaacagatgcaaacaccattgctggtaaggttgcaaccaatgctgttgatggttctgtgcccttttctgagcagacgatatctcaggcactagccacagctagggagcaccttgcaagatctttactgaaatgaacaaccagcaatatgtatgacatatatgtgtgttaaaggttgggctactgaatgttaagggtctttgtagtcgttattcatcccaaagtgctgctgtgacagagcctagttgaatatccgagggattggtcacatgctcgttatttttttttgaaccagtgagtttgtagctgccatatttcaggtaaaacataaaataaagagttgtaattgggtgtaatataattttcaccatac

SEQ ID NO: 26877 - DNA, 990 bp, Zea mays
  Clone ID: LIB4665-001-E3_FLI
caaccaccaagcagcagagcgcgaggcgacacggggacggagccctggaggtctctcgcgagtccagaggcgatcgacggtgtcgcgattcgtctcccactagaggatagcctggagtgagcatttcattctggagatacaatgggtggctgctgctgctgctgctgttctgcaagggcatctgattcagatagagcaccggtgcgcatctatcaccgacaaaatcccgaggaacatgcacccttgtcgtcagcctttgatggaccatcgccaacttctgctatagttgcagttgacacaaatcttgatacatcatctcttgacacttaccgagcaccacctgcacctttgccatatgatgtttgcttcacagtttcagaaaatcctgatgtggagaagtcaggcattaaaatcaaaactgacgggcagcagtccccaaaagtggacgaatttgagtcgtgcgaaaaaggtgcccctgaggataaggctgatgaggaggaggatgtttgtccaatatgtcttgaagaatacgacaaagaaaatccacgttcagtcaccaagtgcgagcatcatttccatctctgttgcatactcgaatggatggagaggagcgagacatgcccagtctgtgaccagataactctgatagatgggatgtacgaatagcattcttggcggcggttccagttgagttggcgttctttgattttgtttttgttgtggtctggtctggtggaggagatggttgatgagtcttggcaaaaaataatttatagaagaaaaatgacatgaaattgtgctagagtcgcctgtgtcctgtttttacctgaaaaccctgtgagatttgctccctggtttcctcttgcttggtttgcgtgttcattcttccatttagatttcagtttctcagtgcctgtgtgacagggaaatcatctgtattgtacagttagtctgaaacggtgacagaaaagaagaaaagctgattctatc

SEQ ID NO: 26878 - DNA, 952 bp, Zea mays
  Clone ID: LIB4665-007-G6_FLI
agcagctggaggatctcaccgccaagatgagagagtgcaaacgcttgatcaaagaatttgaccgtatactcaaggatgaggagaaaaaggacactcctgaggccaacaagcagctcaatgacaagaaacagttcatgatcaaagaactcaactcctacgtaaccctgaggaaaacgtaccagagcagcctaggtaacaagaggatcgaactattcgatactggtaccgaccaagtggccgacaaatctccagttcaaatggcatcagaaatgtcaaatcaagagctcattagcgccggaaggaaacaaatggaccaaactgaccaagccattgagcgctcaaagatggttgtagcacaaactgttgaagttggagctcagactgctgcaactctgtcacaacaaacagagcaaatgaagagaatcggcaatgagttagattctgttcacttctcactgaagaaggccagtcaaatggtgaaagagattggccgtcaggttgctactgacaaatgcattatggcgttcctgtttctgattgtctgtggcgttattgcaataattgttgttaagatcgtcaacccacataacaagaacatcagagatattccggggctggcacctcccgccatgaacaggaggctgctgtccatcgacgccttaggactatgagcgctgtgaatggctgctcccctgcagcacagcgctgcgcagcgcatcagagttctcttaacgagccacgatatatgatttcacgattcttttgtgcctgtatattgtgtttatgttgtttgcgtccgcccattccttccctattgcattggtaagtagtagcttcaggttcctagcaccggcgttctgattgtctgtgtatacgcggtactggttgtggatgtgagatattcttcatggttgttagtaaaaatagaaacggctgtgggagaagaaaccgt

SEQ ID NO: 26879 - DNA, 930 bp, Zea mays
  Clone ID: LIB4666-003-A8_FLI
ctcgaggccggccgggctctcacttctgtacccaaccagaagagcggcggcgcgggcggacaaggagcaggcggaggaggagttgtgccaagccacaatgggtatctcgcgtgactcgatgcacaagcgccgagccaccggtggaaagcagaaggcctggaggaagaagcgaaagtatgagcttggtcgccagccagccaacaccaagttgtcaagcaataagacagtgaggagggtccgtgttcgtggaggtaatgtgaaatggagggctcttcgccttgatactggtaactactcatggggaagtgaagctgttacccgcaagacccgtatcctcgacgtggtctacaatgcatcaaacaatgagcttgtgaggacacaaacccttgtgaagagtgccattgtgcaagttgatgctgccccattcaagcagtggtacctcactcactatggagttgacattggtaggaagaagaaaacccctgctgcaaagaaggataatgctgagggacaagaggttgaggcagcagctgaggaaacgaaaaggagcaaccatgtcacgaggaagcttgagaagcgcaaggagggacgtacccttgacccacacattgaggagcaatttggcagtggacggttgctggcatgcatttcttcccgccctggacagtgtggccgagctgatgggtacatccttgagggtaaagagcttgagttctacatgaagaagctacagaggaagaagggcaagagcgctgtagcttagagcattctcatggattgtcttgcaccgaaatgtgtgtcctgatgagtacactttttttggttagtcgtctcaagttcagagcgttatgccatgttttcagtcctgattagtacactgttttctaaaagcgattgagctctagtccaatgtattgataatttctgctg

SEQ ID NO: 26880 - DNA, 1205 bp, Zea mays
  Clone ID: LIB4666-004-E5_FLI
atcgaggccggccgggaggttgtcgctcatagtcttctcttctgccgtccatccggcctgcgcgctcgctctcctgctctcctgcgccaactgggcgaccgccgacgccgacgccaacgccgacgacctacgccaggtgctgggatttttgtcggttccttcggcagctttcgtcgcgtccttcgccggcgacgagcactcaccaggtccgctcctgaagaagactgggatattttgcatacacagaggatcatctgtgtagaggacattcagttttctccagttctccagttcctggatagcaatggcaaatgagtttcctgatgaagttcttaagtctgttttcccattgctggatggtaaagatctagtattctgcatgcttgtatgccgtcaatggcatgaaatcgcaaaggatgattacttctggaaatgcatttgctcacggaagtggccgtccatttgcaaacagcccccttctggcgcaaactacaaaaagctttacttaaccttctctaagccacgggagatgcagaacctccctgtgccaaggcttacattcgaggatattgttttctatattgatatgtggctcgaaggatcgctcatcttttctcaagcagtttcaggccgcactctccgagcaggcctacagggcgctccccctcctggcattccagatatacttgcagcacatttgagttcccaagactgcatcttgatgctggaagtgagcccaagttgggcagttcccatggggccagccatcactgtatctgtccttgccaaccgcaaggattcgaacaagatggctgcatcataaacaagtcaacgttcgattacatcgacagtaatgcagcgcgggctctggcttatgagtatctcaggttttcgcccagacaccctttcacatccgacatccgggcatggatgtcgttacttttcctgtgcaaaggggcgaacaccattgaggtgtttggtatcgagctagatttctgtgacgccgcgaagtcagagaaagaaatcttgtggctcctagacatgcttgattggaaatagaagttccttatcccctttggggtttgacacatgtaaagcctgttcatggttagtcgttcctttcctgttggaccatgtacgctactactgaactacataatctcctgagaaaatgtaataaatgtcacctgctactccattttgct

SEQ ID NO: 26881 - DNA, 1018 bp, Zea mays
  Clone ID: LIB4666-005-C11_FLI
ctcgaggccggccgggaaactccgtttcgaattctagggttttgctgctctccgaccccgagctccgaaggccgcagcatcaggcgaggcccccctcgcgtgtgaccgagatggcgctgccgaatcaggggaccgttgattaccccagcttcaagctcgtcatcgtcggcgatggtggaactggtaaaactacatttgtgaagaggcatctcactggagagtttgagaagaaatatgaaccaaccattggtgtggaagttcatccgttggatttcaccactaactgtggtaagatcaggttctactgctgggataccgcagggcaagagaagtttggtggcctcagggatggatactatatccatggccagtgtgcgatcatcatgtttgatgtaacctcaaggcttacttacaagaatgttcctacgtggcatagggatctgtgcagggtctgtgaaaacatccccattgtcctctgcggtaataaggttgatgtgaagaacaggcaggtcaaagccaagcaggttactttccacaggaagaagaatctgcagtactatgaaatttctgccaagagcaactacaactttgagaaacctttcctgtaccttgcaaggaagctggctggtgatccgaaccttcaccttgttgaagctgttgctcttaagcctccggaagttaccatcgacatggctatgcagcagcagcatgaagccgagcttgctgcagcagctgcacaacctcttcctgatgacgatgatgatctgattgagtagaaaggatcatgagtcttggacttgagcaggagttgtgccttgcacgatttaagttgttctagggtggactctctcttgagttatcattgtctggatcatctttttctccttggacttgttgcaacttttgagtgtggaaatggattggaatagtcgccatgaatttgctggctactttatacatgtctttgttcataaaccttgttttaagatgaagttgtggcaatcctcttagtgctaag

SEQ ID NO: 26882 - DNA, 771 bp, Zea mays
  Clone ID: LIB4666-007-B8_FLI
ccgggtttttccggcctcccattcctcgcgcggcgaccacccgattcgaagcgtgcggagagaccgaagaagcgggagagatggctcgtaccaagcagactgctcgcaagtccacgggagggaaggctcccaggaagcagcttgccaccaaggctgcccgtaagtctgcccccaccactggtggagtgaagaagcctcaccgctaccgccctggaactgttgccctccgtgagatccgcaagtatcagaagagcactgagctgctgatcaggaagctgcccttccagaggctcgtcagggaaattgcacaggacttcaaaactgatttgcgtttccagagccatgcggtgcttgccctccaggaggctgctgaggcataccttgttggcctgtttgaggacaccaacctgtgcgccatccatgctaagcgtgtgaccatcatgccaaaggacattcagctggcaaggaggatccgcggcgagagggcctaatcgccacctcaaacatcgtgacaaaaacatgaagtcctggggttattgttaatctggtgccattgtaaggacatatgagtagggtttgttttgtggatcgcaagtttctcttctgctactgttgctgctacctttgctggtgttattgctagggtcgaatacttaagttaactatgcgctgacagtctggactagcagtgttatgtgcgctgctggaccttgcgcgcaatgctgtggccgatttgttcgttaatgtcaagaattgtgttacagtgcgtgc

SEQ ID NO: 26883 - DNA, 765 bp, Zea mays
  Clone ID: LIB4666-007-C3_FLI
cgaggccggccgggtccggcctcccattcctcgcgcggcgaccacccgattcgaagcgtgcggagagaccgaagaagcgggagagatggctcgtaccaagcagactgctcgcaagtccacgggagggaaggctcccaggaagcagcttgccaccaaggctgcccgtaagtctgcccccaccactggtggagtgaagaagcctcaccgctaccgccctggaactgttgccctccgtgagatccgcaagtatcagaagagcactgagctgctgatcaggaagctgcccttccagaggctcgtcagggaaattgcacaggacttcaaaactgatttgcgtttccagagccatgcggtgcttgccctccaggaggctgctgaggcataccttgttggcctgtttgaggacaccaacctgtgcgccatccatgctaagcgtgtgaccatcatgccaaaggacattcagctggcaaggaggatccgcggcgagagggcctaatcgccacctcaaacatcgtgacaaaaacatgaagtcctggggttattgttaatctggtgccattgtaaggacatatgagtagggtttgttttgtggatcgcaagtttctcttctgctactgttgctgctacctttgctggtgttattgctagggtcgaatacttaagttaactatgcgctgacagtctggactagcagtgttatgtgcgctgctggaccttgcgcgcaatgctgtggccgatttgttcgttaatgtcaagaattgtgtt

SEQ ID NO: 26884 - DNA, 1074 bp, Zea mays
  Clone ID: LIB4666-007-F5_FLI
ctcgaggccggccgggagggatcgtctgcctgactcgtaggacccgcctgtaagttcacgacgcgccgtcatctcgtcttctctttcaacttcgttcgcaagaagctcagaagtcagatcagaagccgccgaggggaggcgccgacgccgagtttttgctccatcccgcatccaccgccagaatgtttctcacgaggacggagtacgaccgcggggttaacaccttctcgccggaggggcggctgttccaggtcgagtacgccatcgaggccatcaagttgggatccactgcgatcgggttgaaaacaaaggatggtgttgtccttgctgttgagaaacgtgtgacctcgccactgctggaaccaagcagtgtggaaaaaatcatggaaattgatgagcacataggctgtgccatgagtgggcttattgctgatgctagaacactagtcgagcatgctcgtgttgaaactcagaatcataggttctcatacggggagccaatgaccgtagaatcttcaacacaagctatttgtgacttagctctgcgctttggcgaaggtgacgaagagtcaatgtcacggccatttggagtctctctcctaattgctggacatgatgagaatggacctagcctgtactacaccgacccatctggtactttttggcaatgcaacgcgaaggcaattggatctggctctgaaggagctgatagctccttgcaggagcagtacaacaaggagctggcccttgaggaggcggagaccatagccccttctatcctgaagcaggttatggaggagaaggtgaccccaaacaacgtcgatattgccaaggttgctcccaagtaccacctctacacccctgccgaggtcgaagccgtgatcgcgaggctgtgaaacgctttcggagctcgtgttattcatgtcatcaatcggtaatagacgatccttgtacgaagcgtggacatcttttgttcttgattatggctgtcatcgtactctgttgttaactccacaaggacagtcgatggtactttgattcacatctcagcccgattccgttgtcggattgcct

SEQ ID NO: 26885 - DNA, 1295 bp, Zea mays
  Clone ID: LIB4666-007-G4_FLI
atcgaggccggccgggaatcctcagctcagtctcttccactctcccttgacctgtctcctctcacctgctgactgctgtgccgctccgctccggtggcatctgcatctgcatctccatccctcgatctgtcttctctcagggtggaagaagcgtgacaatggaggctccacccgtggcgctgttcgacaccctcaaggcagccaaaccgttcttcttgttggctggtcccaacgtgattgaatcggaggagcacgtcctgaagatggccaaacacatcaaagcaattacgaccaagcttggaattccactcgtgttcaagtccagctttgataaagcaaaccgtacatcatcaaaatcgttccgtggtcctggtcttgaagaaggtctaaagatccttcaaaaggtgaaagcaacatatgaccttccgatagtcactgatgtgcacgaaagccaccagtgtgaagctgttggaagagttgctgacatcatacagattccagccttcctctgtcgccagactgatcttctagtggctgctgctaagactggaaaaattatcaatatcaagaaaggacaattctgtgcgccttctgttatggtgaactctacagagaaagtaaggcttgctgggaatccaaatgtgatggtctgtgagcgtggtaccatgtttggctacaatgatctatttgttgacccaaggaaccttgagtggctgagggaaagcaactgcccagttgtagctgatgtaacacatgctctacagcaaccagctggaagaaagcttgatggtggaggtgttgcaagcggtgggctacgagaactaataccgtgcattgcaaggacttcggttgctgttggtgttgatggtattttcatggaggtacatgatgaccccttgaatgcaccatgcgatggcccaactcaatggccattgcgcaatctggaagagctgttggaggaattaattgcaattgctcgagttaccaagggaaagaagccattcaagatcgacctcactccgttccaggagtgatctgctttggttgatagaaagcacaatgccaccatccatggaattccacagggtggatttcaatatgaattgagtacttgctattgttgggagcatacctgcagtggatgacttaggctatctctagcagatttttttatctcattccgtattttatttcctttttcaaactccactctgcaaacagtgtcaaacagtgttgtcatctacagtttcgcattccctgttttaccctatctactcgagacagtcttatcaccg

SEQ ID NO: 26886 - DNA, 1643 bp, Zea mays
  Clone ID: LIB4666-008-F5_FLI
ggccggccggggtaaagtgcaatcagcttgaaacgaaagacaaaggagttgagattcacgtctttcgccacgctgtcgcggccattcccggcctccgttgtcggtgcccgaaccctccactccatccctccacggctgaggtaccattcccgtcgcagcgaattgcgccaatgagggtggctcttgtcgaggcctgatccggaggcctaaccaccgggactttttgtcggcgccgtcgggttcgagcggcggcggcgatgttttggaaggatagcggcagccggagcagcagtggcagcggtcgggatcagaacggcgtcggccccttcggccaagtgcgcgtcctcatcgtcggtgattcaggtgttgggaaatcttcattggtgcatctcattttgaaaagttctgccattgctcgaccatctcaaacagtaggatgcactgtgggcattaaacatgttacttacggaagtgcgggcggttcatctaataacatcagtgacgctgaaaggaacttctttgttgagctttgggatgtctcaggacacgaacggtacaaggcatgccggtcgattttctatacacaaataaatgatgtcatatttgtttacgatctctcccagaggaagaccaagacgaatctgaataaatgggcagttgaagttgctgaaactggcaccttttcagctccattgggatctggtggaccaggaggacttccagtgccctatctggtaattgctaataaagtggatattgttccaagggatggggcaagagcaagcagggggaatcttgttgatcttgctcgccaatgggctgagaagcagggccttcttcggtgcagcgaagaacttccactcacagagagctttcctggcaactccggtcttgtgtcggctgctaaacaagcaagatatgacaaagaagccgtgatcaagtttttccgcttgcttattagaagaagatacttctcaaacgaacctcctgccccaagtccctggtcccttgctccaagagaagataccatccttcctatggagactcttggagatggcgcagatagcttccaaaggaaaagccttagtggtgagggttttttgtacaacggactggtcccactcccagcgcagaggaacctgacgccgccaccgactctgaatccgcagcagcccgtgtcgcccttggataactacagatatcatcgattctcctcctcgtcgcttccggacgtgagcagcagcagaacaagccgagaagatattattaatctatgatgtggtaggcatctgagagaggtcatacgccacaacattacctgcaaaacgtgggaagcatatggtgcctgggaattgtgttcctgtggcatcttggactgcttaaagcctttgcttgcagcatttggaatgctgccagggtgagctttttgttctgttttaaatgtcatgtcgttgtcagatcactaggaagtggttctttctccttttcgtttcctttccatcctccacctgcattcatttagaatacgtgttgactgggatggaggcaatacacgatacgccagtataccttcaaaggcaaatgtaagtttttttatgtactgtttcttttacttgatctggtctaacttggcaagcttgatg

SEQ ID NO: 26887 - DNA, 695 bp, Zea mays
  Clone ID: LIB4666-009-E5_FLI
ccgggaaaaaaaagttcggacttccgccgcgcttcgccctctcgctccagccgcttcacagcgccgccgctcgcctctccgaccgccgcgagaatgccgttcaagaggttcgtggagatcgggcgcgtggccctggtgaactacggcaaagactatggccgcctcgtcgtcatcgtcgatgtggtcgaccagaacagggcacttgtggacgcccctgatatggtcaggtgccagattaacttcaaacggctctcacttactgacatcaagattgacatcaaacgcgttcccaagaagtcaaccctgatcaaggctatggaggaagctgatgtgaagacgaagtgggaaaacagctcatggggcaagaagctgattgtccagaagaggagggctgcgctcagtgactttgacaggttcaaggtcatgctggcaaggatcaagaggggtggtgctatcaggcaagagctcgccaagctgaagaaggcgtccacggcttaagtcccttttggtggatggcatgttagtttttggtttcatgttgcatcagcattttgttttgagtgttgtcaaagccagaattagtaatatgtttcatgtgtacccttttcaaacttcatcaagaatgggtgtgctctggatattttgtcgggaatgatatgaaatacttaagttagcttgcgacaaatgttcatgcg

SEQ ID NO: 26888 - DNA, 756 bp, Zea mays
  Clone ID: LIB4666-011-H3_FLI
ctcgaggccggccgggctcatgacacgagctgtacaggttcgttccgatccgtgtccgaccttgccactcgcccaccggccaccgccaccatcacaaggagaaacaaattcttctattttatctctagctcgctcgccatcccctgcccggctgctgcccccaacggaacgacggccagaggaagctaccagagtcgatcgatcgagagagagagagagagagcatggctggcaggagtttcctgattcggtcccccaaggaggaggagtccaacgccgccgtcagagaagctgtactgctgggagcaaagaacgccgcaatagctggtactgtggttgcagttcccacgttggttggctgccgtgtccttccttgggctaaggcgaatctcaactacactgcacaagcactcattatatctgcagcctgtattgctggcttcttcatcactgctgacaaaaccattctacggaacgcacgacaaaacaccatcgggaagcttgacaagtcaacttgatgcagagatgtagctgaagctggaaaggttctctggttgccgcggcggttgatagggtgtctattgccccatatgcagtggcaccatttctcttcgtggacaagtaatttttgggtgtttggctattcaaaccagaggttgtgctgtaatgacttgtctaactgatggacccaactattgtatccagtttactccgaatttgaatcagaataaaaggtggttctatatgttcgtagac

SEQ ID NO: 26889 - DNA, 1040 bp, Zea mays
  Clone ID: LIB4666-014-H2_FLI
gccgggaacaacagcgggccaccgctgctataaaaccctccgcctccaccggcggctcgccaaactccgtttcgaattctagggttttgctgctctccgaccccgagctccgaaggccgcagcatcaggcgcggcccccctcgcgtgtgaccgagatggcgctgccgaatcaggggaccgttgattaccccagcttcaagctcgtcatcgtcggcgatggtggaactggtaaaactacatttgtgaagaggcatctcactggagagtttgagaagaaatatgaaccaaccattggtgtggaagttcatccgttggatttcaccactaactgtggtaagatcaggttctactgctgggataccgcagggcaagagaagtttggtggcctcagggatggatactatatccatggccagtgtgcgatcatcatgtttgatgtaacctcaaggcttacttacaagaatgttcctacgtggcatagggacctgtgcagggtctgtgaaaacatccccattgtcctctgcggtaataaggttgatgtgaagaacaggcaggtcaaaaccaagcaggttactttccacaggaagaagaatctgcagtactatgaaatttctgccaagagcaactacaactttgagaaacctttcctgtacctcgcaaggaagctggctggtgatccgaaccttcactttgttgaagctgttgctcttaagcctccggaagttaccatcgacatggctatgcagcagcagcatgaagctgagcttgctgcagcagctgcacaacctcttcctgatgacgatgatgatctgattgagtagaaaggatcatgagtcttgaacttgagcaggagttgtgccttgcgtgttttaagttgttctagggtgaactcttgagttctcattgtctggatcatctttttctccttggatgtgttgcatcttttgagtgtggaaatggatggtactcctcgccatgaatttgctggctactttatacattgctttgtaactctgtttgatgataaactttgttgtggc

SEQ ID NO: 26890 - DNA, 970 bp, Zea mays
  Clone ID: LIB4666-015-E5_FLI
ccgggaaaactccgtttcgaattctagggttttgctgctctccgaccccgagctccgaaggccgcagcatcaggcgcggcccccctcgcgtgtgaccgagatggcgctgccgaatcaggggaccgttgattaccccagcttcaagctcgtcatcgtcggcgatggtggaactggtaaaactacatttgtgaagaggcatctcactggagagtttgagaagaaatatgaaccaaccattggtgtggaagttcatccgttggatttcaccactaactgtggtaagatcaggttctactgctgggataccgcagggcaagagaagtttggtggcctcagggatggatactatatccatggccagtgtgcgatcatcatgtttgatgtaacctcaaggcttacttacaagaatgttcctacgtggcatagggacctgtgcagggtctgtgaaaacatccccattgtcctctgcggtaataaggttgatgtgaagaacaggcaggtcaaagccaagcaggttactttccacaggaagaagaatctgcagtactatgaaatttctgccaagagcaactacaactttgagaaacctttcctgtacctcgcaaggaagctggctggtgatccgaaccttcactttgttgaagctgttgctcttaagcctccggaagttaccatcgacatggccatgcagcagcagcatgaagctgagcttgctgcagcagctgcacaacctcttcctgatgacgatgatgatctgattgagtagaaaggatcatgagtcttgaacttgagcaggagttgtgccttgcgtgttttaagttgttctagggtgaactcttgagttctcattgtctggatcatctttttctccttggatgtgttgcatcttttgagtgtggaaatggatggtactcctcgccatgaatttgctggctactttatacattgctttgtaactctgtttgatggt

SEQ ID NO: 26891 - DNA, 998 bp, Zea mays
  Clone ID: LIB4666-016-H6_FLI
ccgggctctctgtctctctaggttttttgattttagccgccgccgctgctcatctcacatccctcgagaagacgcctgctcctcgccgatcgatacgatggccgtcttctccgacctccacaccgccgacggcctcaagtccctcgaggctcacctcgccggcaaaacctatgtgtctggtgactccattactaaggatgacattaaggtcttcgccgcggtgccgtcgaagcctggcgctgagtttcctaatgccgcccgctggtacgagaccgtctctgcggctgtagcctcaagattccctggtaaggctgttggtgtaaatctgcctgcgggatcagctcctgcggcagctgctcctgcggatgaggctgaggatgatgatgaccttgatctttttggtgatgaaactgaggaggacaagaaggcagctgatgagcgtgccgccgctgccaaggcctcttctaaaaagaaagaaagtggtaaatcctccgtccttatggatgtcaaaccatgggacgatgagactgatatgaagaagctggaggaggctgtccgcagtgtccagatggagggtctgacttggggagcatcaaagcttgtgcctgttggatacggcatcaagaagatgactatcatgttgacaattgtcgacgatcttgtgtccatcgacactctaattgaggaccaccttacgcaagagcccatcaatgagtacgtccagagttgcgacattgtggctttcaacaagatctagagttcagtttctgagattgggcaacggcagcggctcagctcgtcaagtttgtgctgggatgccagtttatcccttctagtctattacagaaatgttgttcggagctgagtctattataaacatcttggtctgagtttattgttgagtggtgccagtttttttcaatatacatttatcttaaaaacagcggtactgatgtttttttgtctaaagttaatgagtttgcaatggttctgagtcg

SEQ ID NO: 26892 - DNA, 958 bp, Zea mays
  Clone ID: LIB4666-018-B10_FLI
ccgggcgttttctagggttttgctgctctccgaccccgagctccgaaggccgcagcatcaggcgcggcccccctcgcgtgtgaccgagatggcgctgccgaatcaggggaccgttgattaccccagcttcaagctcgtcatcgtcggcgatggtggaactggtaaaactacatttgtgaagaggcatctcactggagagtttgagaagaaatatgaaccaaccattggtgtggaagttcatccgttggatttcaccactaactgtggtaagatcaggttctactgctgggataccgcagggcaagagaagtttggtggcctcagggatggatactatatccatggccagtgtgcgatcatcatgtttgatgtaacttcaaggcttacttacaagaatgttcctacgtggcatagggacctgtgcagggtctgtgaaaacatccccattgtcctctgcggtaataaggttgatgtgaagaacaggcaggtcaaagccaagcaggttactttccacaggaagaagaatctgcagtactatgaaatttctgccaagagcaactacaactttgagaaacctttcctgtaccttgcaaggaagctggctggtgatccgaaccttcactttgttgaagctgttgctcttaagcctccggaagttaccatcgacatggctatgcagcagcagcatgaagctgagcttgctgcagcagctgcacaacctcttcctgatgacgatgatgatctgattgagtagaaaggatcatgagtcttgaacttgagcaggagttgtgccttgcgtgttttaagttgttctagggtgaactcttgagttctcattgtctggatcatctttttctccttggatgtgttgcatcttttgagtgtggaaatggatggtactcctcgccatgaatttgctggctactttatacattgctttgtaactctgtttgatgat

SEQ ID NO: 26893 - DNA, 684 bp, Zea mays
  Clone ID: LIB4666-018-C1_FLI
ccgtcggctcctccgacgggcgtcccaccgcaggggaatacagatcgtcgatccgctgggcttgcaaacatgtatatccgagtgaagcgcaacaagagtacctacttcattcaatgtgaaccaacagagacagctttgagcatcaaacagaagttgcactcgctgatagatcaacctcctagtagtcagcagttggtcttgtggcctagcagtgatgtgcttgaagactcaaagactttggcagatcaaaaggtggataacgattccattgttgcattggcactaagaaaagatgacggtgagtttgaggaagttttcatcgctaggccggaggatttcatgtcatcatcatgataaagattagtccatcatttctacaaagggaccactgcgcgttcttggagtggaccgtcgctctatgctggttcttctagaatctgggatgtggcttgcttgtccctttgggaggaaaaagaaaatcttttatgtgagatcccaaacaaccgttgtggatgatattaagctttgatttgacgctccaactgatgccgtgcttcttgtacctactggtgtctgtcttggtgttgggatcagagcgcacctaattgtccttttttgtaccagctgttgtacgtgaatccatctgtgccttcatcacctaatgcactcgctgttgctgctggc

SEQ ID NO: 26894 - DNA, 1565 bp, Zea mays
  Clone ID: LIB4666-020-E10_FLI
ctcgaggccggccgggaagccccgcaaaacccctaaaccctagctccccacccccagcctccccgcggcttccagcgattggaggcgaagcagccgccatggcgatcctccttaggcgcgcgtcgctgcggcgcgtcatcgccttcgccgccgcctcctcctcctcctcttctttgcactctgagatttataagcaaggggtttgtggatccatgtttcattgccgagagttcgcatcaaaagccaaaaaaaagaagtcaagtggaacagactccgatgaggagagtatgtcaaagaaagacttggctttacaccaggctatcgatcaaataacgtctgcatttgggaagggggcaataatgtggcttgggcgttcgcaaggccttagagatgtacctgttgtgtctactgggtctttcgctttggatatggctctaggaactggtggtcttccaaaggggcgtgtcatagaggtctatggtccagaggcttcaggcaagacaacacttgctctacatgtcattgcagaagcacaaaagaatgggggttactgtgcctttgtagatgcagaacacgctttggatccagctcttgcagagtcaattggtgttgacactaacaatttgctcgtctctcagccagactgcgctgagcaagcactcagtcttgtggacacactgattcgaagtggatctgttgatgttgttgtagtagacagtgtagctgcgcttgttccaaagactgagcttgatggtgagatgggtgatgcacatgttgctcttcaggctaggttgatgagccaagctcttcgcaagcttagccactcactttcactttcgcagacagttttgttatttattaatcagatcagggccaaggtagccacatttggatttggaggaccaactgaggtcacttctggtggtaacgccttgaagttttatgcttctgttcgcttgaacatcaggcgtattggttttttaaaggaaggtgaagagacaataggtagtcaggttgctgtgaagattgtaaaaaataagcatgccccacccttcaagactgcacagtttgagcttgaatttggaaaggggatatgccgcagttctgagctttttgaacttgggttgaagcacaagcttatccaaaagactggcggtgcatattatagattcaatgatatgagtttcaaaggtaaaaataaccttaaatcttaccttactgaaaacaagagtgttgcaaatgatctggagacgaaactaaggagattgatgggaaccgaagcacctaaagagcaggaggcagaagacagttcgccgagtgatttgcctgaagaggttgtcacacctgaagcatcctcagaagaggatatgggagtcgtaatcgaggcttgaccagtgatctgacgtgctggcaagcgagaccagaatttctggagctgttcctgtaaaacaatattttgggtcctgaagtcaccaccgcttggatcgacatgaccctgcggtgttctggtgattccattgtaacagacttcagcccttaccgtgcttttacagtagtgtagcatg

SEQ ID NO: 26895 - DNA, 1305 bp, Zea mays
  Clone ID: LIB4666-020-G2_FLI
ctcgaggccggccgggaatgccggccgggaccagtggtgtgatgtcactgattctgatgataggattcatcgtcgtctcatccgtccgccccttgggatgatctctagcagtgcatccctttctctgctctccggttattaaccttccataccactcttctctgcctcacactcctctcatgccccaatccacgcgcaggaatggaacttggcgccaccactgccctctaccctctgcaccgctgcaaaaccatttacctggtcaggcatgcccagggcattcacaatgtcgcgggggagaaggacttcggcgcgtacatgtcacatgaactgttcgatgctcagctcactcctttgggttggaaccaagtcgatggtctgcgtgagcatgtgaagaaaagtgggcttgcagaaaagattgaattagttatttcttcccctttactgaggactatgcaaactgcagttagtgtctttggtggtgaaaagtatactgatggtgtaaatgcacctccactaatggtcgaaaatgccagacacagtggccgtccggcagtttcaagtttgaactgccccccatttattgcagtcgaaacctgcagagagcacttgggtgtccatccctgtgacaagaggaggagcataacagaataccggcctctctttcctgcgattgatttttcattgatagagaatgatgaagatgttctttgggaaccagatgtgagagaaccaaatgaggctgtcgcattgaggggtatgaagttcatggactggttgtggacaagagaagagaaagagatagctattgtcagtcacagtggtttcttgtttcacaccttaagcatgtacagcaaggagtgccatccaaccataagagacgaagttagcaagcactttgcaaactgcgagctacggtcgatggtgttggttgacagaagcatgcttgggtcatattcctcaagattcaactatgctggcaagaatccaaccggactagatgtgccaagtgatattgcagataagaagcaggttgacgaagctcagaagaactaaggcaaccttgaaagcataccatatatgacttggattatcaagaaattctgacctttgcgaagcttgtttgctttgaagaggacaagctaagagggcatctacagatagagtttacgcataccattttgttagtcaagttgaactacgcagcaatgtattagcatgtctgctcttttgtctcagcctacattgagattcagggcattggactaggatcatctatttatgataataataaccggatcaccc

SEQ ID NO: 26896 - DNA, 879 bp, Zea mays
  Clone ID: LIB4666-023-E12_FLI
ctcgaggccggccgggagggcattatagcattgacagatcgttcatcgtagcctcgtccagtcgtctcccgggatcttctccggctataaatttccgccccaattctccaatccagatgcgcaaacatcgaatcgtctcgctcgtggctgccctgctcatactgcttgccctcgccgtatcgtccacccgcaacgcacaggaggattccatggccgacaacaccgggacgttggcgggcggcatcaaggacgtgccggggaacgagaacgaccttcacctccaggagctcgcccgcttcgccgtcgatgagcacaacaagaaggccaatgctcttctggggttcgagaagcttgtgaaggccaagacacaagtggttgctggcacgatgtactatctcactattgaagtgaaggatggcgaagtcaagaagctctacgaagctaaggtctgggagaagccatgggagaacttcaaggagctgcaggaattcaagcctgttgaagagtgtgctagcgcctaaggatctctccttcaccatgtgcgagcctgaagctcaaagcaaagttgcagaataaggagccgcctcacaacatgctagaccatgctcccttgtgtaatttcataagactacaacccttttagggcttgttcggttgtgtctgtatctaagggaattgaaggtgattaaatttccttctatacaaatagaggggctttaatcccctccaatactcttcaatccactcctaatcgaacaagcacttaatatgatatcttagattgccgtacctgtgtaatatcatgaataaaatttgctattatggattctaaggtttatgaactaccatacatggcagaatcctcatgttactttgccg

SEQ ID NO: 26897 - DNA, 1436 bp, Zea mays
  Clone ID: LIB4666-024-H1_FLI
ctcgaggccggccgggcgaagaggagtgctccaggtttataccggcggctctctgtttctcgaatccccgatcctatctcatcgaatagaaactgttccgctcccactccgatcggattcggtgggacggtggcatctatgcgcccgcggcaccgtcgctcaaactgtataaacctgcgctcgaacacttcgagctcacccgcaacctcctccgggaagcgcgatcgccatctcgaaggagctgagatccaagattccaagctcttctgtcagttgagggaagttgaagcaaaaatgttttacgggggatatgcttaccatggcaactcgtttgagcaaacataccgttgttatccagcatcgttttttgataagccacacctggaaggcggtgataaagtaataatgccaccttctgcccttgatcgtcttgcttccttgcacatcgagtaccctatgctatttgagctgcacaatgatgcaacccaacggatttcacactgtggtgttttggagtttgttgcagaagaaggcatgatcatcatgccctattggatgatgcaaaacatgctgcttcaagagggtgacactgtccatgtcaaaaatgcgactcttcccaagggcacatatgtgaaattgcaacctcacacaactgattttctggatatttcaaacccgaaagccatcttggaaaagactttaagaaatttctcctgcttaaccacgggagacagcatcatggtagcctacaacaacaaacaatattatattgatattgttgaaacaaagcctgcttcagcagttagcattattgagacagactgtgaagtggactttgcacctcctcttgattataaagaacctgagaaactacgacaaccaacagttcttgcaagcaaggcacctgctgaagatggcaacactgcagcagaggatgaaccaaaattcaaaccatttactggttttggaaagcggttggatggaaaagcctcaaaactgcaagcatcagaggttccttccactgcactttctgcaccttcagattcaaacaaaagagcaaatcagcaaatctcagcaccggcagcttcaggagctagtagttacagtcgacagaaaactgggaaacttgtttttggttcaagtgcaagcaacaataaggaaccacaaaaggctcctgctaaagaggagcaacccgcaaagaaggacgacgagccgaggttccaagcgttcagcgggaagagctattcattgaaacgttagctgcttcagttaaccttgaaattcgccgctactctttcgtttgttgcatggtgggtgttctggcacctggtcaccaccatgtagatatgaattgaagtatgtatatgcttatcttgatggaaacatgacagtctgtttatttaagcccaaaagtttaaaacagcgctattgttctt

SEQ ID NO: 26898 - DNA, 952 bp, Zea mays
  Clone ID: LIB4666-024-H5_FLI
ctcgaggccggccggggcccctgccctcgcctgctgaaggaagccgcctttttggagtttggactcgggaggacagcctccgcactttccgtccgtcgcgaggaattcctgcccgggcgggcgtagagcagggatggctggaaaaggaagctatgtacctccacaatatattcccttatacagcctagataccgaagaggatcgtgtccctgccgtggaagagaaccatgctacgcgccctaaactaaaccaggatccaacacaatggtcatctggcatctgtgcctgttttgatgacccccagagctgttgtattggtgcgatttgcccctgtttcctttttggaaagaatgcacaattcttgggatctggaactcttgctggatcatgcactacgcattgcatgttgtggggccttctcacaagtctatgctgtgtatttactggaggtctagtattagcagttccaggatctgccgttgcttgttatgcttgcggatatcgcagtgcactaagaacaaagtacaatcttccggaagcaccctgtggcgatttgacgacacacttattctgtcacttgtgtgctatatgccaggagtacagggagatccgtgagagaacaggcagtggctcctcaccagctcctaatgtgactccacctccagttcagacgatggatgagctttgatctttaactgatatgaatgtatgttatctgacaaactttggtgtgtggcctggtgactagtgctgcctttgcctgttggcattttgacatatttttgttcttgggctctcacaacgctgctatgttgtttgtagagttgtaaacacgttttgaactagtgaaccactgacagttcacggaagttgtaacacagttgtaccatggaactgtagtagaattaagtgtattttttttgctatttatataggtgagaggatgagaagg

SEQ ID NO: 26899 - DNA, 970 bp, Zea mays
  Clone ID: LIB4666-025-E7_FLI
ccgggaaaactccgtttcgaattctagggttttgctgctctccgaccccgagctccgaaggccgcagcatcaggcgcggcccccctcgcgtgtgaccgagatggcgctgccgaatcaggggaccgttgattaccccagcttcaagctcgtcatcgtcggcgatggtggaactggtaaaactacatttgtgaagaggcatctcactggagagtttgagaagaaatatgaaccaaccattggtgtggaagttcatccgttggatttcaccactaactgtggtaagatcaggttctactgctgggataccgcagggcaagagaagtttggtggcctcagggatggatactatatccatggccagtgtgcgatcatcatgtttgatgtaacctcaaggcttacttacaagaatgttcctacgtggcatagggacctgtgcagggtctgtgaaaacatccccattgtcctctgcggtaataaggttgatgtgaagaacaggcaggtcaaagccaagcaggttactttccacaggaagaagaatctgcagtactatgaaatttctgccaagagcaactacaactttgagaaacctttcctgtacctcgcaaggaagctggctggtgatccgaaccttcactttgttgaagctgttgctcttaagcctccggaagttaccatcgacatggctatgcagcagcagcatgaagctgagcttgctgcagcagctgcacaacctcttcctgatgacgatgatgatctgattgagtagaaaggatcatgagtcttgaacttgagcaggagttgtgccttgcgtgttttaagttgttctagggtgaactcttgagttctcattgtctggatcatctttttctccttggatgtgttgcatcttttgagtgtggaaatggatggtactcctcgccatgaatttgctggctactttatacattgctttgtaactctgtttgatgat

SEQ ID NO: 26900 - DNA, 726 bp, Zea mays
  Clone ID: LIB4666-025-H10_FLI
ctcgaggccggccgggaacctggggctagctatatagtaataccatcccacctcgctcctcaaaaccctagctagcgccgccgccgccgcagactcctccttttcgatcccttcgcaaagcgccgccgtcgccccatccggcatggctccgaagaaggataaggccccgcccccgtcgtcgaagcccgccaagtccggcggtggcaagcagaagaagaagaagtggagcaagggaaagctaaaggagaaggtgaacaacgcggtgctgttcgaccaggctacctacgacaagctgctctctgaggtgcccaagtacaagcagatcaccccctccatcctatccgagcgcctcaggatcaatggctccctggctcggagggctatcaaggacctgatggcgcgtggcctcatccggttggtctcggttcactcaagccagcagatctacaccagggcaacgaatacctaaggatgggattcccttgtttgccctctctgtaggagctcgtcttctttagaacagttgccatctctgtcaagagtttgctaatgctatgttagatgagtttctcacgtggctgaaacgtttcagagagtttgcgttagtttggcttgcctattataccttacctggcctcaatagcctttttctttgatggatagattttatgttaccttgagttcccgtgtgtttgcagcttctatggaaatctgccttgaaacgcg

SEQ ID NO: 26901 - DNA, 1250 bp, Zea mays
  Clone ID: LIB4666-027-A6_FLI
ctcgaggccggccgggactcgaacaatactactacgactactataaatacaggagaatgttttgccgcatgtttttctttttaatttagtgcacgatttgttgcatcgtagccaactagcaacgacaacccagctagtgattcggttgccgccatggcttatttgctcaagagcaggagtgaaccagtgcagcagctgcgggtacccgcgtcttcagaagaacagcagagaagggtaaatgaggtccgggagctccttggcgatctgccgacagagatgccgaacttcctttctgatgccactatccgccggttcctccgagcaagaaactggagtacgatgaaagctaccaagagcctcaaagaagctaccagttggcgacgtcagtacaagccagagaaaattcgttgggaaagcattgccgacagtgagaatgaggctaggagagcctacatacctgactaccttgacaagaaaggaagaatggtcttcgtaacacttccaacaataaagtccaaatcttcagagaaggatcatctaaagtatctagtgtacaacttggaaaacctgctcatcgattgtgcagatgcagaagaggataacgttgtttggatctcggatttcaaaggctggtcaatatcaagcacaccattttcgttgacccgacaatcgctgcacataattcaacaatattatccaggattgatagcagttggtattctaaccaacgctcccaaaatttttgaatccttttggaagataatgaaacatttcctcgagccaaaaatggacgaaaaagtgaaatttgtgtacaacgacagttcggagagccagaagatactgggcgacatgttcgacctggacgagctggagcatatatttggaggaagaaacacggccgactttgacatcaatgtgtatgcagagagaatgaaacggcgagatcggatacggggagcttcgacagaggataatggcgaggccacctcttcccgatgttggacgaagaccacgagaaactccagttctgtttgaagagcgcagtaccactaatctggacgaaggttgaaactttagtgttatcctatatactgtatatgctctgagccacgcgagcgcggttatatgataaaactgcttagcatttatagttatgaacacaaagagtgttaactttaaggatctgcgactcgactcctaaaagaatgtaaaggctagttcggaagtttgagaaataaacctagggttcg

SEQ ID NO: 26902 - DNA, 1026 bp, Zea mays
  Clone ID: LIB4666-028-G9_FLI
ccggggccaaactccgtttcgaattctagggttttgctgctctccgaccccgagctccgaaggccgcagcatcaggcgcgccccccctcgcgtgtgaccgagatggcgctgccgaatcaggggaccgttgattaccccagcttcaagctcgtcatcgtcggcgatggtggaactggtaaaactacatttgtgaagaggcatctcactggagagtttgagaagaaatatgaaccaaccattggtgtggaagttcatccgttggatttcaccactaactgtggtaagatcaggttctactgctgggataccgcagggcaagagaagtttggtggcctcagggatggatactatatccatggccagtgtgcgatcatcatgtttgatgtaacctcaaggcttacttacaagaatgttcctacgtggcatagggacctgtgcagggtctgtgaaaacatccccattgtcctctgcggtaataaggttgatgtgaggaacaggcaggtcagagccaagcaggttactttccacaggaagaagaatctgcagtactatgaaatttctgccaagagcaactacaactttgagaaacctttcctgtaccttgcaaggaagctggctggtgatccgaaccttcactttgttgaagctgttgctcttaagcctccggaagctaccatcgacatggctatgcagcagcagcatgaagctgagcttgctgcagcagctgcacaacctcttcctgatgacgatgatgatctgattgagtagaaaggatcatgagtcttggacttgagcaggagttgtgccttgcacgatttaagttgttctagggtggactctctcttgagttatcattgtctggatcatctttttctccttggacttgttgcaacttttgagtgtggaaatggattggaatagtcgccatgaatttgctggctactttatacatgtctttgttcataaaccttgttttaagatgaagttgtggcaatcctcttagtgctaatataatgttctattgtc

SEQ ID NO: 26903 - DNA, 714 bp, Zea mays
  Clone ID: LIB4666-029-B6_FLI
ctcgaggccggccggggtagcggcctgagggagaggaacgactgttacgagtcagcgcgggttgcgagttgcaggccgcaggagctcgcgctctgcaaaccttcatggcctccgaggcggtcgtcgttcacaccggcggttgccactgccggcgcttgcggtggcaggtcgaggcccccgcgagcgtagtggcgtggatctgcaactgctccgactgttccatgcgcgcgaacacccacttcatcgtccccgccgccaagttcaagctgcaggccggcgctgacgagttcatcaccacctacaccttcggcacgcacacggccaagcacaccttttgcaagacctgcagcatcacctccttctacaccccgaggtccaacccggacggcgtggccatcaccgtggcctgcgtcgaccccggtaccctgaagcacgtcgagtaccggaagttcgatgggaggaactgggaggattttttcaggaccagcgacatcgctggattctccaaggacgatgcagaggcggcggagtagcgggcagatgttctctgttgatctggtgttgtttcgtcatcagtacatcatctcagttctgaaggttgaatcaaattatgtccttttccttgaactaggtcattcttcatttttgcaatgcatctctttaccccgtgttaatgatgacatgacatcattttattaagctgttaatccctcc

SEQ ID NO: 26904 - DNA, 833 bp, Zea mays
  Clone ID: LIB4666-030-F7_FLI
ccgggagcggaaggtcccggcgctctcatccggtgaaaataaagaggggaaacggacaggagccgcctcaaatggacagcggaagcgattccgacggcgctcccgaggagctcacggctgtgcagggtgttgcgaagcacgaagagatcagtaaagtcgagaaagacagtgttctcagagtaacacgggaaggaaaggaacggaggaaacgttgggcccaacgaagaacatcctctaaaccagataagaaggcgccaaaggaagtagaagatgaagatactaaaaaaagtgaggagcatgaggagataaatactatgcctggcatgctccccactagtgtaattgaaattctagcagctcgtgagaagcaaaccttcgcatcagattccgaggaagaaaatgtaaagcagaaggtccagaggagaaagaagagaatgaaaactgatgggcctgaaactattctgctgaaagatgtccgttcaacgcaacacgtgaagaatgcccttgatttcttggagcataggaaaaatcgtgtcccaaggtcaaatgcagttttgaagaatgccagtaaggctttgcgtctcctgtcttcgaaaggtaattttctaagttaagcgtgtggtagaatagcacattttatgaatctgtgcttagaccatcctctcgacatcagacatggtcaagagacttaggaccaatgtgttggaatggaatctacctggcatgtgaaatgtaatgcagcatatccttttgtgtgaatgtgatgattagcacacatgttccttgtaagaaatccaaggtttgtaatcattgaatatatttgagtttgagtt

SEQ ID NO: 26905 - DNA, 804 bp, Zea mays
  Clone ID: LIB4667-001-E8_FLI
ctcgaggccggccgggcaggggcagttccgtacttgcgcgagctccacgcgcccacgcctgattctagtggtctacaacagaacaaccggggtccctccctgcgaattcgccgcaagtccaaagggcaaagggcaaagcggaagttgcggttggcctcgtcctcctcttctccgtcgcggctcagatctctgcgtgcggcgatggcgtcgttctcggaggctccccccgggaacccgaaagccggcgagaagatctttaagaccaagtgcgcgcagtgccacacggtcgacaagggcgccggccacaagcaaggtccaaacttgaacggtctttttgggaggcagtctggtaccactgcaggctactcctactctgcgggaaacaaaaacaaggctgtagtctgggaagaagacactttgtatgagtacctgcttaaccctaaaaagtacattcctggaaccaagatggtcttccctgggctgaagaagccgcaggagcgtgctgatctcatcgcgtacctgaaggaagcaactgcatagttcattgacatgccttttgccatgaagagaaaaattgttttgcagtttaataaaaaacattttagacaacttgggtcaccctgtttgaacagggtgcaaccacgtctcattattttcgttcttatggtgtccgtatggaatgcctaggtgtttagctgtgcacaaataacagttaaactttgacggctcctatttcaactgctggagaaatgccagtgccctatttttgaccaccagggtgtggaatggaaatcggtaatgcac

SEQ ID NO: 26906 - DNA, 1312 bp, Zea mays
  Clone ID: LIB4667-001-E9_FLI
tcagccgccacgcgacgcgaccaagtggacgaaccgcaacaggcaagtcttcgcttcgctcctctctgcggctccctccggcgagcggcgatggccttctcacccccgctgatcgactgggaggcggagagctaccctgcctacccagatttcgcggccattccccttttcgtcgtcttcttcctcgtcgtccgtttcttcctcgaccgctccgtattcgagtggttagccaggaagctgattttcaaggaggaggatgagaagaagcttggccctactacatatgcaggcaagagaaagatcaggaaatttaaagaatcagcttggaaatgcatgtattttctttctggggagctattggcattgtctgtgacgtacaacgagccatggttcacaaccacaagaaatttctgggttggaccaggcgatcagatctggccagatcaaaaaattaaattgaaactcaagacagtctatatgtatgttgctggcttttacacatactcgatatttgcccttttgttttgggaaataaggcgctcagacttcggtatttcaatgactcatcatgtagcaaccgtctgtctgatagcactgtcttacatattcagatttgctcgggtgggttcagttgtccttgccattcatgatgctactgatgtgttcctggagcttggaaaaatttccaagtatagtggccatgagttgtttgcagatgtttcatttcttgttttcgtcagttcttgggtactcctccgccttatatattatccgttctggattctctggagcacgagctatgaagttgttctgactctagacaaggaaaagcataaagttgacgggccaatatactactatgtattcaacagtcttctcttctctctacttgttctacacatatattggtgggttttaatgtatcggatgcttgtgaagcaaatacagtctagagggcacgttggcgatgatatacgatctgattctgaaggtgaagaggaacatgaggattgattgagctgtgtagagttggaagataataagtaacatggggatggattgagctgtataagttccaaaggcgaaaaggaatacgtggatggattgagctgtgtaaattctgaaggtgtatcaaatcattctgctgtttttcttctgtccttgttcttgataagtaacaataaattagtgcccttctctaggtgagcatcatcgatagatgtcacttgggcattatcattatctattgatgtaaaatcaggtcacattgcatagcacacacacaacagttaatggaaaatgttagcagtac

SEQ ID NO: 26907 - DNA, 938 bp, Zea mays
  Clone ID: LIB4667-001-F1_FLI
ccgggaaactccgtttcgaattctagggttttgctgctctccgaccccgagctccgaaggccgcagcatcaggcgcggcccccctcgcgtgtgaccgagatggcgctgccgaatcaggggaccgttgattaccccagcttcaagctcgtcatcgtcggcgatggtggaactggtaaaactacatttgtgaagaggcatctcactggagagtttgagaagaaatatgaaccaaccattggtgtggaggttcatccgttggatttcaccactaactgtggtaagatcaggttctactgctgggataccgcagggcaagagaagtttggtggcctcagggatggatactatatccatggccagtgtgcgatcatcatgtttgatgtaacctcaaggcttacttacaagaatgttcctacgtggcatagggatctgtgcagggtctgtgaaaacatccccattgtcctctgcggtaataaggttgatgtgaagaacaggcaggtcaaagccaagcaggttactttccacaggaagaagaatctgcagtactatgaaatttctgccaagagcaactacaactttgagaaacctttcctgtaccttgcaaggaagctggctggtgatccgaaccttcactttgttgaagctgttgctcttaagcctccggaagttaccatcgacatggctatgcagcagcagcatgaagccgagcttgctgcagcagctgcacaacctcttcctgatgacgatgatgatctgattgagtagaaaggatcatgagtcttggacttgagcaggagttgtgccttgcacgatttaagttgttctagggtggactctctcttgagttatcattgtctggatcatctttttctccttggacttgttgcaacttttgagtgtggaaatggattggaatagtcgccatgaatttgctggcc

SEQ ID NO: 26908 - DNA, 1171 bp, Zea mays
  Clone ID: LIB4667-002-G6_FLI
ctcgaggccggccgggatagcagacgaagttgtagttgctctcctccgagaaccctcgccgccgccacccaccggagctccggtttgcagttcttcgctgaaggccatggatcacgacagattgaattcgccgagcacgtcggctatttcgctggaggtgatgggccaccagctacatatttcacaggatccaaactccaagcaccatgggaccacggtctgggatgcatcaatggtgtttgtcaagtttttggaaaagaatagcagaaaaggtcgcttttgtccgtccaaactaaaaggaaagagagtgattgaattgggagctggctgcggtctatctgggttcggaatggccttgttgggtggtgatgttacaacaactgaccaagccgaggtgctcccactgcttatgagaaatgttgaacggaacagatcttggatctcacaatcgaactccgactcagattccgttggctcaattacagttgcagaattggactgggggaacaaagaacatatcaaggccgttgaacctccatttgattacattgtaggaactgacgttgtttattcggagcatctgttgcaacctctaatggagacaattactgcattatctggtcctaaaacaaaaatattgctagggtacgagatccgttcgacaactgtccatgagaagatgatggaaatgtggaaaagcaatttcattgtgaaaacggtctctagatcgaagatggatgtgaaatatcaacatcctagcatacatctctacatgatggacctgaaggcaccattgatccctgagattgaggctgccgacaatgggaactacgaggaagaggttgaggttgctgcgaatcaagaggaagacgaagatcctggagtgaagagcgaatcttgttccggctcgtcaccagaggctaagagcggcagtctggatggttgggaaatcagaaggtgtggggctatggctgcaaggcttctgaaggatgtgaaactgtaaacatgaatcctagagatcgttttccccccttggcagagaactctagagctcctttatgttgttgtccttgatagttgttgtactgcccatggcagtctatgttattgtatcttattccatcagtggatattgataccattccaaaagaaaaaggaaatctctctatcg

SEQ ID NO: 26909 - DNA, 1024 bp, Zea mays
  Clone ID: LIB4667-003-C9_FLI
ccggccgggctcttgatgtcagttcagtttacaagtacaagaataccactgttgatgttaaagtggacactgaatcaaatatctctactacattgaccgtgttggacgccttgccatgcacaaagcttgtcacttctgtgaagctgcctgactacaattctggaaaggtggagctgcaatacttccatgagaatgcaacttttgccactgttgttggcacgaagccttctccagtgattgatctttctgggacagtaggtgctcaaggagttgcatttggtgcagaagctgggtatgacactgctacgggaaaatttaccaagtacactgctgcaattggtgtaaccaagccagactaccatgctgcattcattctggcggacaaaggtgacaccattaaagtgtcaggtgtttatcacctggatgagaaacagaaggcctcagctgtggctgagctaacccggaggctttcaacaaatcagaacacactcacagttggtggactgtacacagttgattctcagacagccgtgaaggcaaggctcaacaacaatggaacgcttgccgcgcttcttcagcacgagcttaaacccaagtcactcttgacgatctctggtgaattcgacaccaaggccctggacagaccccccaagtttggcttggcgcttgcactgaagccctgatcagatcatcccacagcgattgctggtgaattttgaattctttggttgtttttcgcaaagctgtagccaataatccgttccacgaaccttttctgttattctggcaaacgtttggagcactgtggcttagatccggatgggtcgtctacaggaattttacctgcctgcttttattgttgaaagcatctggccgtcggtagatgtacattgtgcttgcttctttagcacctaggcctctgccactgtgttactgagtacacgctacggtaatcttttgcatgcaggactagcatgataattttgtgcggtgtttgatttaccgctctttacggtctaaaaag

SEQ ID NO: 26910 - DNA, 1038 bp, Zea mays
  Clone ID: LIB4667-004-F4_FLI
ctcgaggccggccgggccttcgtggcttcgtgcgttcaatttgcttgtggaacgtggaagaagagcgagaacgccaaacgagaaaagaaacccaagccttcgccatcaaaaaaaaaagaaaaaaagaaaaaaaaagagcagaaaaagtagagtagactacgacagcgtccggcgaggaggcggaggcgaagatgaggaagaagctcggcacccgattccccgcggctcgaatcaaaaagataatgcaagcagatgaggatgttggaaagattgcactagcagttcctgttttagtttcgaggtctcttgaattgtttttacaagatttaattgaccgtacttatgaaattactcttcaaagtggagcaaagacactgaattccttccacctgaagcaatgtgtgaagaggtacagttcttttgatttcctaactgaagttgtcagcaaggtaccagatcttggtggcgctgattcctgtggagatgaaagaggattacctagaagaagaaagtcaaatggcagtgacccagaaaatgatgaatcaagatctagtaaaatggccataagaaatgcaaacatcagccccagaggacgtgggaggggtcgaggcagaggacgaggtcggccaccaaccaagagaaaggaggttggttatgtacaatttgaagatgagagcagcatgtttgctgaacaaggtgagcccttgccaggagaggaaacagttcaagagatcaatggcaacgagaccatgcctcaaagcacgcaacctccagtagaggctccgccaacagcccttgcacaagctacaacaagttctaaggcggaagaagcgaacagtgatcatcagtcagattggcctatgccagatgccattggaagcatcggtgtcgtgccatctggttttggacatctgacagtgcaggttgaagatgaggactacgacaatgaggattagtcagggtcatcttctcattgtatgcactaacaggactgttctggtgttgtaaaatgtaaatatagtttgaaatagttgccgt

SEQ ID NO: 26911 - DNA, 1038 bp, Zea mays
  Clone ID: LIB4667-005-A7_FLI
ggttagttgggtaccctcgaggccggcccgaaggttctaggctcgattgaacaaattggagcggcactacactcctccacgcctccacccccagcctcccactgatctggcctctctcgagttaatcctagatcaatatgagaaggggctacagttacagtccttcaccaccaaggggctacaggagaagggcgcgcagtccaagtcctcatgatcattatggtggtcgtggtagggatctcccaaccagtcttctggtcaggaatctccgtcgggactgcaggccagaagacctccgtcgcccatttggacagtttggtcgagttaaagatatatatcttccaagagattattacactggggatccccgagggtttgggtttgtccagtattatgatcctgctgatgctgctgatgcgaagtactatatggatgggcaggtagttcttggtaggcaaataacagttgtttttgcagaagagaacagaaagaagcctcaagagatgagagctagggacagagtcaggggtcattcttatgatgacaggaggtattctcgctctaggtcccctcgttattataggggccgctctccttcacgcagccaaagctactcgaggtctccacctcagaatccaagacacagacttagagagaggtcctactccggctcacctgtggacagcagatcaagaagtgggagcccttatgaggatggatatcgcagatcatcacggagagagaggtctctttctgttagcggatgaagcagttttacggtctagagctattgctgtgaatctgcgcatggtggcctacttgctatgtctttctgaaccatatatgttctgtctagattatcattcccagtaccagagaagtatcgtgagactgtttgctgtactttctagtcttgaggatacagaagggggtcaccgattctctcagtagatggactaatgaccactatacgccagtccactgctttgtgtatttataggcagctttgtggtttgaataaaattatttgcatcgtgg

SEQ ID NO: 26912 - DNA, 765 bp, Zea mays
  Clone ID: LIB4667-005-B7_FLI
ccggccgggttttttccggcctcccattcctcgcgcggcgaccacccgattcgaagcgtgcggagagaccgaagaagcgggagagatggctcgtaccaagcagactgctcgcaagtccacgggagggaaggctcccaggaagcagcttgccaccaaggctgcccgtaagtctgcccccaccactggtggagtgaagaagcctcaccgctaccgccctggaactgttgccctccgtgagatccgcaagtatcagaagagcactgagctgctgatcaggaagctgcccttccagaggctcgtcagggaaattgcacaggacttcaaaactgatttgcgtttccagagccatgcggtgcttgccctccaggaggctgctgaggcataccttgttggcctgtttgaggacaccaacctgtgcgccatccatgctaagcgtgtgaccatcatgccaaaggacattcagctggcaaggaggatccgcggcgagagggcctaatcgccacctcaaacatcgtgacaaaaacatgaagtcctggggttattgttaatctggtgccattgtaaggacatatgagtagggtttgttttgtggatcgcaagtttctcttctgctactgttgctgctacctttgctggtgttattgctagggtcgaatacttaagttaactatgcgctgacagtctggactagcagtgttatgtgcgctgctggaccttgcgcgcaatgctgtggccgatttgttcgttaatgtcaagaattgtgtt

SEQ ID NO: 26913 - DNA, 1087 bp, Zea mays
  Clone ID: LIB4667-007-B12_FLI
ccggagtcgtgtgcccgagccgaggttccccaaacacgcacagcacacgaacacacaccgcgcccagctccgaggtgatcttccggcggccggcgagatgagccgtggcacaggcgcgggctatgaccgccacatcaccatcttctccccggagggacgcctgtaccaagtcgagtacgcgttcaaggcggtgaagtcggcgggtgtcacgtcgatcggcgtccgcggcgcggactccgtctgcgttgttacgcagaagaaagtcccggataagttgctggatcagacgagcgtgacacacctgttcccgatcaccaagtacgtcggattgcttgccactggccttacagctgatgctaggtcattggtttcccaagcaaggaacgaagcagctgagtttcgtttcaaatggggctacgagatgccagttgatgtgttagcaaaatggattgctgacaaagctcaagtttacacgcagcatgcatacatgagaccccttggagtagttgctatggtcttgggctacgatgaagagaaaaatgcccaactattcaagtgcgaccctgctggtcacttctttggacataaggcaactagtgccgggctcaaggagcaggaagcaataaattttctggagaagaaaatgaaggatgacccgaaattcacctatgacgaaactgtgcagattgcaatatctgcgttgcaatcagttctccaggaagatttcaaggccactgagatcgaagttggtgttgtgagaaaagatgaccgcgttttcagagctctcacgacagaggagatcgatcagcacctgacggcaattagtgaacgtgactgagatgtcatatgctgcacatttcagcgctgcacacactgcgccgtgccattgtgcttcggcagtcattaagtttcatagtcatcaaaggaactgagtgtaccatttcacgtttaagaccgaaaacaagccccctctcgatgtactcgtttcatatcgttctgtggttgattgaaattggcacggtttggttttgggttgctaaaatgctaactatatttgcatgtggccaatattttaaccgtttatatc

SEQ ID NO: 26914 - DNA, 1255 bp, Zea mays
  Clone ID: LIB4667-007-D4_FLI
ctcgaggccggccgggataggcggcggtgcaggtcctcctccatctctgtcgtgactattctagtttctgcgcatgccctcacggatctttagactccagggttcaacttcactgtgaatacgctgacgctacgagaagtcatcacggaaggggtctcgaagcaaggtgcaaagactcacctgccgtctctgatgggctttgctggctgggtatccatgctgctcttcctcctggtcgccggtgctgtagcaaatgaccagatcttcaccacttcaggtgtgccatttgggcggagttcgcgtgagccaagttaccgcgtcgaattccatcctgttgattcaccattccatccagagaatggtcaagaatcggtaccaatggctagtcatgatgggaaacgttataaatgctttctaccagttgaagaaactaaaaccatgaagtcaatgcttccgcaaaatgcaactaatgttataatagaaagtgaaaggagaattaagccaaaggagccagatgagttacttgaggttctcaaggaccagtgcttctacaggcatgaaggttggtggtcgtatgaattctgttatcatgggaaaatcaggcaggtccatgtagacgacgataaggttatccaagaatttgttctaggcgaattcgatgacgacgcgactgctgcataccatgaaaatatcacttctgagttagttgacgatgaccatcatgtgaaagatatatctcagaggtatcatgttcacttgtatacaaatgggactgtatgcgatctcacagatattccgcgggagacagaggttagatttgtctgctcggagcctactgtactgattagttcagtcaaggagatctcttcctgcagatatgttgtaacgattcaaagtcccatgctttgcaaaaacccgttattccaggaagaaaaacgaaccctctccatccactgcaatgagttgcctgctagagcggaatccagcgcggaggatgactcgcttccaaaagaagctcagatttccatcatccccgatcaggatgagctacatgatttcccagcctatgctacttgatttgcctccaataattatgtttgatgtagaaaaaaacaccattttggaggcgcaggggcaactgagcaacactatgtattaactatctcgtagatactacagcagaggctccttgtaaagcaggttgagacgatcattctgcagttcttattatataggatgattacgaaggtaaaag

SEQ ID NO: 26915 - DNA, 678 bp, Zea mays
  Clone ID: LIB4667-007-H10_FLI
gtggccccgtgttgcgttctcctgttcaccccgcgtcgtcttcgctctcacgatccctcggcagtcggcgacggctgggcgaccgccacttccgccttctcttcctactgagcgtctccaggcacgcttctgaattcggagttgccagcattcgctcgaggtgccggaccagatctcaccatcatgcaggctagcgatagattcaacataaactctcagcttgagcatcttcaagccaaatatgttggtacagggcatgctgatttgtctagatttgaatgggctgtaaacatccagagagacagctatgcctcttatattgggcactatccaatgctagcatattttgccattgctgagaatgaatcgatcggaagagaacgttacaatttcatgcagaaaatgctgcttccttgtggcctccctcctgagagagatgaagattgaggagctgttgcatagtttcagtgtttccaatgaccatttatgagattgtaacctctatggtactatgtgccatttgtgttaaagctcgtatgcctttgacttgtcttgcatcggtctctatcgtgatacataaacattcgtaacttgtatgcattgtaaacgaaatgctggttatgcccctttgtcatgtttttgtgatgcgttctcacaatgtgaaagaaaatttagtcg

SEQ ID NO: 26916 - DNA, 762 bp, Zea mays
  Clone ID: LIB4667-008-C3_FLI
ctcgaggccggccgggaacacagtccggaaggaccttttctcgtttttttctcccgctagcaccttgcctccttgcgatttgcgagcgccgcatcgacccccaccgccgacgaacgccgcgccgccgacgtcctgccttctcctcgccggcgagcgccgttccgctgtaccctccgtgattccgccccaacctctgcgtccgaatctcccgcgaaacagtcacggcgatggcggcggccggtggcgtttcaactgacgatgtcccgatcctgcaggcagagaacctcaccagcaacgtcaagtccgtctactacagtcgagcattcttgtcaatcattggtggagttgttgctggaatctggggattcacaggcttgatggggtttgtcttctactttctgataatgatggttgcatctattgggctcttagcgaagtcaaagttttcagtccaggcgtacttcgatagttggaccaggatttcaattgaaggagtttttggtggcctgatgtcattcgtgctgttttggacatttgcttatgacattgttcacatcttctgacggacatagaaagagctacactccggaggaaacacggaatcgtcgacgatgaacattcccaattggctttttgtacactcaatttttgtattggtaattgatatagtctgtagtgagactatatcggtgtagacctaagcaaagctcatgaactttgcatttccttggatgatccgtagcagttgcaatttttcatttc

SEQ ID NO: 26917 - DNA, 1137 bp, Zea mays
  Clone ID: LIB4667-008-C9_FLI
ctcgaggccggccgggactagagctggacccggtgcacgcagtaacttgaatccctcagtagcagcgcgtggtccgccaggtccactgtccgtctgtcctctggcgctcacgatccttttccctgtgtacaccgagctcacgcaggacaggagggagcggaggagatagacaaacagaaagagcccgtgtgcgtgacgcacggacgccgtgactccgccgcaaagagagggagagtccacgctctgaagaagcaacggcgacgtccccgacgacgagcacagctgcacagcaaactagcagcgccctcgtcagttccgtctcgttcccaaccactcctggattcgattcgattgacccgtccgctccaaatcgaatctaatcagcagttttggtgttgcggaagggagaaagagagaggagaggggcatggatcaggtgctcaacaaggtggggagctactggttcagcaaaagggccagcaaggaaatcgactccatcggcgacgacatcagctcgatctcaagcagcattggagggtcagccaaatggatggtgaacaaaattaaagggaagatgcagaaagcactgccagatctcctcaaggaatatgacatgccagcagggctcttcccacgggacacgactaactatgagttcaatgaagagacaaagaagctgacagtgtacatcccgtcagcctgtgatgttggttacaaggactcgtcagtgctgcggttcttcacctgtgtgaccggctaccttgagaaggggaagttttccgacatcgagggcatgaagaccaaagtgctggtctggaccaaggtgactgccatcaagaccgagggcccaaaggtccatttcacggcaggcgtgaagaagactcggagccgtgatgcctatgaggtcgtcagagatggtatcaccatagacaagttctagagcatatacctggcatgaaaaatgtgacgcggttattcatatatgcttctctcctctcggtacaccgaaattcatacaatatcgtgggctaattctgcatttgtacgaaagtttaatatgcttgacgtgttaatcacactgctagagcatgcgataaatcgcagttggttcattattaggaaattgcattgagctgg

SEQ ID NO: 26918 - DNA, 1467 bp, Zea mays
  Clone ID: LIB4667-009-F12_FLI
ctcgaggccggccgggatcttcttcttgcagccgaagcaaagtgagggcggcgagatgaacggcggcggggaggacgggaagcagcagccgcacctggtactggcgcacaagctgttcctcctgtcgcactccgacgtcgacgacctcgccaaggtcgacctacgcgctgacgtgttcgcggcagtcaaatccgatgacatggcagctctgtacgagtcgttggcggcggacggcgtactggagacggacgcggcgctgctggccgagatgcgcgccaggatcgacgaggagatccggaagctcgacgagaagattgctgatgcagaggagaacttgggtgagagtgaagtgcgtgaggcccatctcgccaaatccttatatttcataagggttggggagaaggagaaagcactggagcagcttaaagttactgaaggaaaaactgtagctgttgggcaaaagatggaccttgttttctacacactacaaattggattgttctatatggactttgatctcatctcgaagtccattgacaaagcgaaaaacttgtttgaggaaggtggtgattgggaaaggaagaacagattgaaagtatatgaagggttgtactgcatggcaactagaaacttcaagaaagctgctagtttattcttggattcaatttcaactttcacgacatatgagctattcacatatgatacattcatcttctacacagtcctcacgagtgttatatctctggaccgtgtatctctgaaacaaaaggttgtagatgcgcctgagatcttagccgtaattggcaaagtacctcacctctcagagtttctcaattccctctacaattgccagtacaagtcattttttattgcattctctggcttgactgaaccaatcaagttagagcgttacttgcagcctcattttcgctactacatgcgtgaagtgcgcactgttgtctactcacagtttctggaatcgtacaagagtgtgacaatggaagccatggctgctgcatttggcgtcacagtcgactttatagaccaggaactgtcacgcttcattgccgctgggaagctccactgcaagatagacaaagttgctggcgtcttggaaacgaaccgacctgatgctaggaacgccttctaccaggcaaccatcaagcaaggagacttcctgctgaaccgcatccagaagctgtcacgagttatcgacctgtaggggagagcccttcatgcaggacaggagcttgccttggttcctggagtgtacgagcggtgcttgactttcaatgggtctcagttgaagaagcttttagggatatttgtgttctgagaaattgtgttttgcactttttagcctaactacatgaagcccccaaaaaaatttcatggcgttgcttgtagacgtttcttcattgatgaattcatcccttgttttttcttgctggatattgttttgctact

SEQ ID NO: 26919 - DNA, 667 bp, Zea mays
  Clone ID: LIB4667-011-E10_FLI
gtacatatcctcctctgctgtccccctctggcgtttgcggggccagtgctttctcttccttccggccgcggcaatggcgtcggggaacaacaacaagcagaggagcgaggaggagtggcgcgtcgtactctcccctgagcagttccgcatcctccgcctcaagggcaccgagttaccagggacaggagagtacaacaaattctacggtgacggggtttataactgcgctggctgcgggactcccctgtacaagtccgccacaaaatttgattctggctgcggctggcctgcattctttgaggggcttccaggagccataaaccgaacaccagatcctgatggtaggagggtagagatcacatgtgcagcctgcggtggccatctgggccatgtgttcaagggtgaaggcttcaagacacctactgatgagcgccactgcgtgaatagcgtctcgatcaagttcagtcctggctcttcctaggtcatcttgagattctcgtgtctggagctgtgggaagtacagcaaagcgacgaataagatttattgagcatgtgtgcgtgcgtgcattctgctactctggctgtgagatgaatctattatcataagcagctgttactctacgtgattcgtcatttacatcagctgttactctggcgtgattacacg

SEQ ID NO: 26920 - DNA, 1224 bp, Zea mays
  Clone ID: LIB4667-012-B12_FLI
cgggatccaagtaccgaacactaccggccacacgctcgagaataggcggcggtgcaggtcctcctccatctctgtcgtgggttcaacttcactgtgaatacgctgacgctacgagaagtcatcacggaaggggtctcgaagcaaggtgcaaagactcacctgccgtctctgatgggctttgctggctgggtatccatgctgctcttcctcctggtcgccggtgctgtagcaaatgaccagatcttcaccacttcaggtgtgccatttgggcggagttcgcgtgagccaagttaccgcgtcgaattccatcctgttgattcaccattccatccagagaatggtcaagaatcggtaccaatggctagtcatgatgggaaacgttataaatgctttctaccagttgaagaaactaaaaccatgaagtcaatgcttccgcaaaatgcaactaatgttataatagaaagtgaaaggagaattaagccaaaggagccagatgagttacttgaggttctcaaggaccagtgcttctacaggcatgaaggttggtggtcgtatgaattctgttatcatgggaaaatcaggcaggtccatgtagacgacgataaggttatccaagaatttgttctaggcgaattcgatgacgacgcgactgctgcataccatgaaaatatcacttctgagttagttgacgatgaccatcatgtgaaagatatatctcagaggtatcatgttcacttgtatacaaatgggactgtatgcgatctcacagatattccgcgggagacagaggttagatttgtctgctcggagcctactgtactgattagttcagtcaaggagatctcttcctgcagatatgttgtaacgattcaaagtcccatgctttgcaaaaacccgttattccaggaagaaaaacgaaccctctccatccactgcaatgagttgcctgctagagcggaatccagcgcggaggatgactcgcttccaaaagaagctcagatttccatcatccccgatcaggatgagctacatgatttcccagcctatgctacttgatttgcctccaataattatgtttgatgtagaaaaaaacaccattttggaggcgcaggggcaactgagcaacactatgtattaactatctcgtagatactacagcagaggctccttgtaaagcaggttgagacgatcattctgcagttcttattatataggatgattacg

SEQ ID NO: 26921 - DNA, 1043 bp, Zea mays
  Clone ID: LIB4667-012-C7_FLI
ctcgaggccggccgggagggaaagggaagggatggccacagtgcgcctgctccgttgcgcctcctccaccttccttttcagcacctgcaccaatccgttgcgctcgtgctcccctctcgtccgccgccagcacccccgcgccgccatgaccacggactcctcggccgcctcgttccagaagatccagatccagcgcgaggacaccacttttgatgcttatgttgttggcaaagaaaatgctcctggaattgtggttttgcaagagtggtggggagttgactatgagataaagaaccatgcgatccacatttcccaacttggtggaggatacaaagcactcattccagatttataccgtggaaaagttgctctggatgttgctgaggcacagcatctgatggagggtctcgactggcagggtgcagtcaaggatatccaggcttcagttaaatggctgaagtcaaatggatcacccaaggttggtgttactggctattgcatgggaggtgctttatcaattgcaagtggagttttagtcccagaggttgatgctgttgttgctttctatgggacaccatcttctgagcttgctgatccttctaaggctaaggctcctatacaggctcatttcggggagcatgacaattttgttggtttttcagatgtcactgcagccaagtccctggaggagaagctcaaatcttccgggatatcatatgaagttcacatataccctggatgttcgcatgccttcatgaacacttcgcctgaggcactcaagaggaagaaggggatgggtctgactgatgagaaccaggaagccgtcgacctggcctggtctcgcttctcttcttggatgggccggttcctcggatctgcttgattatgtgccgcgtgatgatgtgtggagtcaggtcccatgaataaaatagaataaaataaaatgttcagattcaggaaccatgcaaatggactgggctgtacggttctctggatttgcttgtccttctgtttataattatctacctcagtgtgatttcccg

SEQ ID NO: 26922 - DNA, 1618 bp, Zea mays
  Clone ID: LIB4667-016-A9_FLI
gcccccaaaccaaagggaaaccctcaccacgcttcccgaaacttctcctttctccatcctcaaccctactcccccttcatccgcacgaacgaagcagcgcgagcgaggagcagacgatccttcccgacctcgaagcctaccccccttccagctgcggccatggcgaccgtcatgcagaagatcaagggcatcgaggacgagatggcaaggacacagaagaataaagccactgctcaccatcttggtcttcttaaggctaaacttgcaaaattgcggcgggagttgctcactccaacatccaaaggtggtggtggtgcaggtgaaggatttgatgtgacgaagagtggagatgcacgtgttggtttagttggctttccttcggttgggaaatcaacattgttgaacaagctaacagggacattttcagaggttgcttcctgcgagtttacaactttaacatgtattcctggagttatcatgtataagggtgctaaaatccagcttctagatctcccagggatcatcgaaggtgctaaagatggaaagggcagaggaagacaggttatcagcacagctaggacatgcaatgttattttgattgttcttgatgccataaaaccaataactcacaagcgtcttattgagaaggagcttgaaggatttggcattaggttgaacaaaacaccacccaatttgactttcagaagaaaggacaagggtggaatcaacttcacatcaacagtgacgaacacacatttggaccttgatacagtaaaagcaatctgtagcgagtacaggatacataatgctgatgtctccctgagatatgatgctacagcagatgatctcatagatgttattgaaggaagccggatttacactccttgcgtatatgttgtcaacaagattgatcagataacactcgaggagctggaaatcttggacaaacttccccattactgcccggttagtgctcatcttgaatggaatcttgatggacttctggagaaggtatgggaatacttggatttggttaggatatacacaaaacctaaagggctgaacccagattatgaggatcctgttatcgtatcatctaagaagaaaaccgtggaagatttctgcgacagaatccacaaggacatggtcaaacaatttaaatacgctctggtatggggttccagtgtgaaacataagcctcagagagttggcaaggagcatgagcttgacgatgaggacgtcgttcagatcattaagaaaatataggcgtatcatgtggtggaacaaaacctgttttttctggaaaactgggagcgttgaggattttgttgagtagtagcctcgcgagaagagcttgaactcggcctttgcttgttggtgaggctcatatgtaatgttccctgttctcagaaaatttgctttgatccaaagacaatgtgagtcggcatttacttatatacaacgagtcatgtagctgtgatgtaacttcctctaacttggtgccatgtggactggggtcaccgatgtgtgctgccaagtgtctggcccaaccgttgaacacgtggagagatgctctccatatctttagaggaggatataaggtgatttgatgatttag

SEQ ID NO: 26923 - DNA, 1029 bp, Zea mays
  Clone ID: LIB4667-016-B1_FLI
ccggggaaggttctatgctcgattgaacaaattggagcagcactacactcctccacgcctccacctccagcctcccactgatctggcctctctcgaggtgagcgcgcctttaatcctggatcaatatgagaaggggctacagttacagtccttcaccaccaaggggctacaggagaagggcccgcagtccaagtcctcatgatcattatggtggtcgtggtagggatctcccaaccagtcttctggtcaggaatctccgtcgggactgcaggccagaagacctccgtcgcccatttggacagtttggtcgagttaaagatatatatcttccaagagattattacactggggatccccgagggtttgggtttgtccagtattatgatcctgctgatgctgctgatgcgaagtactatatggatgggcaggtagttcttggtaggcaaataacagttgtttttgcagaagagaacagaaagaagcctcaagagatgagagctagggacagagtcaggagtcattcttatgatgacaggaggtattctcgctctaggtcccctcgttattataggggccgctctccttcacgcagccaaagctactcgaggtctccacctcagaatccaagacacagacttagagagaggtcctactccggctcacctgtggacagcagatcaagaagtgggagcccttatgaggatggatatcgcagatcgtcacggagagagaggtctctttctgttagtggatgaagcagttttacggtctagagctccttgctgtgaatctgcgcatggtggcctacttgctatgtctttctgaaccatatatgttctgtctagattatcattcccagtaccagagaagtatcgtgagactgtttgctgtactttctagtcttgaggatacagaagggggtcaccgattctctcagtagatggactaatgaccactagctacgccagttccactgctttgtgtatttataggcagctttgtggtttgaataaaattatttgcatcgcg

SEQ ID NO: 26924 - DNA, 1143 bp, Zea mays
  Clone ID: LIB4667-017-A10_FLI
ccgggaccggtactcattgccatctctacgttctccagcaccgccgttgaacctcctccctattcccgttctctagcaccgccgttgaacctcctcccctctccctcttgcttccctctctcatcctctctgccgcttccccgctctccccaaactactctgtgccccgtcagatcgacctggactttggcgacagctacttctcgacgggcggcacgggcgtgctgctacttctgcttcctctcccacgcttgctgttgagcggttcaagcagagctgatggctacatcagagccagtacaagagagtttggtggtgcactactcacaacctagtaggccccgggtcctccttgctgcttcaggaagtgtagccgctataaaatttgagagcctttgccgtagcctctctgagtgggcggatgtccgagctgtggccaccacgtcatccttgcacttcgttgatagatcatctctaccaagtggcatcgttctttacactgatgacgatgaatggtctacctggaagaagataggagatgaagtcttacacatcgagctgcggaaatgggcagacgttatggtgattgctccattgtcagcaaataccctggctaagatcgccggtgggttatgcgacaacctcttgacctgcatcgtgagagcgtgggactacagcaaaccgctctttgttgccccagccatgaacacgttaatgtggaacaacccattcacggagcggcatcttcacacaatcaaccaactgggcatagccttgatccccccagttaccaaaaggctggcctgtggcgattacgggaatggcgcaatggccgaaacctcacagatccatacttccgtgaggctcgcgtgcaagacgcaaccgcacgatgcgagcagttcactcgcaggtcctgtcagtaataaccggccatctagctgatgcagcggttggccacttgattgtcaagcttaggaatttgttttatctggagtgttgtaccagatttttttcaactagagtttgtgtgtattgaattagggggaaaggttgttgtcacatgataacaataacttccaatgatgactctattcagtttgtaattgtctgtgggagtacaattatgcagctgtattgtctgct

SEQ ID NO: 26925 - DNA, 583 bp, Zea mays
  Clone ID: LIB4667-017-B4_FLI
ccctcgaggccggccgggaaccccaccgcagcacagcgccggcaaccgccgccatcgatcgatcgcccggaaactgacctctaccgatgtctggagccggcgaggaggataagaagcccgcggagggcggcgcccacatcaaccttaaggtcaagggacaggatggcaatgaggtgttctttcgcataaagaggtccacccagctgaagaagctgatgaacgcctattgcgaccgccagtctgtggacatgaatgccattgcattcctgtttgatggccgcaggcttcgcggcgagcagacccctgatgagctggagatggaggacggcgacgagatcgacgccatgcttcaccagaccggaggcagcgttcctagcaccacctaaaagcagcagctgcggagcctcgttttgctctccgccctgcgtagtactaaacaaaagggaaaaagtctttttaaggaacttgtgatgctctggctccttgtgccattgctgagggacatccttagcctttatttagtggtatggtttggtactttgttctgtcatcactcgtttatctatccctaatacatgccgcc

SEQ ID NO: 26926 - DNA, 1155 bp, Zea mays
  Clone ID: LIB4667-018-A12_FLI
ctcgaggccggccggggaagaaattaagaatacgccaggctccttgtcgctcgtaaaatggaggtcgcgacggcgacggaggcgtctgcgccggcggcaagcggcggcgcggcggggcagagccacccgttcccgtggctagacgctgccatctctgagccctactacttcctgcacctcctcgccttcttctcttactttgcggcccgcagcgcggcgctctccgccgacgacggaggggagctccacgaccgcctcctccgtagggagatccaggcagtgctcgtgttcctggtgctcttcgtagtgaagattgtgaaagaggaaacctgggaagcagtaattgctgactcgttgctttatgcgaagggtttattgctggcagttactttggttattgattgttggctggcctttgcctactttctgggatttcttgttatatatgctgtagctcaacagccaccttatgatggcctaggccattcaaatcacttgaccccattgcaacttgaaagtctgctaactgaagagccaacatcacgattttggctggtagaattccgaacttcattttcagcaaaatgtgtacaagcaagcagcattctgcctgaactttctatcgtgtactccaacaagaacatctcttttggaacaattgaccttgggcatttcccaaatgctgcagcaaagtttgggatatccatgtgggatcatctccccacttacatattgtttgacaaggtgactgaagtttctcggtttccagaaatcacaagtgaatcaaaagtatttgtgccaaaagttactaagaaacttctttgccagcattttgatctcgacagacgattgattggatacctatccacctgatctgtcaccgatcccatatgcctcaaaggatggggacatctcccttttttgtcgctgaaccggacatctgtgtgtcagcagcaatcacttcaggggggtatcgtgagccttgtattattcgccgaactgcttattcccttttaattaagtcccagtaaactttgtggcggaaaaacacacacacacacacaaccaatttctgtctaatctgtctgatactgaattatagaatttcactaccatgcagaggtttctgtaatgatttgccgactatgttttgtc

SEQ ID NO: 26927 - DNA, 553 bp, Zea mays
  Clone ID: LIB4667-020-B4_FLI
tcgaggccggccgggatcttcctttcctctcctctctcacgagcttctctctcacatctcgtactgccgcatcgtcccacacgtccctccgtccatggtctcaccggcgttcccctcccccgctccccccattccccccgcattccgtccgtggtctcatgggacaagacggtgaggctttacgacgctgacgccaacgtgctcaagagggagttcatgcaccctggggccatcctcgactgctgcttccacgacgactcctcaggctttagcgccggagccgaccacaccattcggaggttggtattaagctcgtccaaggaagatgttttggggcggcatgatggtccagttcgttgtgtggaatactcttatgctgcagatacttttatttctatggatttgcttttggatttcttttctagcgtttctttttcttctgcaaggtacttctgcagcctgatgcagctataaatagaacacattgatagctatttttgtacttgaattccaaaaacactatatatagttatgcagttatgcttttgaaagc

SEQ ID NO: 26928 - DNA, 919 bp, Zea mays
  Clone ID: LIB4667-020-C6_FLI
ctcgaggccggccgggatgccttcaattgaagcaatccgcaaaccctttctactttcttcccctgctcgattcgcgcagctgcatcaccggcgacggcggcgatggcacggaggagaaagacggacgccccgccgcggctggacgaggcagatcgcacgctctactccaccttctgcggcgccgccaactccctctcccagctctacgcgcaggccatggcccagcagaagctcaacttccatgccggcgagcgccacgccttagaaaagctctaccagtggatcttgaggaagcacgatgaagaggctaggctcactgtggctgaaataatgtctcatatccagcatgagatagactatgtaggtactgatgcacatgtctccccaagagtacctcagcatcctcagattgcaaatccattcgccaattcagttgtcccacctggaactggtttgtatgggcaatcagcagctgggtttgctcctagacccagtgtcactgaccagtcgaagaatacaatattctctaatgccttatcaagcccagtgcgcaggagtctccagaactctcataccactcaaggtgctggcaatggaggccggaatgcagaagcaaacttagcaggtgcaaatagagaggccaattctacaagctccaacgacacttctatggatatggtttcagacacgaatgaattctaccagtgatttgcagtaagatgcttctgcgatcaagcagcatcgcatgccagtgttttttttgggcctttcctttcgttgaggttttcacataaactctcaccattatgtgagcaatgtagttgtatatctggtgattctggtttgttcaagttggtatttaagttgaaacgtgttgggcatgctttattccccacaatgtgttcgtgagttcaataat

SEQ ID NO: 26929 - DNA, 1274 bp, Zea mays
  Clone ID: LIB4667-020-E4_FLI
ctcgaggccggccgggcttctaccaccgagcgaaccccagcacaccggtccagtgcccagcctccgtccctctccttcccttacctcgcctcgtctcctctccttgagatctccagggtacgagcgcattcgcgattttggccgcctccgccgccgtccgggaagatggcgggtctgggaaaggcgatgtacgcggtggggttctggatccgggagactggccaggccctcgaccgcctgggctgccgcctgcagggcaagtacttcttccacgagcagatttcaaggcatcgcaccatcatgaatatctttgacaaaacccctcatgtgcataaagacgcatttgttgctccaagtgcatcccttattggtgatgttcaagtcgggtcaggagcttccatttggtatgggtgcgtcttaagaggggatgcaaacatcatacaaattggatctgggaccaatatacaagacaattctcttatacatgcggctaaatctaatctaagtgggaaggtctttccaacaaccattggtaataacgtcacagtaggtcatagtgctgtgttacaaggatgcacggttgaggatgaggcttttgttggcattggggcaaccctattagatggtgttgttgttgaaaagcacggaatggtggctgctggagccctcgtacggcagaatactaggatcccttgtggagaggtatggggagggaaccctgccaaatttctgaggaagctcacagatgacgagatcagtttcattgcggaatcagctgccaactattccaatctgtccaaggtccatgctgctgagaatgccaaacctcttgaaaagattgagtttgagaaggtgttgggcaagaagtttgctcaccaggatgagtatgattcctcgattggcgtcactgaaggggcaccaccagagctcacgtccccaaatccagcccaatgaacctctgtttctgttttctctttggcgccttaatcattttctgttggacagtgctggatcgttgatcggggtactgttccatgacactggtggtttatgtttacttttcctccccaataatcttggatcgagcgatgttataaagctggccatgcacttcttccagattctgtattcggtatgtttaagatgtgctccctttcataacctctgaagagtagttttagcaccgtccatattcgtcatgagttctgtactatgctttctggcccggcgtgtatgaaccatctttataaaaatctcttaagcacacattactc

SEQ ID NO: 26930 - DNA, 1010 bp, Zea mays
  Clone ID: LIB4667-020-H5_FLI
ctcgaggccggccgggacaaccaacttcagaattctgaaagggacacaccgtcataccgacagcgaagacctttgccgtttttattcttcctccgtctctgcctgtacagcggcggcttggccacctctgagcctcaagccctcaacctccctcttcggcgcgtaacgtcagtcctcaggtattggcagcataaagtgttagatttgtccttgattgaggtaccccttcaaaggtcaagatgttgtggcgcgcagtacgcagtatggatgtaataatgcattcttcgagtttccttcttccgaaactgtatcaacctgtcaacaaaccagtcaagaactatgctttagttgttctaaaccagcatcttccacgattcatgcctcgactctgggatcatgcaaacttgaggatctgcgctgatggaggagctaatcatatttttgatgagatgtatcagataaccaatgatgaagacaaaaaaagcaccagaaataagtatgttccagaaataattgaaggggacatggattctataagacctgaagtaaaactgttctactctagtcagggatccaaaatttctgataagtcacataaccaggagacaacagatctacacaaatgtatttctcgaacccatcattgtacgcctgatgatgaaaaaccaaatgtgaatcaaagatgagatttgggagcatgataagcacatccaacattgtgcagtcggagaaagtaactgtagaatctgatgcagatctcttgtggacaatttctctgcgaaatctgacataagcagttcctagtttgttatcttttttcttctctttcctgtcaagtggcaaccaagctcttgtacagccacttttgtgtttatgagttgtgtgtctggtaaataaataccatctgatgacaaatcgatgaggtctcatcattagacaggatgtctaccacgatcttgaactgctgatgaattatgtgaataacacgagcaggcatgatggttgtatcc

SEQ ID NO: 26931 - DNA, 743 bp, Zea mays
  Clone ID: LIB4667-021-A11_FLI
ctcgaggccggccgggaccaagttgggcttttattggacggagattgtttggcccagtgactctacccacctccagtttccacttagaaaagaataatttctcccgaaaaagggtgaagagcagaacgacgaggagattgcttggtgggaggagttggtgaggagaggtcgcgaacatggagaaccttgctctgctttggggcatcatcggcccgggcgtatccggcgccatcttcggggccggatggtggttctgggtggacgcggtcgtttgcagcgctgtccaggtctccttcctccactaccttccagggatcttcgcttcgctggcggcgctcatgttcaattgcgtgaacaaggatgagatcggatacgactattactcaccctacggggacgattcagagtggggagtgaagctctggctttttgtggcatatgtcgtttcttttgtctgtttagctggatccgtgggtttattggtgcaagatgcactgacgaacaagggcccttctgtctggactggtgttgctggcgttctgcaatgtgttcttgtgttgataagcggcctggtgtattggacatgccactcagaagattaagggcgtaatgtcatgagcagacttgcaaggttggtcacagttgtgtgaaggaaattatttctggcaacatatgattttgtgtgatggaaatgacggacactgttcactgctgaatgggatgactagatgtttcatctgtgc

SEQ ID NO: 26932 - DNA, 1326 bp, Zea mays
  Clone ID: LIB4667-022-F12_FLI
ctcgaggccggccgggaaaaccccgttgaatccggttgctcatggcagcatcacccacctccaatggcgccgcagctcgccgcagctggcccgaccttatacgcgcctcgctttggcaccgccctcccctgccgcgcccggacaaggaagccggtctctcggcgccgggccgcgctccccaaggatgaggattattacttgatcgatgcggatgagtccattggggatggcttctcgttcagtggagggaagtacggggatggaccaagtaagtcggatgagtggtttgctcaagggaaaatggtaaacgcttacccagtatatggggacaaagggaaggcaaaagatccattctttggcctgacgatgggatcaggatctcaatcttcatatgatattttcagatggttctgtgtggaggctgggagctcttctagtcctaaagtgcttttaattcacggcttgccatcgcaggcatactcttaccgcaatgtgatgcctgtactggcggacaaatatcatgccattgcttttgattggctcgggtttggattttctgataagcctcaaccaaaatatggttttgactatacacttgatgagtatacttcatccttggaatttctagtcaatgctgttgctcctgataagctctctattgttgttcagggctactttgctccggttgcagtcaaatatgctagtgaacaccaagacaaattgaatcatcttgtactagtgaatccaccaataaccgataaacatttgaaccttccatccaccctggcttcgttcagcaacttcttgttgggtgagatattttctcaggatcctctcagagctagtgataaggtattgactagttgtggtccatacatgatgaaggaagaagatgctatggtgtatagaaggccataccttgtctctggttcctcggggtttgcacttaatgcaataagcaaagctatgaaaaaggaccttaaggcttatattgaatccatgagaagcatattaagaagcagttcgtggaaaacaaagacaacagtatgctggggcatgagagatcgttggctaagctatgatggggtggaagaattttttggaggcctaaaccagaagattgtagaactgccaatggcggggcaccatgtgcaggaggaccgtggtgaagaattaggcaatataatcaaaagtatactgaggtaatgttgttggagtctttttctaatcttgtctcttagttttctccttgtatacattaccatatgagcaaacttttgttggcttgtatgccataatcaagtgtgcgtgtcacacattcatttg

SEQ ID NO: 26933 - DNA, 1378 bp, Zea mays
  Clone ID: LIB4667-025-D12_FLI
ccgggtccgcccggcctcttacgtctcggagcgagaaatcagccgcatcgccgcgcgcatccgaagcgcacacgacaatgcagggcggatccagcggcatcgtctatggtggcctcaagtaccaggcacggtgtatcgccgacgtgcgcgcggacgccagctcgaccaccttcctcgccgggaccctcagcctcaaggaggagaacgaggtgcacctgatccggctttcgccggcggagagtgagctggtgtgcgatggagtcttctaccaccccaacgagatctgggatctcaaatcatgtcccttcgatcacagggtcttctccacagtctacacgtctggtgagggctttggtgcgtcagtttggaagatcccagagcttaatgggcaatcaaactcaccgcggcttgagcagctctttgagcttagtgggcatacgggcaagattagacgtgtgatctggtggccacttggaaagcatgataaactaattagcattgatgaccgaaatatttctctttggaacgtagacatgtcaaataaatcagctaaggtgatctcacagggatcagctgacatgcttccaaatttgagtggtggggcttgggatccacacaatcataattcaattgcttcaatatctgattcatcacttcatttgtgggatctacgttctatggaaaaatcatctgcaattgaacatgcacatatacgggatgtggattataaccccaagaagcaacacgttattgcaacaacagaagatgactttggaattcgcttgtgggatctcagaatgtttaagcttcctctgaaagacctccctgggcactcacattgcccttctggttcacccaatagacaagaagaaccattacttaactcatatactgactatgaagacagcatctatggtattgcatggagctcccatgatccatcattattcgcttctttgtcctatgatggaagggttgtcttggaatcagtgaagccctacttgcagagaaaatgaatcttgctggtctaacttttggattgtaagcaatggcagaaaaaacataataaggatgttgcagaaatcatcctgcttgacatcaggtcttcaaccctcttgattgaagccagcaatggctccaaaacactcagatctagcttcagttgagatattacagcacagttgagattgtcagcagtttcctttcctgtatcttcagattttgtccactaggatttcatgttcagttgctagaaatttggctgtgaagatctgatctgtatgttaataactgttgcccatctgtctgaaatagttttctatacttgattcttaggatgttgtatatttgaaaagtgttcacaaaaagatattgcggt

SEQ ID NO: 26934 - DNA, 851 bp, Zea mays
  Clone ID: LIB4667-025-E7_FLI
ctcgaggccggccgggcccgagaaaaggaagacagagaaggaaactgcagtgaagtcgccggcgccgccgcgacaggaggaaggagcagcagcggcaggggaggcccggcgatctcttctgttgcgtgcggcgagggagtaaaaggagccgcgacaggatgcactcctttgggcaccgcgccaacgcggtggcaacgttcgcggtcaccatactggccgcgatttgcttcgccgcctccttctccgacaacttcaacaccccgacacccactgcctccgttaagatcttgaatctaaactggttccagaaggaggccaacggcaacgacgaggttagcatgacgctgaacatttcggccgacctttcgtctcttttcacgtggaacacaaaacaggtgtttgtttttgtggcagcagagtatgagactccacagaatgctttgaatcaagtttccctttgggatggcattatacctgcaaaggagcatgccaaatttttgatccataccacaaacaagtacagatttattgaccagggaagcaatctaaagggcaaggaattcaacttgacaatgcactggcacattatgccaaagactggcaaaatgtttgcagataagatagtaatgacaggctatcgtctccctgagctatacagatagtcagatagatcatggacaggactaagtggcctgcaagaagtgttagtggcagtggcataactggtcctgagcgttttgttctaatctaagtggagcatgtaaccttataagcttgtacttaagctgaaccaggcaaaacaaagttgtaatttgagaggatatgtatggttcaattttgatttgcctatc

SEQ ID NO: 26935 - DNA, 1193 bp, Zea mays
  Clone ID: LIB4667-026-F3_FLI
agggggccgggacggccgccctagcttccccacattcagagctccttcgccgccgccctaggcccctagctttcccgcgagcgggacggcagccgccgtatcctccttcctccaataccgagcgggtccaggcaggtagcatcctcgcgccctgtcgtgtcgcctccgcctctgagttcagctcgccggcagccgccgcccgcaatggaggccctccggaaagcggaggcggagctcacggtgtacgtgcacccctctaacgccaagcgcgtccggcacgccgtatcccgccagcttagcgcgcttctcttcacgtatgtggaccgttttgatggcgtgttgctgatgcatgaagtttcattccttattggcaaagacaaagagggcaaacccatatatgaaaggagtgaccgtaatgatcaaattgctgaacccgtttcttatggcaaaatcatgaatggcttggtgccatatttcagcgtccaagtgcatgccaccctgctgctcttctctccccagccggacatgatcctggaagggatggttgaaatgcttgggaaggagtcaattcatgccattgtattaggggttttctcagtggcaattatgtctgaagatattaagttcaaattcaaatggaaaagtgatggagggaaatttgtgagcctcacagataaaaaacatgtgattgaaagaggaacaatgataaggttttctgtcaaaagggtggatacagaaatgagttgtcatattactggatctttaatcccacctcacactggatgcatgcgttggttgtcagtacatgatcctaaatatgcatcagaactcaaaagtggtgaaagtagatcaagggatacaagcatcaaaattgagcagaatgaacaagaacatagaatactcaagaatgaagatggcatggtgaaatctgaacggccatataaatcccgaaagagggtgcggcacattgagaaatgacatttcattgaggccgtgaagatacaagttggagatcccggtagcttcatagaaatgtacgatgattttgtaaaacgaattgagggttgcatttgcaaattatcaccttttttgacaagatagtagtaactgatctcatcgaaggggtttagtggcaaatgacaagtcccatgtttcaattatagcccgggcttatgttgggttctgttgcgtcc

SEQ ID NO: 26936 - DNA, 729 bp, Zea mays
  Clone ID: LIB4667-027-B2_FLI
ttgctcgctgtgccgcctccgacatcctactttcgtcctcacgagtgaccgataatccgccggcgctaagatgttggtttatcaagatctcctatctggcgacgagctcctgtcggattcattcacctacaaggagctcgagaacggcgtcctgtgggaggtcgagggaaagtgggtcacccaaggtcctgttgatgtagacattggtgccaatccatccgccgagggtggtgaggacgaaagcgttgatgacacagccgtgaaggtggttgatattgttgacacattccgtctacaggagcaacctccttttgacaagaaatcatttgtctcttacattaaaaaatacatcaagaatctcactgctgtgttggagccagagaaagcggatgagttcaaaaagggtgtcgagggtgcaaccaagtttctccttagcaagctgaaggaccttcaattttttgttggtgagagcatgaaggatgatgcgtccgtggtattcgcctattacaaggatggtgccactaatccgacattcctctatttctctcatggtcttaaggagatcaagtgctaggcttgcggcgagattagttacccatgttgggtactatctatgtactattgttatatccacaactatagttgtcctggttgaattgaactcaaaagggtttgtttgagaaaaaactgtccaagattggattgcttgttaaagctctattgttaaag

SEQ ID NO: 26937 - DNA, 1589 bp, Zea mays
  Clone ID: LIB4667-028-D5_FLI
atcaccaactcgtcgacggtagagagagcaagctcttcggcgatttgagaagaatcgaggagcgagcgagcgagcgagcgggagaggaggaggaggagctggggcttgagcctgcgcccgggggccccgggtcacggaatcctaccattaccaaccctagccttcgttgatcgccgtctcaggtcatggcagggccggcgccggatcgggccgccctgactgtggggccgggcatggacatgccaatcatgcacgacagcgaccggtacgagctcgtgcgcgatatcggctccggcaacttcggcgttgcccgcctcatgcgcgaccgccgcaccagcgaactcgtcgccgtcaagtacatcgagcgcggcgagaagatagatgagaatgtccagcgtgagataattaaccatagatcattgaagcaccctaacattattaggtttaaagaggttattttaacaccgacccatcttgctattgtcatggaatatgcctctggcggtgagctttttgagaggatatgtaagaacgtgcgattcagtgaagatgaggctcgctacttcttccagcagcttatttcaggacaagtatgccaccgtgatttgaagttggagaacacacttctagatgggagtgacgctcctcgcttgaaggtttgcgatttcggttattccaagtcatctgttcttcattcccagccgaagtccactgttggaacacccgcttatattgcacctgaagttttgttgaaaaaagaatatgatggcaagattgctgacgtttggtcatgtggtgtaaccctctatgtaatggttgttggcgcatatccttttgaagatccagaagagcctaagaacttccgcaagacaattcagcgtatcttgaatgttcagtacgcaattccagacaacgtgaacatatctccagagtgcaggcatctaatttcgaggatttttgttggcgatcctgctacgcgaataacaatccctgaaatccggaatcatagttggttcctgaagaaccttcctgctgatctgatggatgatgatagcatgagcaaccaatatgaggagcctgaccagccaatgcagaccatggatcagatcatgcagattttaacagaggccaccataccacctgcctgttcccgcagtataaatgtcctagctgatggactggacatggacgacgacatggatgatcttgattccgactcagatcttgatgttgacagcagcggtgagattgtgtacgcaatgtgagtaacatctcagcagccatctcagcagtcaaccaaggaaccaatcaggcatgggatgccctgttgtatactctggcaaagggcatgcttccttttgtgaaaaacatccatgtagttttctcaaggaatcgcaatgtgttctgtggaacacatatgttgtagtcaaactcgggttactcagcttgtaaaactagcctcctcttgcttcctggttactgggctttggatactctcaggcttcgacttgtgtgttgctgttaaatatgtataagaaacttctactcaggttgatctgtgaatctggattcgggtagtggttttgctc

SEQ ID NO: 26938 - DNA, 1224 bp, Zea mays
  Clone ID: LIB4667-029-D4_FLI
ctcgaggccggccgggatgaccaatcgcctgcgccgtagcgcgcacacctacgtgtcgagccgtcttcatccctccgaccggaaatcaacggtgcgtttgcttctctcctccggaaggttctcggcttctcgcaggcgcggcgaccggcttcaaccccaactcttcttcttcttcctcgcaaacttcgaacgggacgagaaggaagcggacgcgagaggagactaaccgacctcggatccatcgacgcgtgaagatgtcttcgcccgccgagtactacaaacacttccacctataagcaaggcatatgggacattgtgtttctttaccaccgtgctagttcagctccagattttgcacccattatttctttacttagattaccccttggtgttcaagaagtttgagatatggaggctattgacaagtttctttttcctggcaccattttccatgaaatttggtattcgccttctgatgatagcaaggtatggtgtcatgttggaaaagggtgcatttgataagcggactgcagatttcttatggatgatgatatttggtgccatctcactattggtgttgtctattattcccctattcaattcttttttcttagggatacctatggtcagcatgctcctttatgtctggagccgagagaatccaaatgctcagataaatatatacggcctcgtccaattgaggtccttttatcttccatgggctatgctcttattggatgtgatatttgggtcatcattaatgcctggacttctgggtatcatggttggacatctctactacttctttgcagtgttgcaccctcttgccaccgggaagagctacctcaagactcctaaatgggtacataagattgttgctcgattcaggataggcatgcaagcgaactcacccgtccgtccaccagccaatggcaacagcgggtctggtgtgtttagaggaagaagctataggctcaatcaatagattcacccacctcgtaatgtgatccatggtcggagtggcaatgtagaagcaaagaccagaacgcatagtagggtcaatcaaaattaagggttacccgtcagagattttcttaaaaaacctggacggacggaatggagaacccttccatttgctcatttagttgctaacaatgttcatcgtccatgtttacacatgaatataattctgtaatgacaatttgtgtacacttatgctggacg

SEQ ID NO: 26939 - DNA, 1295 bp, Zea mays
  Clone ID: LIB4667-030-C12_FLI
gcacccgcacgccagaaacagctctcgcgttgcttccgcacgccgcccatggcgagcctgtcgtcgccgagtctcctctcttccttcctcggcgaccgcctcgcactctccactaggcctctccttctccgctccgctgtcccaggcagcaggcggctggcgtatcaagcaacgagaacgctatgcaacttggtggatatcctatttaacaggagaaatcaggatgatgcaccagaaaacaaccctagacgcctgcgtcctgggaaagtatctccacgccttagtgttcccaatcatatacaacggcctccatatgtcaattctcgtcaacaacgacctggtatgaataatggacctgaaatacatgatgagaacgggatcgagtgcatgagagcttctggaaagcttgctgcacaggttttgaaatttgctgggactcttgtaaagccaggcataacgactgatgaaattgataaagcagtgcaccaaatgataattgataatggagcacatccttcacctcttggttattgtggatacccaaagagtgtctgcacttcagtgaatgaatgcatctgtcatgggattccggattctcgtccccttgaggatggagatatcatcaatattgatgttactgtctacctcaatggctaccatggtgatacatctgctacatttctttgcggtgatgttgatgacgaagctaagaaattagttaaggtgacaagagaatgtctcgacaaggctatatcgatttgtccacctggggtggagatcaaacaaattggtagaactatacaggatcatgcagacaagttcaagtttggtgtagttagacagtttgttggccatggggttggcaaagtttttcatgctgagcctgttgtgcttcatttcagaaacaatgaatggggacgtatgatgttgaatcaaacatttactatagagcccatgctaaccatagggagcatcaaccctgtcatgtggtccgatgactggaccgcagtgacagaagacggcagcttgtcagcacagtttgagcacacgatacttattaccgaagatggccctgaaatactgacacagtgttaatggaaggccaaataacaaagaacaatcgttagtcagctggcaagatcctgcatttctttttggggactaattggtccaacctaaactctgatgcaaaatggcaaactcacattgtaatctcggttcatcggtacaacgatatatgtatagaaattgtactattttcgaagttatatttgagagtgtgttttgttggtgcc

SEQ ID NO: 26940 - DNA, 613 bp, Zea mays
  Clone ID: LIB4668-003-D10_FLI
atcgcatccatccaccacgcaccccaccaacccatacccataccagaggctctctgattttacttctcagcggtagatcggctgagcgagcgagcgagcgaggcacacggagctagctaaacagagcacacggatagaaaagcaagatgtcggacggcacggcgacctgcatcgacatcatcctcgccattatcctgccgccgctcggggtcttcttcaagttcggctgcggggttgagttctggatctgccttatcctcaccttcttcggctacctccccggcatcatctacgccgtctgggccatcaccaagtagccggccggtgcgttagcatgcaatgcgcgcgcagggtgatctcgtggcgggggacgcggtgtgcgcgtgtcttgagatgtgattccttccttccttgtttagttgctgctgctcctgctggtgtagtactggtgtatccagtccttttaatttcttgattagtttgctcggctgaagaaatcaggacgcgtgcctggtgttgctgctcagctccatgtacttgtacaaccgttcctccctgcagctgctgccccttctctctttttgtttaccttggattgatggattgttaaatt

SEQ ID NO: 26941 - DNA, 913 bp, Zea mays
  Clone ID: LIB4668-004-B7_FLI
ggccggccgggaggcggggatcaactggtcaactgctctacaacttcacgtcttcttcaccttcggaagacgggcaggcgagcagcgaaggtgcgacggaaatcagtggggatgaggcgcaatagcccgccgacggcgagcggcaaccgcctcgcggtcatcgcttcccacttatccctccctccgctcggcagtccggcagccatatccggggagaaggaagccgccctcgccaccgacctcaacagcacccccaccatttttgacaaaattattcggaaggagatcccatctgaggtggtttatgaggatgagaaggttcttgcatgtagagacatatcaccacaagctcctacacatattataatcattgcgaaggttaagtatgggctgtctaggttgtcgaaggcagaggaagggcatgtcgagcttctgggcaatcttctgtatgctgcaaaggttgtagcagagcaggaagggcttgctgatggcttcagaattgtcatggacgatgggcccagaggatctcaatcggtctaccaccggcacctacacgttcatcttctcgggggacggcagatgaattggccaccggggtgagttggtgttgtaaaggtctgtttggttcactgcctaacttgccacactttacctaacttttctgcctaaggttagttcttcaattcgaacgcctaaccttagacaaagtgtggcgcagttagccacgaaccaaacagaccctaagactcaagcaatgacttcgtaaggcatgtgttgttcactcgttagaatttcataatatgctgtcatttgcagtttgctattagggttgcacaaatagtcatcggtagacgctgtcccaatgattttgtgtacggagctcaaatagtataaaaagttttcatttcgtaac

SEQ ID NO: 26942 - DNA, 812 bp, Zea mays
  Clone ID: LIB4668-004-C12_FLI
ctcgaggccggccgggactgctcagctcagacctttccaaactcgcgacccagcgtccatacacacaccagcctttttgttctccccgcgagcgctctctttctctatcgactggcgacgactccgccaccgccgccgctctacgcgagacgcccaggtcttcgccaacgacgagcatccgggttagagaggaagaaattgcaaccgaaacaatggcggcagattccggcgctcgcagacaaccaagcttcaccaaggtcgaccagctgcgccctggaacccacggccacaacctcatcctcaaggttgttgactccaagatggtcgtccagagaggccgcgagggagggccccagggaagacagatgaggattgcggagtgcttggttggtgatgaaaccggcatcattgtcttcactgcaagaaacgatcaagtggatgtaattaggcctggaacaactgttgaactgaggaacgcaaagatcgacatgttcaagggttcgatgcggcttgcagtggacaagtggggaattgtcaaagctgctgaaagctcagctgagtggacagtcaaggaggacaacaacctgtccttaattgagtttgagctggtgaccgtgacggagtgaaaaccgccattgcttaggagtattgttggttttctgtgttgttgaacctaatcatcatcgccaatcaataaggactcgtggttgatgttctcggcatcggagttgcgtattgctgtaccgttgcttgcttactgtgcgttgtggctacttttgactgctatcgaataataataaattggtgtcatg

SEQ ID NO: 26943 - DNA, 907 bp, Zea mays
  Clone ID: LIB4668-004-G5_FLI
aaaaaaaaaaaaaaaaaaactggttctccatccggtcagaccaatcaacaaagtgacgcgagcacgagcatccatcgtttccccttcttccccatcgcgtgccctcgccgcagccatcttccatggcggaccagctcacggacgagcagatcgcggagttcaaggaggccttcagcctcttcgataaggatggcgacggctgcatcactaccaaggagcttggaactgtgatgcgctcccttggccagaaccccactgaagcagagctgcaggacatgatcaacgaggttgatgctgatggcaatgggaccattgacttcccggagttcctgaatctgatggcaaggaagatgaaggacaccgactccgaggaggagcttaaggaggcctttcgcgtcttcgacaaggaccagaatggtttcatctcggctgctgagctccgccatgtcatgaccaacctcggcgagaagctgactgacgaggaggtcgacgagatgatccgtgaggccgatgttgacggcgacggccagatcaactacgaggagttcgtcaaggtcatgatggccaagtgaggagccgtccccgttatctatgaattgaagttaaatatcaggcacacaagctgtactttgccatgtcccttttgagtacacatcagtatcatgcaggaggtaatgtctagtagtggtcggtttaggtggtgtagtcatgggaactcgacatcagatacctggtctcttttgattgtgatgttatcttgcattattgctcctgctggagcttttaggatttgttgtaagctcatattttcaggggggtttggatcttttgtgcgagtcatatctcgtgtacgttgcattgcattgttgtgttatgcttctgctggcttgtaccgccttgttatgtg

SEQ ID NO: 26944 - DNA, 743 bp, Zea mays
  Clone ID: LIB4668-005-C6_FLI
atcgaggccggccggggctagaaactagggtttacgagcacgccctggtataaaagaggcgagggtcactgatgtaggacctcccgcagccgccacctcaacccaggaacagagcgaggcgacgccgcggcacctcttctccggcgaagggaaatggcaaccgttccaggggatctgatctggcaggttgtgaggaagaacaactccttccttgtgaagcagttcggcaacggcaatgccaaggtgcagttcaccaaggagccgaacaacctctacaacatccactccttcaaacactcgggtttggcgaacaagaagactgtgacgatccagccagctgcaaaggactcggctgtggtcctctctactaccaagaccaagaagcagaacgcacctgcgaagctcagccacaagtctgtgatgcgcaaggagttccgcaagatggccaaggctgtgaaaaaccaggttagtgacaactactacaggcctgatctgaccaagccagctcttgctaggctaagctcggtgtaccgcagcctccaggttgccaagtccggtgtcaagaagaagaacaggcagtcctaagcgctaagtttgtgttctgtcagggggcatgttggtgctcgtagtcccagcttatatttatctatgttccaacagttttgagacttgttagaactgagcaaaccatgttaagatgctgctgtgtgtcattccttaaaaaaattgccttgcactttgtg

SEQ ID NO: 26945 - DNA, 1070 bp, Zea mays
  Clone ID: LIB4668-007-E12_FLI
ctcgaggccggccgggagtgagtggcccttcttcctctcaatacccctctctccctcttgtgggtagcgttgtgcgtcttttcctcagcagcaaccggagagcggctgctcgcctgctcctcctcctagggaaaggacagcggcggcggcggcggcggcgagaagttgggcctgaagcccggacgctttctcccgagataccgcaatactgctagagcactgtcactaatgtttgcttatgacaatggagtcacctacaactgccgctggtggtgaactggagagctacttctccttgggtttgacagtatcccactcacagaaagataatgctgaatttccaaaggttctgttgcttctctcagcgtatcttgacaagacagttcagcagaatgaagagttactagactccagtaaaataaaggagtcgaccactatctttcatggtcagagggtgcctgaacttagtataaagctgtatgcagagcgtattttcaagtatgcaaagtgcagcccatcttgctttgtgctagcacttatctacatggagagatatctacaacaaccaaacatttacatgacgtcatttagtgttcatcgcctgcttattacaagtgttgttgttgctgccaaattcatagatgatgcgtttttcaataatgcatactacgggagagttggaggaattagcacaagagagatgaatatgcttgaactggatttattgttcggtctggacttcaggctcaaagtggatatagagactttcgaaagctactgcttacagttggaggaagcactggttcttgttttggagagaccaattcaggtccaagaggccaacgtaactaaacacttgatttgtaacagcagcgccgatgagacttgcaaacacgagctcgggcttgaaaggtacagcagtcaggctgtccaagggtgtagttggtaaatgtgattgggcagatagttttgaaaaaagtgtatgggtccgagtattggtaattcttttatttgacatttaagttgttcagttggccttgtttagtagggccgttattctacttctctac

SEQ ID NO: 26946 - DNA, 702 bp, Zea mays
  Clone ID: LIB4668-008-F6_FLI
agagaggcagacggcaggactcgcttcaagctcctcatctcgcgcagggggggtcgcctgagatcacagcgacaatggtgaaggcagttgctgtcctcgccggcactgatgtcaagggcaccatcttcttttcacaggagggggatggtccgaccaccgtgactggaagtatctctggcctcaagccagggctccatgggttccatgtgcacgcgcttggcgacaccaccaacggctgcatgtcgactgggccacacttcaatcctgttggcaaggagcatggcgcaccggaagatgaggaccgccatgccggtgatcttgggaatgtgacagcgggagaagatggtgttgttaatgtcaatattactgacagccagatacctcttgctggaccccactcgatcattggccgagctgttgttgtccatgctgatccggatgaccttggcaaaggtggacatgagcttagcaagagcaccggaaatgctggcggacgtgttgcctgtggtatcattgggctccaaggctaaagcggttaacctccgaggcaaacaccatagaaggtcgaagcgagcacctcaggaagttgctgttccatttcccctgtattggcaacacaatttgagtactccaaataagcgcctgatccatgatcagagagcactattcatgtcattttgtatatgaacaatgttgcgcacc

SEQ ID NO: 26947 - DNA, 914 bp, Zea mays
  Clone ID: LIB4668-010-D2_FLI
ctcgaggccggccgggattcctactgttaagttttgtgaattcggaggcacagcgccacctacttccaccatttcggcaaccccgcaggaaaaaaaaagggcgaaacgaggccaccagctcaccgccgagcggaagcggcgccgagcaaccaacccctctcctcgtccgccgccgtctccccggaccatgtccatggccgcctcctcccggctgctctgggcgtcccgcgccgccgcctacctcaagatctccaccttccccagggccttctccaccgtgctgaaggatctgaagtatgctgacactcatgaatgggtgaaagttgagggtgattcagcaaccgtggggattactgaccatgcccaggatcatttgggtgatgttgtttttgtggagctaccagaagttggcatcagtgtatcccagggaaagaactttggtgctgttgagagtgtgaaggcaaccagcgatatcaattcaccagtgtctggagaggtggttgaagtgaacgagaaactaagtgaggagcctggattggttaatgcaagtccatatgagaagggatggattatcaaggtcaagctcagcaattcaggtgacctcaattcgctcatggatgatgataagtactcgaaattctgtgaagaagaagacaaccattgaagaaatcagagtgtcttctgaacaccaggatctgtttttcaagctttatcactggttatggtctggagaccagctgtgacaaattggcaaggttcatcgcaaggaataaatgttaggatttgccaatcctacaagggcatgggaaatccaagtttgtgttgtcaatgacgtggtcatatttgatatttctttgtagttgtaatctcgtgaattccttcttttttcttaaaaaaagtactctttttgattc

SEQ ID NO: 26948 - DNA, 811 bp, Zea mays
  Clone ID: LIB4668-012-H12_FLI
gggtttctaggaagcacacagccacacgccgccgcctcgctctctgcttccctctccattttttcatctcattcggcgccgcggcaccccctgctcgtcactcgcgatggcccggatcaaggtgcacgagctgcgcggaaagagcaagacggatctgcaagcgcagctcaaggagcttaaatcggagctctccctcctacgcgtcgccaaggtcaccggcggggctcccaacaagctctccaaaatcaagattgtgcgcacctccatcgctcgcgtgctcaccgttatctcgcagaagcagaagtcggcgctgcgtgaggcgtacaagaagaagaagcttctcccgctcgatctccgccccaagaagacccgcgccattcgcaggcgcctcaccaagcaccagctctccttgaagaccgagagggaaaagaagcgtgagaagtattttcccatgcggaagtacgctatcaaggcctagattagtgaaagaacagcttttatcccatcaagttttgcccagaagttttttgagtttgatgtaccccacatctttcgtcattacaatgttgagttgtatgatgaaaaaatgttttgcccagaagttccttgagtttgatcaactgcatgatgaaaaaatgtgtactttttgtttgttgaaatgtgctttccatttttcagtttcctcttggtcatcacgacttgtggaatgaataggggtcgagtcttgttcaatgttacgtgcattggacaccaagttgaattgtagccaatgcttgaaatctgttgtcatgatgtgggtgggggacattgg

SEQ ID NO: 26949 - DNA, 511 bp, Zea mays
  Clone ID: LIB4669-003-E7_FLI
ctcgaggccggccgggcttcctcatccagtgttgtgtcctagcgccgccgccgccccaactcgccttgcgtgactgaaagctcgtcggcttccgtccacgcgagaagcgagagcatggacacccaggtgaagcttgctgttgtggtgaaggtgatgggcaggaccggctccaggggtcaggtgacccaggtcagagttaagttcttggatgaccagaaccggctcatcatgaggaatgtcaaggggcccgtccgcgagggtgacatcctcaccctgctcgagtccgagagggaggccaggaggctgcgctgaagccctagcgttcttggtgggctcttgtttggtctttggtgtcttcgaatttgtgctatgtttgaacttctgtgaccctgtcttgagagtagtaagcctggtgataagattgcagttttgtttatcctggttgaaaatggaattggtgttgagacatggttatccttgctatattatctataaaacgacgcatgcattg

SEQ ID NO: 26950 - DNA, 801 bp, Zea mays
  Clone ID: LIB4669-004-D3_FLI
ctcgaggccggccggggtcgaagccgaagcagagcacgacggacaaaaatatggcagggaaagccggcggactcaaaggggttgccctcatcggcggcagcgccaacagcacggtcgctggggtcattcacttcttcgaggacccctccaccaggtacaccgaggtgaggggcaaggtcacgggcttgactccgggaaggcatggattccacatccacgtcttcggcgacactaccaatggctgcaactcaaccggtccccattttaaccctcataataaaccccatggagctccatttgacgacgaacgacatttgggcgacctgggaaatatagtagccaatgaagatggagatgcagaagtgttcataagagacttacagatttcattgagtgggcctcattccattctgggaagggcagttgttgtacatgctgatcctgatgacctagggaggggtggccatgaactgagtaagtcaacaggaaacgcaggagctagaattggatgtggtatcattggaattcagtcatcagtttgacaaataacggcttagtagcaccagaaaaagagggggtcatgattccacagtctgtgcaatgtgctggttcagggacatggaaatggtgttcgttgttctggaccgtttgaagactaaatatctccagccatgtatacaataattttgtcagtgagaggaaattgcttgtaaaatcttgtattgacttatatcactggttaccagcagcaataagtctatatgtaaaacttctcgatttgtatatcagctatgtttcgtg

SEQ ID NO: 26951 - DNA, 1063 bp, Zea mays
  Clone ID: LIB4669-004-G5_FLI
ctcgaggccggccgggaatgagagagaagagcaagaaaaacttcgtcacgtcaggtcgacggcgaaagacgcggaggttggtgaaggagtgaaggaagaaagagaacgaaaggcggcctctcactcgcagtcgcagtagcaggttctagaccaccaaacccagcggctcccgctcatctcagttcggcttcggccttcgcattcctctacagatttcgcagttttgctgggggtaactacggaatggggggcggatccggatctttcctcaaggtcttggtcaacaacatggatgtcctcgcggggcctttggtttcacttgcgtatcctctgtatgcctctgttagagcaattgaaacaaaatctgctgtggatgatcagcaatggctcacgtactgggtgctgtactcatttatcactctattcgagctcacctttgctccggtactcgaatggcttcctttctggtcttatgcaaagctgttcttcaattgctggttagtattgccacagttcaatggagctgcacatgtatatgagcattttgtgaggccaatgattgtaaatcagcaagttgtaaacatctggtatattccaaagaaggatgaatcaagtagacctgatgatgtaatttcagctgcacagaggtacattgagcaaaatggatcaaaagcgtttgagaatcttgttaacaagtttaagagttcgaacccaaggcgctcaattctggaggaggtagaggttgaaaggagggccaggattcaactagaatctgaagcgagggaagtgaaccctttcttcaatccagaatatcagtactaggcaaccattttcccttcacttgccaggaatgtgctaggatcggtttggaggaagatgtctggatattaggattgcgttttgcacctactgaatcgatgatattgtgtagatggacaaccataattgttgtagatatgttgtggcgatggaactcatgtaatggtcatgtcgcgaatgtttcatgctgctggaaattatgtattcacactggactctagttatgcgcctcactagtttcttg

SEQ ID NO: 26952 - DNA, 1056 bp, Zea mays
  Clone ID: LIB4669-008-A3_FLI
ctcgaggccggccgggatcgcatcgcatcgatcctcccatctgcgcacccgcaagcctattcgccgcacctcctcaggtgaccgggaagatgatgccgttgagccaaaccgacttctcgccgtcgcagttcacctcctcccagaatgccgccgccgactccaccacgccttccaagatgcgcggcgcgtccagcaccatgccgctcaccgtgaagcaggtcgtcgacgcgcagcagtctggcacgggcgagaagggcgctccgttcatcgtcaatggcgtcgagatggctaacattcgacttgtggggatggtcaatgccaaggtggagcggacgaccgatgtgaccttcacgctcgacgatggcaccggccgcctcgatttcatcagatgggtgaatgatgcttcagattcttttgaaactgctgctattcagaatggtatgtacattgcggtcattggaagcctcaagggactgcaagagaggaagcgtgctactgctttctcaatcaggcctataaccgatttcaatgaggttacgctgcatttcattcagtgtgttcggatgcatatagagaacactgaattaaaggctggcagtcctgcacgaatcaattcttctatgggagtgtcattctcaaatggattcagtgaatcaagcacaccgacatctttgaaatccagtcccgcaccggtgaccagcgggtcatccgatactgatctgcacacgcaggtcctgaatttttttaatgaaccagcgaacctcgagagtgagcatggggtgcacgttgatgaagtactcaagcggttcaaacttttgccgaagaagcagatcacggatgctattgattacaatatggactcggggcgtctttactcaacaattgatgaattccactacaaggcaacttaaccgatttgaaggtcagcctgctggaaatggcagagggctaagtatcacttgtactaaaccaaagtctggaaatgtcatgttgtgtcatgaaatgcatggttggtttatggaaacatttatatcttgtatcaactagttgatttgt

SEQ ID NO: 26953 - DNA, 1033 bp, Zea mays
  Clone ID: LIB4669-011-C3_FLI
ctcgaggccggccgggacttctgtacccaaccagaagagcggcggcgcgggcggacaaggagcaggcggaggaggagttgtgccaagccacaatggtcgtttccggtttgatcgacgctgccgcgatggttcttcggtttgggcgatgagatgctaatgggtgcctctgcggatggtttggatgtatccgtgcaggtatctcgcgtgactcgatgcacaagcgccgagccaccggtggaaagcagaaggcctggaggaagaagcgaaagtatgagcttggtcgccagccagccaacaccaagttgtcaagcaataagacagtgaggagggtccgtgttcgtggaggtaatgtgaaatggagggctcttcgccttgatactggtaactactcatggggaagtgaagctgttacccgcaagacccgtatcctcgacgtggtctacaatgcatcaaacaatgagcttgtgaggacacaaacccttgtgaagagtgccattgtgcaagttgatgctgccccattcaagcagtggtacctcactcactatggagttgacattggtaggaagaagaaaacccctgctgcaaagaaggataatgctgagggacaagaggttgaggcagcagctgaggaaacgaaaaagagcaaccatgtcacgaggaagcttgagaagcgcaaggagggacgtacccttgacccacacattgaggagcaatttggcagtggacggttgctggcatgcatttcttcccgccctggacagtgtggccgagctgatgggtacatccttgagggtaaagagcttgagttctacatgaagaagctacagaggaagaagggcaagagcgctgtagcttagagcattctcatggattgtcttgcaccgaaatgtgtgtcctgatgagtacactttttttggttagtcgtctcaagttcagagcgttatgccatgttttcagtcctgattagtacactgttttctaaaagcgactgagctctagtccaatgtattgataatttctgctgttgtcctat

SEQ ID NO: 26954 - DNA, 1272 bp, Homo sapiens
  Clone ID: LIB4675-056-F9_FLI
cttattattattttattgcagcaaattccagatgtgtctccaacgggaaaatatacaaccctcttgcctttgatgattattcttatgatttcaggcattaaagaggttatatacatcataaatgacatggcagacaaaatagttaaggaacacaaaactgttatgacaagattcatgggacacgtttaagtggaaagaggtgaatgtgggtgacactgtgaaggcctcgaatggggagctccttcctgcagacacagtcccgatgtgttcatatagcaacatctaatccggatagagagacaaatgtaagacacggcaggctttgccagaaacagcttctgtatcagtgcagggacatccttcctccaggcagcaggccttcaagcttcaagcctcagggcccaaccctaaggctgggggctctccctgcaggcaggactgggcctggagggcctcctcatacttctggagctgagaccagaagcccgggttcggttctgctgccgggcgagcgctcttcaccatctggaaggccttcgccaggctgaggccgcggtgccgcatgaggtacgcggtgcagacggcggccgagcggctgcggccgttcttgcagtagactaggcaggcgccgccggcgcgcaccgcggcctccatggcggcgcacgtgggctccaggtgcgccagcaggtcctcagccgggtcgtcgaacacgggcacgcgcagctctgccacgccgggcgcgcgcgggccgggctgctggcggagacgttgacgcacagcgtgactcccgcgcgcgccagctgctcctccgcgcccgcggctcgcgcgctcccgaggaagagtgagggcgcgacgcgcaccaacggtggaggtacgggcgaggcggccccgcggcgcccagcttctgccggtcccatggcgcccgccgaagagtctgcttttgggccctgaggatctattttgggggctcaggcgcccgcccaggagtctatttgtgggagccgggcgggccgccgggcgcccccgggtcctagaggcctccgaggtggaccaggctggggcttgggtcccccgcgggcgctgggccgggacagggggcttgggtctcgttggggccggggcatggcgggaggtttgggcctcaccagggcgccggggccttggaccgctctgcgtcccatgttctctgtccccgggcgccgtcctccccgcccccgcggcctgtggcactgggcttgcgtctgtggctcttgggcgcagcgccctgcccgc

SEQ ID NO: 26955 - DNA, 6095 bp, Homo sapiens
  Clone ID: LIB4676-020-E9_FLI
gtaaaaagaagagatccagttcacgcagtcgtcattccagtatctcacctgtcaggcttccacttaattccagtctgggagctgaactcagtaggaaaaagaaggaaagagcagctgctgctgctgcagcaaagatggatggaaaggagtccaagggttcacctgtatttttgcctagaaaagagaacagttcagtagaggctaaggattcaggtttggagtctaaaaagttacccagaagtgtaaaattggaaaaatctgccccagatactgaactggtgaatgtaacacatctaaacacagaggtaaaaaattcttcagatacagggaaagtaaagttggatgagaactccgagaagcatcttgttaaagatttgaaagcacagggaacaagagactctaaacccatagcactgaaagaggagattgttactccaaaggagacagaaacatcagaaaaggagacccctccacctcttcccacaattgcttctcccccaccccctctaccaactactacccctccacctcagacaccccctttgccacctttgcctccaataccagctcttccacagcaaccacctctgcctccttctcagccagcatttagtcaggttcctgcttccagtacttcaactttgcccccttctactcactcaaagacatctgctgtgtcctctcaggcaaattctcagccccctgtacaggtttctgtgaagactcaagtatctgtaacagctgctattccacacctgaaaacttcaacgttgcctcctttgcccctcccacccttattacctggagatgatgacatggatagtccaaaagaaactcttccttcaaaacctgtgaagaaagagaaggaacagaggacacgtcacttactcacagaccttcctctccctccagagctccctggtggagatctgtctcccccagactctccagaaccaaaggcaatcacaccacctcagcaaccatataaaaagagaccaaaaatttgttgtcctcgttatggagaaagaagacaaacagaaagcgactgggggaaacgctgtgtggacaagtttgacattattgggattattggagaaggaacctatggccaagtatataaagccaaggacaaagacacaggagaactagtggctctgaagaaggtgagactagacaatgagaaagagggcttcccaatcacagccattcgtgaaatcaaaatccttcgtcagttaatccaccgaagtgttgttaacatgaaggaaattgtcacagataaacaagatgcactggatttcaagaaggacaaaggtgccttttaccttgtatttgagtatatggaccatgacttaatgggactgctagaatctggtttggtgcacttttctgaggaccatatcaagtcgttcatgaaacagctaatggaaggattggaatactgtcacaaaaagaatttcctgcatcgggatattaagtgttctaacattttgctgaataacagtgggcaaatcaaactagcagattttggacttgctcggctctataactctgaagagagtcgcccttacacaaacaaagtcattactttgtggtaccgacctccagaactactgctaggagaggaacgttacacaccagccatagatgtttggagctgtggatgtattcttggggaactattcacaaagaagcctatttttcaagccaatctggaactggctcagctagaactgatcagccgactttgtggtagcccttgtccagctgtgtggcctgatgttatcaaactgccctacttcaacaccatgaaaccgaagaagcaatatcgaaggcgtctacgagaagaattctctttcattccttctgcagcacttgatttattggaccacatgctgacactagatcctagtaagcggtgcacagctgaacagaccctacagagcgacttccttaaagatgtcgaactcagcaaaatggctcctccagacctcccccactggcaggattgccatgagttgtggagtaagaaacggcgacgtcagcgacaaagtggtgttgtagtcgaagagccacctccatccaaaacttctcgaaaagaaactacctcagggacaagtactgagcctgtgaagaacagcagcccagcaccacctcagcctgctcctggcaaggtggagtctggggctggggatgcaataggccttgctgacatcacacaacagctgaatcaaagtgaattggcagtgttattaaacctgctgcagagccaaaccgacctgagcatccctcaaatggcacagctgcttaacatccactccaacccagagatgcagcagcagctggaagccctgaaccaatccatcagtgccctgacggaagctacttcccagcagcaggactcagagaccatggccccagaggagtctttgaaggaagcaccctctgccccagtgatcctgccttcagcagaacagacgacccttgaagcttcaagcacaccagctgacatgcagaatatattggcagttctcttgagtcagctgatgaaaacccaagagccagcaggcagtctggaggaaaacaacagtgacaagaacagtgggccacaggggccccgaagaactcccacaatgccacaggaggaggcagcagatggtgtttaaaagaagtaacccttccacagcatgtcctcctcacattcttccaccagagaagaggccccctgagccccccggacctccaccgccgccacctccaccccctctggttgaaggcgatctttccagcgccccccaggagttgaacccagccgtgacagccgccttgctgcaacttttatcccagcctgaagcagagcctcctggccacctgccacatgagcaccaggccttgagaccaatggagtactccacccgaccccgtccaaacaggacttatggaaacactgatgggcctgaaacagggttcagtgccattgacactgatgaacgaaactctggtccagccttgacagaatccttggtccagaccctggtgaagaacaggaccttctcaggctctctgagccaccttggggagtccagcagttaccagggcacagggtcagtgcagtttccaggggaccaggacctccgttttgccagggtccccttagcgttacacccggtggtcgggcaaccattcctgaaggctgagggaagcagcaattctgtggtacatgcagagaccaaattgcaaaactatggggagctggggccaggaaccactggggccagcagctcaggagcaggccttcactgggggggcccaactcagtcttctgcttatggaaaactctatcgggggcctacaagagtcccaccaagagggggaagagggagaggagttccttactaacccagagacttcagtgtcctgaaagattcctttcctatccatccttccatccagttctctgaatctttaatgaaatcatttgccagagcgaggtaatcatctgcatttggctactgcaaagctgtccgttgtattccttgctcacttgctactagcaggcgacttacgaaataatgatgttggcaccagttccccctggatgggctatagccagaacatttacttcaactctaccttagtagatacaagtagagaatatggagaggatcattacattgaaaagtaaatgttttattagttcattgcctgcacttactgatcggaagagagaaagaacagtttcagtattgagatggctcaggagaggctctttgatttttaaagttttggggtggggggttgtgtgtggtttctttcttttgaattttaatttaggtgttttgggtttttttttcctttaaagagaatagtgttcacaaaatttgagctgctctttggcttttgctataagggaaacagagtggcctggctgatttgaataaatgtttctttcctctccaccatctcacattttgcttttaagtgaacactttttccccattgagcatcttgaacatactttttttccaaataaattactcatccttaaagtttactccactttgacaaaagatacgcccttctccctgcacataaagcaggttgtagaacgtggcattcttgggcaagtaggtagactttacccagtctctttccttttttgctgatgtgtgctctctctctctctttctctctctctctctctctctctctctctgtctgtctcgcttgctcgctctcgctgtttctctctctttgaggcatttgtttggaaaaaatcgttgagatgcccaagaacctgggataattctttactttttttgaaataaaggaaaggaaattcagactcttacattgttctctgtaactcttcaattctaaaatgttttgttttttaaaccatgttctgatggggaagttgatttgtaagtgtggacagcttggacattgctgctgagctgtggttagagatgatgcctccattcctagagggctaataacagcatttagcatattgtttacacatatatttttatgtcaaaaaaaaacaaaaacctttcaaacagagcattgtgatattgtcaaagagaaaaacaaatcctgaagatacatggaaatgtaacctagtttagggtgggtatttttctgaagatacatcaatacctgaccttttttaaaaaaataattttaaaacagcatactgtgaggaagaacagtattgacatacccacatcccagcatgtgtaccctgccagttcttttagggatttttcctccaaagagatttggatttggttttggtaaaaggggttaaattgtgcttccaggcaagaactttgccttatcataaacaggaaatgaaaaagggaagggctgtcaggatgggataatttgggaggcttctcattctggcttctatttctatgtgagtaccagcatatagagtgttttaaaaacagatacatgtcatataatttatctgcacagacttagaccttcaggaaacataggttaagcccccttttacaaagaaaaagtaaacatacttcagcatcttggagggtagttttcaaaactcaagtttcatgtttcaatgccaagttcttattttaaaaaataaaatctacttataagagaaaggtgcattacttaaaaaaaaaaactttaaagaaatgaaagaagaaccctcttcagatacttacttgaagactgttttcccctgttaatgagatatagctagatatcggtgtgtgtatttctttattattctctggtttttgatctggccttgcctccagggccaaacactgatttagaaagagagccttctagctattttggcattgatggctttttataccagtgtgtccagttagatttactaggcttactgacatgctattggtaaatcgcattaaagttcatctgaaccttctgtctgttgacttcttagtcctcagacatgggcctttgtgttttagaatatttgaatttgagttattgggccccactccctgttttttattaaagaacgtgagcctgggatactttcagaagtatctgttcaatgaaaaaaagttggtttcccatcaaatatgaataaaattctctatatatttcattgtattttggttatcagcagtcatcaataatgtttttccctcccctctcccacctcttatttttaattatgccaaatatcctaaataatatacttaagcctccattccctcatccctactagggaagggggtgagtgtatgtgtgagtgtatgtgtatgtatgatcccatctcacccccacccccattttgggagtcttttaaaatgaaaacaaagtttggtagttttgactatttctaaaagcagaggagaaaaaaaaacttatttaaatatcctggaatctgtatggaggaagaaaaggtatttgttaatttttcagttacgttatctataaacatgatggaagtaaaggtttggcagaatttcaccttgactatttgaaaattacagacccaattaattccattcaaaagtggttttcgttttgttttaattattgtacaatgagagatattgtctattaaatacattattttg

SEQ ID NO: 26956 - DNA, 3042 bp, Homo sapiens
  Clone ID: LIB4676-046-C4_FLI
cagataaacaagatgcactggatttcaagaaggacaaaggtgccttttaccttgtatttgagtatatggaccatgacttaatgggactgctagaatctggtttggtgcacttttctgaggaccatatcaagtcgttcatgaaacagctaatggaaggattggaatactgtcacaaaaagaatttcctgcatcgggatattaagtgttctaacattttgctgaataacagtgggcaaatcaaactagcagattttggacttgctcggctctataactctgaagagagtcgcccttacacaaacaaagtcattactttgtggtaccgacctccagaactactgctaggagaggaacgttacacaccagccatagatgtttggagctgtggatgtattcttggggaactattcacaaagaagcctatttttcaagccaatctggaactggctcagctagaactgatcagccgactttgtggtagcccttgtccagctgtgtggcctgatgttatcaaactgccctacttcaacaccatgaaaccgaagaagcaatatcgaaggcgtctacgagaagaattctctttcattccttctgcagcacttgatttattggaccacatgctgacactagatcctagtaagcggtgcacagctgaacagaccctacagagcgacttccttaaagatgtcgaactcagcaaaatggctcctccagacctcccccactggcaggattgccatgagttgtggagtaagaaacggcgacgtcagcgacaaagtggtgttgtagtcgaagagccacctccatccaaaacttctcgaaaagaaactacctcagggacaagtactgagcctgtgaagaacagcagcccagcaccacctcagcctgctcctggcaaggtggagtctggggctggggatgcaataggccttgctgacatcacacaacagctgaatcaaagtgaattggcagtgttattaaacctgctgcagagccaaaccgacctgagcatccctcaaatggcacagctgcttaacatccactccaacccagagatgcagcagcagctggaagccctgaaccaatccatcagtgccctgacggaagctacttcccagcagcaggactcagagaccatggccccagaggagtctttgaaggaagcaccctctgccccagtgatcctgccttcagcagaacagacgacccttgaagcttcaagcacaccagctgacatgcagaatatattggcagttctcttgagtcagctgatgaaaacccaagagccagcaggcagtctggaggaaaacaacagtgacaagaacagtgggccacaggggccccgaagaactcccacaatgccacaggaggaggcagcagcatgtcctcctcacattcttccaccagagaagaggccccctgagccccccggacctccaccgccgccacctccaccccctctggttgaaggcgatctttccagcgccccccaggagttgaacccagccgtgacagccgccttgctgcaacttttatcccagcctgaagcagagcctcctggccacctgccacatgagcaccaggccttgagaccaatggagtactccacccgaccccgtccaaacaggacttatggaaacactgatgggcctgaaacagggttcagtgccattgacactgatgaacgaaactctggtccagccttgacagaatccttggtccagaccctggtgaagaacaggaccttctcaggctctctgagccaccttggggagtccagcagttaccagggcacagggtcagtgcagtttccaggggaccaggacctccgttttgccagggtccccttagcgttacacccggtggtcgggcaaccattcctgaaggctgagggaagcagcaattctgtggtacatgcagagaccaaattgcaaaactatggggagctggggccaggaaccactggggccagcagctcaggagcaggccttcactgggggggcccaactcagtcttctgcttatggaaaactctatcgggggcctacaagagtcccaccaagagggggaagagggagaggagttccttactaacccagagacttcagtgtcctgaaagattcctttcctatccatccttccatccagttctctgaatctttaatgaaatcatttgccagagcgaggtaatcatctgcatttggctactgcaaagctgtccgttgtattccttgctcacttgctactagcaggcgacttacgaaataatgatgttggcaccagttccccctggatgggctatagccagaacatttacttcaactctaccttagtagatacaagtagagaatatggagaggatcattacattgaaaagtaaatgttttattagttcattgcctgcacttactgatcggaagagagaaagaacagtttcagtattgagatggctcaggagaggctctttgatttttaaagttttggggtggggggttgtgtgtggtttctttcttttgaattttaatttaggtgttttgggtttttttcctttaaagagaatagtgttcacaaaatttgagctgctctttggcttttgctataagggaaacagagtggcctggctgatttgaataaatgtttctttcctctccaccatctcacattttgcttttaagtgaacactttttccccattgagcatcttgaacatactttttttccaaataaattactcatccttaaagtttactccactttgacaaaagatacgcccttctccctgcacataaagcaggttgtagaacgtggcattcttgggcaagtaggtagactttacccagtctctttccttttttgctgatgtgtgctctctctctctctttctctctctctctctctctctctctctctgtctgtctcgcttgctcgctctcgctgtttctctctctttgaggcatttgtttggaaaaaatcgttgagatgcccaagaacctgggataattctttactttttttgaaataaaggaaaggaaattcagactctt

SEQ ID NO: 26957 - DNA, 4085 bp, Homo sapiens
  Clone ID: LIB4676-050-E4_FLI
gacgtcgcgagcgctgagactgccgggcctcccagcccatctggcattcgagcgcaggaccgggcgccccggcaccgccgcgcgccacccgctaggatgccggtggccccagcgccctcagccgacggaggagccctttttcaacgccctcgctggagtctggcctgcacgccttgctgaatgaagccggaacctcagccccgcttccctttgaaatgaatgttcctggggcgccctctcgtggattttggagctaatcgtctgtgaatgccaagtgatggcaactgccctcccgccgcgtctccagccggtgcgggggaacgagaccctgcgggagcattaccagtacgtggggaagttggcgggcaggctgaaggaggcctccgagggcagcacgctcaccaccgtgctcttcttggtcatctgcagcttcatcgtcttggagaacctgatggttttgattgccatctggaaaaacaataaatttcacaaccgcatgtactttttcattggcaacctggctctctgcgacctgctggccggcatcgcttacaaggtcaacattctgatgtctggcaagaagacgttcagcctgtctcccacggtctggttcctcagggagggcagtatgttcgtggcccttggggcgtccacctgcagcttactggccatcgccatcgagcggcacttgacaatgatcaaaatgaggccttacgacgccaacaagaggcaccgcgtcttcctcctgatcgggatgtgctggctcattgccttcacgctgggcgccctgcccattctgggctggaactgcctgcacaatctccctgactgctctaccatcctgcccctctactccaagaagtacattgccttctgcatcagcatcttcacggccatcctggtgaccatcgtgatcctctacgcacgcatctacttcctggtgaagtccagcagccgtaaggtggccaaccacaacaactcggagcggtccatggcactgctgcggaccgtggtgattgtggtgagcgtgttcatcgcctgctggtccccactcttcatcctcttcctcattgatgtggcctgcagggtgcaggcgtgccccatcctcttcaaggctcagtggttcatcgtgttggctgtgctcaactccgccatgaacccggtcatctacacgctggccagcaaggagatgcggcgggccttcttccgtctggtctgcaactgcctggtcaggggacggggggcccgcgcctcacccatccagcctgcgctcgacccaagcagaagtaaatcaagcagcagcaacaatagcagccactctccgaaggtcaaggaagacctgccccacacagccccctcatcctgcatcatggacaagaacgcagcacttcagaatgggatcttctgcaactgatcgtctccatgcgccctgctctgcggctgtgttcttatttattgcatgcgtcgcttccacaggggcccctcaagagctgtgactcgggagagctaccttactttgaccaacagcctgcccagtgtggatgtctcttacagagggggcccaaggaatcaccaccccgcttcagtgtaaacaacgtgccttgtccactttgggctccagagtctttcagatgtactaagctgctgacatcatccactgccttctgctgcatcctagacaccctccctgttgttcacagagagggaaggtcgtgggccacacaatgctgtgtgaccctctccgtgtgcctctgaatggtgttttgatgattttacactacatttcctgtgcgtagaatggatgcttgtatattcgtacatctctatgttacacagaatttgtgttgcaggtgtttgccatgtggtacctacatagaatctccatacaacacacaggtaacaggttatacaagtggattcagactgaacccccagtacaaggacattgttttgaactaggtggacatgccatccctggtctccttagactgacatgattctcatgttaaccaagtttaaaagttcaaattccccaaaaaggcttgtccaaggctggccccagatgtgtgggtctgacccacaccagccctgtgtcctgtcctttcagtcatttgtccctgcgtaattttaatcgtattccaaagcccaattatgtgatggttttcaggtttctgcaaattacagaagagccagccaagatcacccaggagcttgtgcccccagatgggccaaagaaagagcctatgaaggagaagcagaagcagacggctggcctggctcaccttcccacgccagtggggcaggggtctgcttcaggaaatggaagctgtccaggaaatgagcagagattcacaagacagcactttgattctatgttgagtttgtttctatattagaaaagcagcaagtcagtaatcccccgtggcatcacagctaagtagctgtggccaccggcagtttcacagcatcctgaaagctggcactgatcgtgactatcagtgaaagaagtttaattttcaggttagaaaatgtgatctggcagtttatgcattcttcagagtaatgtaataatacctatgtgatgctgtaattttacttttcaacataagttgaacccgtagcagtctgtttaccttgtaaagggattacttagaagacatttttgtacatgctcttccccaaggattgtacgtattatacaaatagatggaaagaaaagtgaacacgtttgtagaactttcataagcacacagttgctgtgttgagttctctttaaaaacaaggacaaaaccaaccagcgttcaaaggaacctcccatcagagtcccctaaagtattttaggttcagtgagcatttgcctgaataaaacctaaaagagtagtcttaacacattactaactttttctaagagaaattgattcctgttttgtcatctgatgcaatttgctcttataaagagacattttcataggttcagagtaactcacctccatgggctgaccaaaggcttttctaatttttgttactgatgagatgaaacctatttgtaaggagatcttccccaggagcatttctgttgccttcttgacatcaatgaaaagtagcatattctcttatgaaatagcatgagaaaacacagggcatttctaggacagtaaaacgttaaagtactggattaagaaaacaacaacaggctgggcgcagtggctcacacctgtaatcccagcactttgggaggctgaggcgggtggatcacctgaggtcaggagtttgtgaccagcctggccaacatagtgaaatcctgtttctactaaaaatacaaaaattagctggatgcgatagcacgtgcctgtagtcccagctactcgggaggctgaggctggagagttgctcaaacccgggaggcggagattgcagtgagccaagatcgcaccgctgcactccagcctgggtgacagagcgaccctctgtctcaaaaaataataataataataaataaaacaacaacaaaatgcatcagagagccaaaacattcagtattgcattttcacataggtgatgaaatgactttggaactttatctgtgttatagttatgagttgctttgggagacttggagctctctgtagctattgttcataacactttgctccataaccctgatgtccgcagtatctaagtatctcagccttcatccattaactctactagggagcccacagccaccatttccactaggaggtatcaatatttgtggtatgacataaggctcccttgaaataacaagacttttgagcaatctgaattaaaaatacatcaaaaaagtaatagcgctcatttgctaaatgcaaaaaataatcacctttgataccaatgtgcaccaatatgcctaactagctagccagctggagataatttaccagggaatgtttcaaagccctaaccttgaagtttggaaacaggtggtcttctatgctgcagagaaactatgcattaggtctcttttcaattagaaacctttactatttccaatgtatgtttgttaaaaataataataataaaaccaaaagcctttgtggaaaccc

SEQ ID NO: 26958 - DNA, 3236 bp, Homo sapiens
  Clone ID: LIB4676-058-A2_FLI
cgctagccgaagcggctgcatctggcgccgcgtctgccccgcgtgctcggagcggattctgcccgccgtccccggagccctcggcgccccgctgagcccgcgatcacttcctccctgtgaccaaccggcgctgcaggttagagcctggcaatgccgtttgggtgtgtgactctgggtgacaagaagaactataaccagccatcggaggtgactgacagatatgatttgggacaggtcatcaagactgaggagttttgtgaaatcttccgggccaaggacaagacgacaggcaagctgcacacctgcaagaagttccagaagcgggacggccgcaaggtgcggaaagctgccaagaacgagataggcatcctcaagatggtgaagcatcccaacatcctacagctggtggatgtgtttgtgacccgcaaggagtactttatcttcctggagctggccacggggagggaggtgtttgactggatcctggaccagggctactactcggagcgagacacaagcaacgtggtacggcaagtcctggaggccgtggcctatttgcactcactcaagatcgtgcacaggaatctcaagctggagaacctggtttactacaaccggctgaagaactcgaagattgtcatcagtgacttccatctggctaagctagaaaatggcctcatcaaggagccctgtgggacccccgagtatctgggcaagcagggggtggggcaggggcagggggataatggggggcagccttcagggagctgctctgggcagggggaaaatgtgctcatctcaggaagctggtgtggatggtactggacctggctaggcctgatactgaccagcagatgggcgctgtgtttgtagccccagaggtggtaggccggcagcggtatggacgccctgtggactgctgggccattggagtcatcatgtacatcctgtgagtggacagatggacaagcaggcttgcagtcagatggggtgggggcatgtgtctgtggcctttctgtgtgacccttcccccatgcaggctttcaggcaacccacctttctatgaggaggtggaagaagatgattatgagaaccatgataagaatctcttccgcaagatcctggctggtgactatgagtttgactctccatattgggatgatatttcgcaggcagccaaagacctggtcacaaggctgatggaggtggagcaagaccagcggatcactgcagaagaggccatctcccatgagtggatttctggcaatgctgcttctgataagaacatcaaggatggtgtctgtgcccagattgaaaagaactttgccagggccaagtggaagaaggctgtccgagtgaccaccctcatgaaacggctccgggcaccagagcagtccagcacggctgcagcccagtcggcctcagccacagacactgccacccccggggctgcaggtggggccacagctgcagctgcgagtggagctacctcagcccctgagggtgatgctgctcgtgctgcaaagagtgataatgtggcccccgcagaccgtagtgccaccccagccacagatggaagtgccaccccagccactgatggcagtgtcaccccagccaccgatggaagcatcactccagccactgatgggagtgtcaccccagccactgacaggagcgctactccagccactgatgggagagccacaccagccacagaagagagcactgtgcccaccacccaaagcagtgccatgctggccaccaaggcagctgccacccctgagccggctatggcccagccggacagcacagccccagagggcgccacaggccaggctccaccctctagtaaaggggaagaggctgctggttatgcccaggagtctcaaagggaggaggccagctgagtaggcagcctggtgagggggggcaggggatgggcaggagggtgggagagtggatgaggggcttctcactgtacatagagtcactggcatgatgccctcgctcccccatgcccccacatcccagtggggcataactaggggtcacgggagagcagtctcgtctcctgtgtgtatgtgtgtgagtggtgggcaggccagtggcagggccggccccagcccctgcatggattccttgtggcttttctgtcttttgctagcttcaccagtttctgttccttgtgggatgctgctctagggatactcagggggctcctgctctccttccccttcccttcttgcctcaccattcccctaggcaggccctgcaggtcccacactctcccaggccctaaacttgggcggccttgccctgagagctggtcctccagcgaggccctgtcagcggtcttaggctcctgcacatgaaggtgtgtgcctgtggtgtgtgggctgctctaggagcagatacaggctggtatagaggatgcagaaaggtagggcagtatgtttaagtccagacttggcacatggctagggatactgctcactagctgtggaggtcctcaggagtggagagaatgagtaggagggcagaagcttccatttttgtccttcctaagaccctgttatttgtgttatttcctgcctttccgagtcctgcagtgggctgccctgtaccctgaacctcatgagcctctaagggaaaggaggaacaattaggacgtggcaatgagacctggcagggcagagtacaagcccagcacccagtgtcccagccttactgggtccttaccctgggccaaacagggagggctgatacctccttgctcttcctagatgcccacctcctacaatctcagcccacaagtcctctccaccctagggggcttgctgcatggcaataactcataatctgatttggaggtttgccctttacaggggcagattttctgctcagttcaacaatgaaatgaagaggaactccctctttctacagctcacttctatcagaggcccaggtgcctcagagccacattgagttgctttttctgggatgaggaagtagggttaaactccccagtttcctgagggaggctcctgacaggtgccctttgtcagaccctaccacagcctggataggcagccacattggtcctcgcccttgctcggcactccgtggtggtcctgcccttctccctgcatgcctgtgggtctgctctggtgtgtgaaggtcggtgggttaactgtgtgcctactgaacctggcaaataaacatcaccctgcaaagcc

SEQ ID NO: 26959 - DNA, 2463 bp, Homo sapiens
  Clone ID: LIB4676-059-G1_FLI
cacaacccggcgatcgaaaagattcttaggaacgccgtaccagccgcgtctctcaggacagcaggcccctgtccttctgtcgggcgccgctcagccgtgccctccgcccctcaggttctttttctaattccaaataaacttgcaagaggactatgaaagattatgatgaacttctcaaatattatgaattacatgaaactattgggacaggtggctttgcaaaggtcaaacttgcctgccatatccttactggagagatggtagctataaaaatcatggataaaaacacactagggagtgatttgccccggatcaaaacggagattgaggccttgaagaacctgagacatcagcatatatgtcaactctaccatgtgctagagacagccaacaaaatattcatggttcttgagtactgccctggaggagagctgtttgactatataatttcccaggatcgcctgtcagaagaggagacccgggttgtcttccgtcagatagtatctgctgttgcttatgtgcacagccagggctatgctcacagggacctcaagccagaaaatttgctgtttgatgaatatcataaattaaagctgattgactttggtctctgtgcaaaacccaagggtaacaaggattaccatctacagacatgctgtgggagtctggcttatgcagcacctgagttaatacaaggcaaatcatatcttggatcagaggcagatgtttggagcatgggcatactgttatatgttcttatgtgtggatttctaccatttgatgatgataatgtaatggctttatacaagaagattatgagaggaaaatatgatgttcccaagtggctctctcccagtagcattctgcttcttcaacaaatgctgcaggtggacccaaagaaacggatttctatgaaaaatctattgaaccatccctggatcatgcaagattacaactatcctgttgagtggcaaagcaagaatccttttattcacctcgatgatgattgcgtaacagaactttctgtacatcacagaaacaacaggcaaacaatggaggatttaatttcactgtggcagtatgatcacctcacggctacctatcttctgcttctagccaagaaggctcggggaaaaccagttcgtttaaggctttcttctttctcctgtggacaagccagtgctaccccattcacagacatcaagtcaaataattggagtctggaagatgtgaccgcaagtgataaaaattatgtggcgggattaatagactatgattggtgtgaagatgatttatcaacaggtgctgctactccccgaacatcacagtttaccaagtactggacagaatcaaatggggtggaatctaaatcattaactccagccttatgcagaacacctgcaaataaattaaagaacaaagaaaatgtatatactcctaagtctgctgtaaagaatgaagagtactttatgtttcctgagccaaagactccagttaataagaaccagcataagagagaaatactcactacgccaaatcgttacactacaccctcaaaagctagaaaccagtgcctgaaagaaactccaattaaaataccagtaaattcaacaggaacagacaagttaatgacaggtgtcattagccctgagaggcggtgccgctcagtggaattggatctcaaccaagcacatatggaggagactccaaaaagaaagggagccaaagtgtttgggagccttgaaagggggttggataaggttatcactgtgctcaccaggagcaaaaggaagggttctgccagagacgggcccagaagactaaagcttcactataatgtgactacaactagattagtgaatccagatcaactgttgaatgaaataatgtctattcttccaaagaagcatgttgactttgtacaaaagggttatacactgaagtgtcaaacacagtcagattttgggaaagtgacaatgcaatttgaattagaagtgtgccagcttcaaaaacccgatgtggtgggtatcaggaggcagcggcttaagggcgatgcctgggtttacaaaagattagtggaagacatcctatctagctgcaaggtataattgatggattcttccatcctgccggatgagtgtgggtgtgatacagcctacataaagactgttatgatcgctttgattttaaagttcattggaactaccaacttgtttctaaagagctatcttaagaccaatatctctttgtttttaaacaaaagatattattttgtgtatgaatctaaatcaagcccatctgtcattatgttactgtcttttttaatcatgtggttttgtatattaataattgttgactttcttagattcacttccatatgtgaatgtaagctcttaactatgtctctttgtaatgtgtaatttctttctgaaataaaaccatttgtgaatataaaaaaaaaca

SEQ ID NO: 26960 - DNA, 2533 bp, Homo sapiens
  Clone ID: LIB4693-008-F2_FLI
cgcagtgttgggactgtctgggtatcggaaagcaagcctacgttgctcactattacgtataatccttttcttttcaagatgcctgaggaagtgcaccatggagaggaggaggtggagacttttgcctttcaggcagaaattgcccaactcatgtccctcatcatcaataccttctattccaacaaggagattttccttcgggagttgatctctaatgcttctgatgccttggacaagattcgctatgagagcctgacagacccttcgaagttggacagtggtaaagagctgaaaattgacatcatccccaaccctcaggaacgtaccctgactttggtagacacaggcattggcatgaccaaagctgatctcataaataatttgggaaccattgccaagtctggtactaaagcattcatggaggctcttcaggctggtgcagacatctccatgattgggcagtttggtgttggcttttattctgcctacttggtggcagagaaagtggttgtgatcacaaagcacaacgatgatgaacagtatgcttgggagtcttctgctggaggttccttcactgtgcgtgctgaccatggtgagcccattggcaggggtaccaaagtgatcctccatcttaaagaagatcagacagagtacctagaagagaggcgggtcaaagaagtagtgaagaagcattctcagttcataggctatcccatcaccctttatttggagaaggaacgagagaaggaaattagtgatgatgaggcagaggaagagaaaggtgagaaagaagaggaagataaagatgatgaagaaaagcccaagatcgaagatgtgggttcagatgaggaggatgacagcggtaaggataagaagaagaaaactaagaagatcaaagagaaatacattgatcaggaagaactaaacaagaccaagcctatttggaccagaaaccctgatgacatcacccaagaggagtatggagaattctacaagagcctcactaatgactgggaagaccacttggcagtcaagcacttttctgtagaaggtcagttggaattcagggcattgctatttattcctcgtcgggctccctttgacctttttgagaacaagaagaaaaagaacaacatcaaactctatgtccgccgtgtgttcatcatggacagctgtgatgagttgataccagagtatctcaattttatccgtggtgtggttgactctgaggatctgcccctgaacatctcccgagaaatgctccagcagagcaaaatcttgaaagtcattcgcaaaaacattgttaagaagtgccttgagctcttctctgagctggcagaagacaaggagaattacaagaaattctatgaggcattctctaaaaatctcaagcttggaatccacgaagactccactaaccgccgccgcctgtctgagctgctgcgctatcatacctcccagtctggagatgagatgacatctctgtcagagtatgtttctcgcatgaaggagacacagaagtccatctattacatcactggtgagagcaaagagcaggtggccaactcagcttttgtggagcgagtgcggaaacggggcttcgaggtggtatatatgaccgagcccattgacgagtactgtgtgcagcagctcaaggaatttgatgggaagagcctggtctcagttaccaaggagggtctggagctgcctgaggatgaggaggagaagaagaagatggaagagagcaaggcaaagtttgagaacctctgcaagctcatgaaagaaatcttagataagaaggttgagaaggtgacaatctccaatagacttgtgtcttcaccttgctgcattgtgaccagcacctacggctggacagccaatatggagcggatcatgaaagcccaggcacttcgggacaactccaccatgggctatatgatggccaaaaagcacctggagatcaaccctgaccaccccattgtggagacgctgcggcagaaggctgaggccgacaagaatgataaggcagttaaggacctggtggtgctgctgtttgaaaccgccctgctatcttctggcttttcccttgaggatccccagacccactccaaccgcatctatcgcatgatcaagctaggtctaggtattgatgaagatgaagtggcagcagaggaacccaatgctgcagttcctgatgagatcccccctctcgagggcgatgaggatgcgtctcgcatggaagaagtcgattaggttaggagttcatagttggaaaacttgtgcccttgtatagtgtccccatgggctcccactgcagcctcgagtgcccctgtcccacctggctccccctgctggtgtctagtgtttttttccctctcctgtccttgtgttgaaggcagtaaactaagggtgtcaagccccattccctctctactcttgacagcaggattggatgttgtgtattgtggtttattttattttcttcattttgttctgaaattaaagtatgcaaaataaagaatatgccgttttt

SEQ ID NO: 26961 - DNA, 1703 bp, Zea mays
  Clone ID: LIB4698-001-E4_FLI
acaactagacatcgtaccacccaggtgatctcgcgcgccactgcctccttccatcccttagccccagctttactctcccctcccgcgcccagatcccgaggctcctacccctcgatcgccgccttccagcggccgatccggcgctggctcgcggcccccgacaggttttgctttatgctggttcatttgtctacggacaatggactagttgctgcactgtttctgtgattcaccatgggaagcagtggagcagatacaccgtctaaggagcagcagccacctgctacctcaggtgctgcaataccacctgtttatccagattggtctagcttccaggcatatcccccaatcccaccacatggattcttcccctcacctgtggcatcaagtccacagggtcatcctttcatgtggggagctcaagctatgattccaccttatggaacaccgccaccatatgtcatgtacccccctggagtatatgcccacccatctatgcccccgggtgcacatccatttactccttatgccattacttctccaaatggcaatgctgatgctactggaactactgctgcagctggtaatactgatggcaagccctctgaaggcaaagataaaagtccaacaaagcgatccaaaggaagtttgggcagcttgaacatgcttactggaaagaatcccagtgaacatggtaagtcctcaggtgcatcgggtaatggagtcacttctcaaagtggcgaaagtggcagtgacagttcaagcgaagggagtgaaggaaattctcacaatgattcacatcacagggaaagtggacaggaacacgatggggatgttcgaagttcccggaatggtgtatcacgtttgcaatctgagggaaaattgaaccaagctatggcaatcttgcccataccatcaagtggcccagcaactgatccaactacaaacctaaatattgggatggactattgggccaacacagcaagctctgctcctgcaattcatggcaaagcgacgtcaacaacagttccaggggctgtggtcccagcagagcagtggacacaggatgaacatgaactcaaaaagcaaagaagaaagcagtccaatagggagtctgcacgtagatctaggttacgtaaacaggctgaatgtgaggaattggctcaacgtgctgatgttttaaagcaggaaaatgcttcacttagagatgaagtaaaccgtatcagaaaagagtacgaggaacttctatcaaggaataactcactaaaggaaaaacttgaaggcaaacaacacaaaactgatgaggcaggacttaacaacaagctgcaacattctggtgatgacagccagaaaaaaggaaactaatgctatcatgcaatgcttgcctacattggtcctaactagattattgggaggtgcaattgtagtatgcacattaactccttactttattgcagttaattgttaccaggttgtgataatgttgatgccaacctcttgtgtgggtgtttcctgtttcagatctatcttggcttatcttttagaagccaagatgtgactgaagctataggctgtgacccaattcactatatctgttagaaatagtggataaagtcaaacttacaaatttgaagtgctgactaatattgttatgtatacctggcaaaagactggttttcttttaattcagtctggttgaacgg

SEQ ID NO: 26962 - DNA, 1615 bp, Zea mays
  Clone ID: LIB4698-002-C7_FLI
tctgagttgtcaagtccttgacctgatcatatcagttttgcttataaggatgggggtttacctcagtactccaaaaactgacaagctatctgaaaatggagaaaatgatagacttaagtttggtctttcatctatgcaaggatggcgagcaaccatggaagatgctcattcagcattgctagatcttgatagcgagacagcattctttggtgtttttgatggtcatggaggaagagtcgttgccaaattctgtgcaaaatatctgcatggtcaagtcctcaaaagcgaagcctattcaactggtgacctaggcactgctgtccatagagctttcttcagaatggatgaaatgatgcaaggacagagaggttggcgagaactatctgcacttggagacaaaataaacaagtttagtggtatgatagaaggattgatttggtctccaaggggcagtgattcaaataatcaacaagatgattgggcttcagaggagggacctcactctgactttgctgggccaacatgtgggagtacagcgtgtgtagcattaataagaaacacccaacttgttgtggcaaatgctggtgattcccgatgtgttatttcaaggggtgggaaggcatacaatttatcgagggaccacaaaccagagcttgcagctgagagagaaaggataatgaaagcagggggcttcatccatatgggacgagtaaatggaagtttaaacttgtcaagggcaattggagacgtggaattgaaacagaacaaattcctgcctcccgagaagcaaattgtgacggccaatcctgatatcaatgtcgtggagctctgcgatgatgacgactttgttgttgtagcatgtgatggcatttgggactgcatgtcaagccaacagctggtggattttatccacgagcgtataaacacggagagcagcctgtctgccgtgtgcgagagagtgctggacagatgcctggctccatcaacgatcgctggagacgggtgcgacaacatgaccatgatcctggtgcagttcaaaaaacctgtcgatcggaacaagaaggccgaagcagcagggcaatctgccagcaatgtggacgaagccaagagtcgtgttgctgaggagtgaagcatggctggcactcaccagggcgcaaccatttgctttcataaggcaggtgaaaaaaaggaacgaagaaacctgcagtgtacgtatctcaactgtacgtggcatgccatgcaaatcctgcctaagttaccccggacaatggcattgcctagtgcagtggtggatcttcagatcacaacctttcttgtgccagctttcggtcatctccactctccagccctcggaaccatggctgagtctgtctattctttgtgtggtgtgtagcattcctcgtgttttcgttgtccaaaatggtgtcaaatccagttttttgttgcgagaatgaaccgtgacgttagtgtgttttgctggcggttaggtgcaaaatactcgaaacctgaattgcccgctcgctatttcgggttgtaagtatatgatgaatctgattttagttgcatggtgtacccatcttatctgaaaataatgaaagatctgtttgtggttgat

SEQ ID NO: 26963 - DNA, 811 bp, Zea mays
  Clone ID: LIB4698-002-E4_FLI
taccctcgaggccggccgggaaaatcgatgaaacctgctccgatccgcactccctctgccttgcccacaatttctagctatttaaacccttttacgcaccataacctagcaggcacaaggaagaacgaagagagatcagcgacttaacaacaataatggccaccgccatagttcccacggacgccgagctgctgcaggcgcaggccgacctgtggcgccacagcctctactacctgacatccatggcgctcaagtgcgcggtggagctccacatcccgaccgccatccacaacctaggcgggtctgccacgctgccggacctcgtggccgcgctgtccctgccagcggccaagctcccgttcctcgggcgcgtgatgcggctgctggtcacgtcgggcgtcttcgcgtcgtccgacgacgtgcagtaccggctgaacccgctgtcctggctgctggtggagggcgtggagtcggaggaccacacctaccagaagtacttcgtgctgggcaccgtctcccgccactacgtggaggccggcatgtccctggccgactggttcaagaaggaggaggacgaggaccgccagctgccgtcgccgttcgaggccctgcacggggtgcccctcgtccacgagagcaccaagctgctggacgaggagctggacagggtcgtggaggaaggcgtggccgcgcacgacaacctggccatcgggaccgtcatacgggagtgcggcgccgacgtcttcagcggcctccgctcgctcacctactgctgcggcaggcaggggaacgccagcgcggccctcgagct

SEQ ID NO: 26964 - DNA, 1014 bp, Zea mays
  Clone ID: LIB4698-004-D7_FLI
ggccggcccatctattttctaaccctaattccacctggcacctgtcccggccgccgtgagccattgagcccacgaccacgagctccagagtggccgtcgccgagtctcgggctcttggctcacgcggcgcggctccccaggccccacccacccccacccccacgcgcccggcggcgtgctctctgctgtctgctctgcacccaggaccttcgcccacaggagctcagccctatccctcgacggtgctcgcggccggcgcgcggcggctcgacccttccccatctccagctgcacgcggtctccaccgcctggaatccagggcctccgacgccaccccacctccaccgcctggaatcgaggaccgtcggcgccgccgtcccctgcctgctgcctcgactcaactgtgtcagggtacttgcaaacagtgacaaaggttctgccttgccttactgtggagccatggctgcaaagatacgcgtggtgatgaagtcttttatgagccaaagcaaccaggtcgcagggcttctgccattcacaaagaaggtcggactacctgaatcgcgagccttatacaccgtgctgcggtcgccgcatatcgataagaagtccagggaacagttctcgatgcatgtcaagaaacagtttgtggaactgacagccaaaccgcacgagctccacaagaagttcttctggctaaaacgcctgcgcatacctggggcccagtacgaggtacagatttctttcaagacacgcctggatatggcgagcctaaggtcccaggctccttgatggctcacgatgatcgttcttatcgtcccgcgaaagtttgaagtgctgagactggtactcagaacttgtatccatcaacatttcatatgaagacatgcttattttgatgactttcgaaaaatgtagctgctaactatttccagtgcagttttgagtgcttatggcttgattcacacaaatgtagctgctacgttcagaaataaaaaaattatggaaatacagcgc

SEQ ID NO: 26965 - DNA, 1635 bp, Zea mays
  Clone ID: LIB4698-004-H8_FLI
tgaaagttgtccttgtcccctcgaacgcgcactgttcaaacaaaccctccactgccctccccactctccccttcaccgcgccgcactcccaagtcccaactcccaacaggcctaaatggcggcggccggaacaattcccggcgccgccgcagccattggcgcttctgtgtcccaacgccaacgtcgcgtcggcgctccttctttcgtagctgcctacgtctccgagggcacccgcctcgtctgccggaggcagctccgtccggctccggtcctcgcttcttccttcatctccctttctcatccagcgaggcggcggttcctctgcgatgctgcggccggagcctcctcaggtcccgctggagaagccaagccccagggatttgcagagagatacccagctcttgtcacaggtttcttcttcttcttgtggtattttctgaatgtaatatttaacatcctcaacaagaagatcttcgactacttcccctatccatattttgtgtcagtgagccatctttttattggagtactatactgccttattggctggagcttcggcatcccaaagcgcgcgccaatcaactcaacacttctgaagcagcttgttccagttgcggtttgccatgccattggccatgtaacaagcactgtgtcatttgctgctgtagctgtgtcatttgcccacactattaaagctctcgagccattcttcaatgcggctgcttcccagtttatccttggacaaccagttccattgacactctggctgtctcttgttccagtggtgattggtgtctcggtagcatccctcactgaactctcatttaattggactggcttcattaatgccatggtctcaaatatttctttcacctaccgaagcatctattctaagaaggctatgactgacatggatagtaccaacttgtatgcatacatatcaataattgctctctttgtctgcatcccccctgcaattattattgaaggacctcaattagtgcagcatggttttaaagatgcaattgccaaagttggattaacaaagttgatttctaattttttgtggtgggcttattctatcacctttataaccaggttgctacaaacacattggagcgggtagcccctttaacacatgccatcggcaatgtgttgaaacgtgttttcgtcattggcttttccatcatcgcattcggcaacaagatcaccacacagactggaattggcacttccattgctgtttctggtgttgccctctactcatttataaaggctaagattgaggagaaaaagcaaataaagagtgcataaggtgttggctgatgtggatgcggttggtttgtcgctttgatggacctctattctctcggtgaacgaacaaacttgcaagatggataaaatcttgctatctcctagtacatttgattgttattcccagtctggtactgaggtgtgcggttgttgttggctaacttgtttatttgaagcaaatttgagcaatgctcagtggcatggaatttccatttctgttttccttcgctcatttattctgacttgacatggtgctattgtaatcttaagcagtagtgtctctagaatgttttccccaaggagatttcagtaccaaatttg

SEQ ID NO: 26966 - DNA, 1657 bp, Zea mays
  Clone ID: LIB4698-005-A8_FLI
ctcgaggccggccgggaacaaagcctgggcctggccgcctggacctgaaaaagtcgttcgggattcaaacccttcgatcccaaatctgccctgcacgcctcgccgccggccacacccccggcggtcgtcgccctacccgcccttctccttacctctaaccccgccggagcccaacacctccccaccatgccgcgaaacttccgcaagcggggcatcgagcaggacactgacgaccgctccgacgacgaggacactcgccgcatcgccctcgaggagatcaagtacatgcagaagctccgggagaggaagctgggtatccccgccgacctcgccgccgcatccactaacgggtcctccgcccgtggtctattgggcaccggggcagcggtcgccggtgaggccgagaaggaggacctcgtcctccaggacaccttcgctcaggagaccgccgtcactatcgaggaccccaacatgttgaggtacgtggagaccgagctggcgaagaagaggggtaagatggttgatgtgggacacaaggaagagatggaccatgtggacgagctctataccgtgccagaccacctcaaggtaaagaagaagaactcagaggagagctcgacacaatggacaactggcattgctgaagttcagctgcctattgagtacaaattaagaaacatcgaagaaaccgaggcggctaaaaagttgctgcaagagaaaaggcttgcaagaaaaccaaaaccagatgcaaacattccatcaagttatagtgctgattatttccaccgtggcaaagaatatgatgaaaaactgcgaagagagaatcctgggttgtacaaagataatgattctcggccaagtggaaatccaggaggcaaagcaacagatactaaaaatccagatggtgttggtgcaggacggagagaagctgcgagtgatgaactcatgcttcagcgtttccgcaaacgagaaaaattccgcgcccttcgaagataagccagagctgacaggttgctagattgtgccagttgcctttgaagctcaaaaatatagttgtggctgcataaagtcccaacatatcatgtccttttagtgagaaacttactgtaaaatgcatccttggttattgagtctgcttctgcagctgctaagggcaaggagcagattaaccttattacagaggcgatttggggcaatatatttgagctgagggatatctgaattttgtgtcagctctgaggctcatatattaagaggggccgcagtggttcaggacataggagctcataactttccagatgctcagatcgtgccatgttcatctgcaatggaagaaaggaaggtgtgttctccgtacaaatataaatgaactgcttcgacatcttgagcaaactccaaggggtagtgcgaatgtctgatctcattttctttggagtgaatggcaaagcctgcaaattcatctttctagtctagaatgtattgtttctctgaattatttgcagtttgctgcagtagcatcagttatctagatttctagggacgagcaatctgtgagttgtttttgttgcactattgctgcttgctttgcctttactagttcaagtatcaattctttataagagttttgagtttcatatcaattttgaggttttggccg

SEQ ID NO: 26967 - DNA, 1665 bp, Zea mays
  Clone ID: LIB4698-005-F8_FLI
acctaccaaagccgctccaatgatgaactcgcttgtatcattacttcgttagccacttccctcacacatcctgtttcttgccgcactagaaacgtcgatccagcaatggctgctaccccgaccatcgttctggtgcccgtctggggcattggccacttcgtaccaatgctcgaggtcggcaagcggctgctcgcacgcagcgcactgcccctcaccgtcaccgtgctcgtaatgccgttgcctgcagaggcgaagcgggcgtccgagatcaccgagcacatacgccagcaggaagcctccggcctcgccatccgcttccaccatctgccagcggtggaacccccaaccgaccactcgggcatcgaggagtacatatcccgctacgtgcagctgtactcgccccacgtcaaggcggccgtcgccgggttgacgtgcccggtggccggcgtcgttgtcgacatcttctgcacggcgctgttcgacgcggcgcaccagctcggcgtgccggcctacgtgtacctgatcaccagcgccgcgatgtgcgcgctcttgctgcgctccccgacgctcgacgaggaggtagccgtcgaggtcgagttcgagcaaatggaaggcggagtggacgtgccagggctgccgccggtgccggcgtcctgcctgccgacggggctggagaacagaaagatcccgacctatcgctggttcctgtacaacggcaggcgctatatggaagcagcaggcatcatcgtcaacaccattgccgaggccgagccgcgcgtcctcgcggccatcgccgacgggcggtgcacgcgtggtgtcccggcacctccggtgtactcgatcgggccggtgatcccctccaccccgcccgccgagcagcaggcgcaggagtgcgtgcgctggctcgactcgcagcctccgagctccgtggtgttcctatgcttcggcagcggtggctgcttcacggcgccccaagcgcacgagatagcgcacggcctggaccgtagcgggcatcgattcctgtgggtgctgcgcgggacgccggagcccggcacgaagttgccctcggacgggaacctcgcggagctgcttccggcggatttcttggcgaggacgaaggatagagggctcgtgtggcctaccaaggcgccgcagaaggagatactcgcccacgccgccgtgggaggcttcgtcacgcactgtggctggaactcggtcctcgagagcctctggcatggcgtgccgatggtgccatggccgcttggcgccgagcagcactacaacgcgttcacgctggtggccgacatgggcgtcgccgtggcgctgaacgtggaaaggaagaggaagaatttcgtggaggcgaccgagctggagcgagcggttaaagctctgatgtgcgacggcgagacagcgaggaaggttagggacaaggtcatggagataaaagccgcgtgccggaaggcaatggaggagggcggatcatcgaacatgtcgttgcagaggctctgtgatgcgctcgtcgaaggcgcggtgcacccgggaaagtgatgcccacagagttcaatcaggaggctctgtccaccagccatccaatggtgtacatgtattctgttatgagttctctgtttttagagcaagttaaataatattttttatgagttctcg

SEQ ID NO: 26968 - DNA, 928 bp, Zea mays
  Clone ID: LIB4698-005-G5_FLI
taccctcgaggccggccgggacgccaacaacagtgtgaagtccaccattgagaggtacaagaaggccaacagtgacacctccaactctggcacagttgcagaagtcaatgctcagcactaccagcaggagtcctccaagctgcgccaggcgatcgatagcttgcaaaacgcaaacaggaccatagtgggagattcaatccacaccatgggcctcagggagcttaagcagatggagggcaagctggagaaggccataaacaagattagggctagaaagaatgagctcttgtatgctgaagttgaatatatgcaaagaaggatggatctgcagactgacaacatgtacctgaggagcaagatcgccgagaataataatgaaacggggcagccagcgatgaacatgattggagtgccgtcgacgagcgagtacgatcacatggcctcttttgttgactcgagaaactttcttcaggtgaacatgcagcagcagcagcctcagcattactcccatcagctgcaaccaacgaccctccaactcggatgatgaaattaagaatcttcggccaacaatccatgcacgcaagcacgcagtaaatcatgtgtgtccaactcagataaaaaaatctactctagcgtttgtataattattaataatcgtgactagtaaactgttatatatatatgtatagccatgtgtgtggtggcgcctacatatatgtcatgtggctgtacggcgagtttttttttcacaagcgtttgcagcagcatttggtgttgctcatcgatcaattaatcgcaagaaattaaacttgtcaccactgtgggtgtacgtgttaatgcagttgttgtatctgttaattgtaccctccatcagataaacgcgggtgcgcgtatgcatacttatttatgtgtatgattatttgtgtag

SEQ ID NO: 26969 - DNA, 1352 bp, Zea mays
  Clone ID: LIB4698-005-G9_FLI
ctcgaggccggccgggaagtggcagcagcaagcaccacggagagggacacgactcctctccctccctccctcaccatgccttccccttcctcggcccactggctgagcctcgtcgggagcatctggctgcagaccatcaacgggcccaacgcggacttccccgtctactcgtcgcagctcaaggacctgaagcacatcacgcaggtgcagctcaacttcctggccttcgcgtccgacgcgggcaagctcttcggctggttctccggggtggcggcgctgcacctgccgctgtggctcgtggccttggtcggcgcatccttcggcctcgtcggctacggggtccagtacctcttcctcgacagcgccgccctccgctactggcacctgttcctgctcacctccctggccgggaacggcatctgctggatcaacaccgtctgctacctcctctgcatccgcaacttcggcagcagccgcagccgcgtcgccgtgagcctcgccgccagctacctcggcctcagcgccaaggtctacaccagcctggcggactccatacccggccaccaggccacctccaaggccaagacctacctcctcctcaatgccgtcgtgcccatgctcgtcaccgtcgcggtggcgccgtcgctcagggcggtggacctcacggtcacgggcgagggccaggcgggggccagcacggacgcggcattcctcgtcatgttcgccatcacgctcgccacgggggcctgcgccgtggttggcagcatcggctccacgtccggcggcgggctgtcgtcgagggagcacgtggtcagcctcgccgtgctgctggccacccccgtgctcatcccgctggcgctcagggtccgggagagcctccacaggatacgggagaccaagcgggagaacaggatctacgacctcggcaccgacgacggcgtcgtcgtcgacgtggcggccaccgccgggagcaaggacggagacggcgtcgtcacggagaaaccgcaggaggagatcgacggcctccggctgctgaggaagctcgacttctggctctacttcttcagctacatgttcagtggcaccctgggcctggtgttcttgaacaacctgggacagatcgccgagtcgcggcggctcgggcagacttccacgctcgtctcgctgtcgtcttcgtttggattcttcggccgcctgctcccgtccttcttggactactactccgcgaagtaagcacaaagctaattaatatatatgaagactcgatcggtagtagattcagtttcaagtttctagatcgaccaccgatgcgcgtggtcgtttttaattgacatgctaacgaacttgtcgcg

SEQ ID NO: 26970 - DNA, 1715 bp, Zea mays
  Clone ID: LIB4698-005-H6_FLI
aacacgccgccgtcttctgcggttctgccgtttactcctccactttggcctcctcacttgcaagtttaatcttcgcccccagccatgggtaaggagaagtctcacatcaacattgtggttattggccacgtcgactctggcaagtcgacaaccaccggccacctgatctacaagcttggaggcattgacaagcgtgtgatcgagaggtttgagaaggaggccgctgaaatgaacaagcggtcctttaagtatgcttgggtgcttgacaagctcaaggctgagcgtgagaggggtatcaccattgatattgctctgtggaagtttgagaccaccaagtactattgcaccgttattgatgcccctggacaccgtgactttatcaagaacatgatcactggtacctcccaggctgactgtgctgtccttatcattgactccaccactggtggttttgaggctggtatctccaaggatggccagacacgtgagcatgctctccttgcgttcacacttggagtgaagcagatgatttgctgctgcaacaagatggatgcaaccactcccaaatactccaaggcacgttatgatgagattgtgaaggaagtctcatcttacctcaagaaagttgggtacaaccctgataagatagcatttgttcccatctctggttttgagggtgacaacatgattgagaggtccaccaaccttgactggtacaaaggcccaaccctgcttgaggctcttgaccagatcaccgagcccaagagaccctcggacaagcccctgcgtctccccctccaggatgtgtacaagattggtggtattggaactgtgccagttggtcgtgtggagactggtgtcatcaagcctggtatggttgtcacctttggtccaactggcctgactactgaggtgaagtctgttgagatgcaccatgaggctcttcaggaggcccttcctggtgacaatgttggcttcaacgtgaagaacgtcgctgtgaaggatatcaagcgtggttatgtggcctccaactccaaggatgaccctgccaaggaggctgccagcttcacctcccaggtcatcatcatgaaccaccctgggcagatcggtaacggttatgccccagtgctggactgccacacctcccatattgctgtcaagtttgctgagctcattaccaagatcgacaggcgttctggcaaggagcttgagaaagagcccaagttcttgaagaacggtgatgctggtatggtgaagatgattcccaccaagcccatggtggtggagacattctcgcagtatcctcccctgggtaggtttgctgtccgtgacatgagacagacggttgctgttggagtcatcaagagtgtggagaagaaggacccgaccggtgccaaggtgaccaaggctgctgccaagaagaaatgatgcgacctgtcgttgatgcagcgtctgcttttccaatacgtagctgagatgttccattttgacataagttttgtatgctgtggttgctgtttaccttgtgaactgttgagctctactattgggtgtccgtttatctgtttatgtagcatcttgttatttcacctattgcaatacaagaatgctatatgacatatatgttagacatttgggcaatgttaaatggatttttactaagtcgtgtagttagatttatgcacttgttccattttcaatagttttattttttg

SEQ ID NO: 26971 - DNA, 1856 bp, Zea mays
  Clone ID: LIB4699-002-D1_FLI
aaaaaatctaggtatagtttttttaatcgggcaacaccaattattgtcgataatagttccttgaaaaccggtgcctttttctagcggcgaggaggcaggcggtagcggaatctggcaccggccatcacgtcccctcccgccgcttcctcctccctgccctacctttccccagatccgaatccattaaaccagcggatcttgcatcgggggcgtccacggcatccgggcaagcgagtggtggagccagcagccatgagatggtatgcatcggtagcctcctgagggcgctggtgctgcgtgcggcgtcgtctgcgggcaggcgccgggggcccaggattctgtgtggccgcgcgacggatgtgcgcgtgacgccacggcacggacacggctggcgcgggttccgggcggtcacgggaaggatgatgctggactcctctgagtctgcctcttccgccgccgccgccgccgcggaggcgggagctggggcggtggcaggccaggcgcagccgcagcgccgcgcggtgggggccgtgccccaggcgcacgatggtggctacgccagcggcggatgggagagagaagatggtaaactgagttgtggatactcaagttttagagggaagagagctacaatggaggatttctatgatgtaaaactaactgaaattgatggacaagctattagcctgttcggtgtttttgacggtcatggtggatcacgtgctgctgagtatttgagggagcacttgtttgagaaccttctcaagcaccctgatttcttgacggatacaaagcttgctataagcgaaacatatcagaaaaccgatacagatttcttggaatcggaagcaagtgctttcagagatgatggttcaacagcttcaactgcaattttggtgggtgaccgtctgtatgttgcaaatgttggtgattctcgtgctgttatttcaaaagctggcaaaggtattgcatactggaagtaggtatcttaagtagtgtatttgtgtttcatttccatgtcacatttgtcagttgatgtatggtctctggtctgttgaatctaaatcacaaagcaaaatcttggcatcgctctgtttctcataccaatatataatccataaacctttgttgtagttaatacagaaccatccatgacagtttggttcgtagggtttctcattgaatctgtgtaattttgattctgtgccaccctgtgacaaaatgcctgacagttcatctgtttgtttttttatagctatgtcactttcagaagatcacaaacctaacaggattgatgagcgaaagagaatagaaaatgctggtggtattgtcatttgggctggtacttggagggtaggtggtgtattggcgatgtctcgtgcatttggcaatcgtttactgaagccatatgtggtggcggaacctgaaattcaggaagaacagttcagtgatgagctggaatgcctggttctcgctagtgacgggctttgggatgttgtggaaaatgaggaagccgtttcccttggcaaatcagaggacacgccagagtctgcagctcggaaattgacagagatcgcttattctcgtggcagcgctgacaatatcacgtgtatcgtggttcaatttcaccatggcaaaaccggatgagccatgtggcggccaatttcagttgtaccctgcttcaggctattattatcctgcaagccgggtggtggggcttctctcagatttatcgctcttgtagcaacttccaagaactcgtccattgattcttttgttgtcttgtaggaaacatttgttccaacaggtgtaatagatattttcaatgggttaatttctaataaaactatgtttac

SEQ ID NO: 26972 - DNA, 1172 bp, Zea mays
  Clone ID: LIB4699-003-F9_FLI
ggccggccgggagtgtgcacgcgtgaccgcgaaaagttgtttcgacctcctcggctgctgctttccgctgacctcgccgtgccattgagatgtcatagaacctgccgagccggtcgcaggcgcgaggagaatggggacggaggccgacgccgcagccgtggattcgcttcggtcgcagatcccgttccagaccgacggggagctcatcctcccgccgcgcgatgtggggctcgtcctcgtcgacctctgcaacggcttctgcaccgtcggcgccgggaacctcgctcctgttgcgccaaataagcagataagtaaaatggtggaagaggccgctaggctctctaagctgttctgtgatagaaacctgccgatctttgcattcctggatacccattatccagataagccggagccaccgtatcctcctcactgtatcattggtactggggaggagaacttcgttccagacctggagtggttggaaaaggagccaaatgtgactataaagaggaaaagttgtattgacggttacatcagctgcatagaggaggacgggtctagtgtttttgttgactgggtgggaaaatatcagatcaaaactgtcttggtactcgggatatgcacggacatctgtgttttggattttgcaagctcaactctggctgctcgaaatattgaccgagtgcctccattacgagatgtcgtgatttattcagaggggtgtgctacatatgaccttcctgttgagatcgctatgaatatcaaaggagctcttgcccatcctcaggacctgatgcatcatattggactctatatggccaaaggaaggggtgcaaaggttgttgacagggtggttattgaaccttgaataaaaaaaacttccctcatcgtagtgatgttgctagagtttcctgtcttctcatccttccattgtaacaatcagatatatatgcgtcttagcataaagttgttgagatactaatgctagcgacaactatgttgacttgtcgagtatgtagagatgggctcatcattttgtggtgagcttgtacatatttcctgagattactttgtcctgccaaacatgcgccagttctccattggttgctaatgttcggctctgggattgtatattcgtatttaataaaagtactccctcctattccaattcg

SEQ ID NO: 26973 - DNA, 668 bp, Zea mays
  Clone ID: LIB4699-004-C11_FLI
ctcgaggccggccgggatctattctaccccacctgacctgacccgccgtgcctcaaccggttccgcgcggccaacgcgtcttccggtctgccccgtcggcgataatccgccgcctagcaaagcggccgagccgagccgatggcgctggcgctggccgggctcccccacgccgcttcccgcctcgtgcctcgtgtccgccagcctcccttccgcgctctctgcgccgcagctgcggccggcgatgcctcgaagcggatgctggtactgtacaccaagccggggtgctgcctctgcgatggactcaaggagaagctccacgccgcgtccatgcttgctggcacgccctactcactcgcgtctctcgagctccaggagagggacatcacgacgaatccggagtgggagcggctctaccagtacgagattccagtgttggccaaggtgctccccgacgggaccgaggaagtacttcccagattatcgccacgtctaagtgttgagctcgtacaaaagaaaatttattttgcgtttgatcagtagggagaccgttctgggggaaacggtaattttattttattaattaatagctccagctgtaagattgccagttgttatattttcatgattttgacacatgaatttcaatttgcttgacttatgtttgcaag

SEQ ID NO: 26974 - DNA, 1798 bp, Zea mays
  Clone ID: LIB4699-004-F4_FLI
tcggcctccctccctccggcgagcggcggcgcgggcggccatggaggtgttctactacgtcgtgttcggcgcgctggccgccatcgtggcggggctcgagctcggcaagagcggcaaggaccgcgtcgccaccacctccgccttcaactccttcaagaacaactacgtcctcgtctactccctcatgatgtccggggactggctgcagggcccctacgtctactacctctacagccagtacggcttcgacaagggcgacatcggccgcctcttcatcgccggcttcggatcctccatgctcttcggcaccatcgtcggctccctcgccgacaaacaaggccgcaagagggcctgcatcacctactgcatcagctacatcctcagctgcatcaccaagcactcccccgagtacagggtcctcatgatcggccgcatcctcggaggcatcgccacctcgctgctcttctccgccttcgagtcctggctcgtcgcagagcacaacaagagaggctttgacccgcagtggctgtccataacattctccaaagccatcttccttgggaatggcttaattgccattgtgtctgggctattcgcgaaccttcttgctgagaacttgggttttggtcccgtggctccgtttgatgccgctgcatgctttctggcgattggcgtggctgtcataatgtcctcatggagtgagaactatggagacccatctgatagtaaggacctgatggcccagttcaaggttgcagctaaggcaattgcttcagatgaaaagattgcattactgggagccatacaatcattgtttgagggctcgatgtacacatttgtcttcctatggactccagcattgagcccaaatgaagaagacattcctcatggttttatttttgctacattcatgctgtcatccatgttgggtagctccgttgcgtcacgtctattagcccgaaagctcaaggttgaaggttacatgcagattgtattctcgatatcggctgtcacccttgtcctccctgttgtcaccaacatcctagtgcccacatcttctgtgaaaggaggcagcatatcgattggaggttctcttcagcttcttggtttctgcaccttcgaggcctgtgttggcatattctggccatcaatcatgaagatgaggtctcagtacattcctgaggaagcaagaagcacaatcatgaatttcttccgcatcccgctcaacttatttgtttgtgtggtgctttacaatgtgaacgcattccctatcactgtcatgttcgggatgtgttctatcttcctcttcatggcagcaatcttgcagagacggctgatggttgtctcggatctacacaagtcatcaactaaagcacaagaaatgatcggggaagatgagccactaaatccgtagaccgtagacgtcgacagaacatacgtgcaaatcagatacgaaggcggcatacacagagcaattcatttccacccgcgcaataagatggaagtcagaaccatgtagttgttttcgtttgtaattttgtttctatagtgtaagatttgacaaggctgttagtttgcacctcggatctgcttatatccacagggcaatcgatagttcagcaagtattgagctatacctatgtcccgagaagattagatgagttggcgtcttggcgatcgatgtgggcttttcccgttgttgttccttgcaatttattttcgaaaaaaaaagaaacatgttcgctttaaggtttacgatacggtatatattattcttggaagtgttatctactgcagg

SEQ ID NO: 26975 - DNA, 1419 bp, Zea mays
  Clone ID: LIB4700-001-C5_FLI
ctcgaggccggccggggaagcactgcccgcccgcgcgccgcattcccaaaccctactataccccgctcctctcctccccgtctgccggctcccttcttcttcgctgtcgacgacgcggactccccgccgcgctccctctctcaggcctcgcggggtgatcagaggcggctgggagactcgtgcgctccgacgagtccggttacggcgcggtaattaagcaggggaggagccggccctgagcggcggagtccaaaatgagtgacgacgtggtatggcactgcatccgccacaaccactgcagcttcatgtccaagatcacaacggggatcttctgtcgcaacccctacaacgcgacgggcatctgcaaccggagctcctgcccgcttgccaacagccgctatgccaccatccgggatcatgaaggtgttttctatctgtatatgaaaaccgctgaaagggctcatctgccaaacaaattatgggagagagtcaaactgccgaagaattatgagaaagcaatggaagtcataaacaaacatcttgaattttggcctaagctacttgtgcacaagatcaaacagcggctgacaaaaatgactcaatatcgtataagaatgaggaaacttcaactgaaagtgagggagaaggtcatgacaatgcccaggaagcaaacacagcgtgatctccggagaatggagaaagctgaaagggctgctcaactagaaaggaatattgaaaatgaattgaaggaacgcctgaacaaaggtgtttatgctgacatctataatgttcccttcaaagcgtttgatgaggttcttgatatggaaagagatgaagtggttcttgaagaagaggaggaagaagaaggtgaggtatatgttgaaggcgatgacatggaagagatggatgacatggaagactttgaaggcctcagtgatggaggcacggatgacgatgatgttttggatgatcccgtatcaaggaaatccaagggatcctcttcttattcgaagcaaaatgtcgggaaaaggtctaggaaggttatgactgaggtggaagaagacgaggagataaatacgaggcaaaggcaaagggcgtgagtgcgagatgtgcaactgcaacgacggttatatgatgtcagatgccggcaggcagccacttctgatgtatgttggatcattttatacttgccttcgtactgtaacgcggagtgctgagacgtcaattaattttggccgtggtttacatggcctaatatgttatgagcaagaaaaaagaaacgggtgataactcagttgaggatgtgggagaccatctagttttcgaggtgaatttaggcatctatttttgtaagttacagattggtctagctttgttctttgttacaaggaaaaccagagtcatgcgtttactaacaag

SEQ ID NO: 26976 - DNA, 721 bp, Zea mays
  Clone ID: LIB4700-002-D5_FLI
aaaaagagagcagagaaccccagctagagtttggcgagtggtgcggaggcgcggctgctcctgctcgtcgcgacgtcgaatttcagcgccgcccgcgcgatcctcggtctcttcgcccgtgaggtcctgcttcccgtgttgcttctcagctccactcctgacgtgctttctctgagtttctattctgttggttcggtctgtcctctgcaggagaggcgcgacaatggctgggaaaggcgggccgaccaacctggagaaggagcagatgtttgggatggcggagaaggagatggagtacagggttgatcttttcaacaggcttacaaagacctgttttgagaagtgcgttgaaaaaaggtataaagaagctgagctcaatatgggtgagaacagttgcattgatcgatgtgtttcaaagtattggcaggtgactaatttagtaggtcagatgcttgggaaccagcctcagatgtgaaccgagatgcactagttccattttgtagcagaatcctattgctctgtttattctttttggttggtattagaatcccgccacctgctattaagtacaccaatacagcaccagacttgttaatgcgtggatcgctctgaagaaaaatcacggtgtcttgctctttccagtgatgtgcattatctttgaatcatgaacagggaacatgcctgtaataaatttatagagctcgagagtgatcctgtttcg

SEQ ID NO: 26977 - DNA, 922 bp, Zea mays
  Clone ID: LIB4700-002-F8_FLI
ctcgaggccggccgggacctcccgccccggcgcccctctctctctctctcttctgccgcacagagcccaaatcgcggcggatccctcgctctccagggagccgctgcggcgccgggttttgtacaccgacttgtttgcctacctccagctcctcctcggcgacccatggctctcctcgcccccgccatctccggcgaggttggtctgcggctcttattggcaccgctaagctctaacatagtcatgcgtacagccagttgtgctgttgggattggtctacctgtatactccactttcagagctatagagaagaaggatgaacaagagaaagagcggatgcttttgtattgggcagcatatggatcttttagcattgctgaagtgtttgcagataagcttctttcaagtgttcctctctattatcatgtgaagtttgctatccttgtgtggctccagttcccttcaaacagtggatcaaagcatgtatacaaaagatacctgcgcccatttttcctgaaacatcaagcaaaaattgataggtttctgaatattctgtcaaagggacttacgaagtttgtgagcagccatgaagatgaaattcgttttatagaaaatatggctatcagaggggctacaacagcaaaccacatcgtaaatggcctcgaccaacctgaagaaacacaagcggttaatacaattgaaggtccaaatacaactgtgacagaagaagctggtgtgtcgggaactgaaacttaagcaaaactttctatctctgctcatgatcccagacgctgcttcaaaattgttgttgaggtcacccagcttgtttggattgtgaatactactgttcctgaaaggctagatctagaggcaatgttttagctttaactagatattcatatagcaagtaaaatcggtgttg

SEQ ID NO: 26978 - DNA, 1606 bp, Zea mays
  Clone ID: LIB4700-003-E11_FLI
ctgttcggcctgttcccctcccgagtcccgtccctgcggccaaacccacgaccaacgtctccgatccgatccaagccgccatggatttcttcaagtccatcctcgccgagcccgatccggacccggcctctccgccgccggagcaggagccggagccggagccggagcccgccggatccgcctcatcctccagcggcggcgggtgggggttcggtggcctgctcaagacgctcacctcgcagtccgagaccgtcctggaggcctaccgccgcgacctcgccgagtttggcaccggcctgcgccgcgagaccgaggtgcttcgcgaggccgccgcccgggccgcgcgggacctgccgtcctccgcgcacgcgctagacggactcgccgacatcgtcgcgcagggcaaggaggcgctctcccaggccgccgccgccgccggtggcggcccccaggcctctgacggcggcgactccgaccccagctccgcctccgggacccacgtccggtacagccgcttcgaggcgcagctgcgcgcgctccaggcggatccggccacgttcacgtccgatcccgaggacgccgaggacttcgccgcgtggagcaaggggtttatcctggacgagagggaggaggagatcgaggccctgtgctacgacagcgacgcgctggaagccatggcggacaggctcgtcccggacgccgtgccccgcgaggtgttctggccgaggtacttttaccgcgtccataagctgaagcagcaggaggacgccagggcgaagctcgtgcagcgtgtgattgcgcaggaggaggacgaggacttgagctgggaggtcgatgacgacgaagaggaagaggaagagcagcagaaagacagcacggaggagctagcagaacagaggcaagagccgatcaaagaagaagtcaggcaggatatggctgagaaagaaaatgtggagagaattgtagaagaaagtggagttgagacggtggaagaggcgcctggtttggtgaaggaagagaagaatgccgcagagccgcagccaattgttctcggtagctctttggtggtagtggacaaggaggaggaacgggaaaaagcagttctcggtagctctttcggtgtggtgggtgagggtgagaatgcagagccctccaagtcgaatgtcgaagaatcaggtgccaagaaggaaggagcgaagcatgagacgagtgattcgagcaaggacagcgattactccatagtgtctagacagcgaactgcggaggaagaggatcttgagtgggatgagattgaggatctaggagagcatgaagaaaagaaaggcggcatccagacctcaagccctgctctgaaggaggagctgcgcaagaggctgagcattgccgaagatgatgaggatttaagctgggatatcgaggatgatgatgacaatgcctgaatgccattggtggtatggaagtgtcagttgtatttctacattttgtaccttccattactcgcgcaagttactgtgatttggccaataatgattggctatccttatgctatggacacgtgtgtatactgtaaactctccagtttgatgatatcaagtggcaattggcc

SEQ ID NO: 26979 - DNA, 1441 bp, Zea mays
  Clone ID: LIB4700-005-A6_FLI
gggaccacaccccctaatctctcgctctcttcctttctcacccccgtgaccctgtctcgccccttctcgcctcgccgccgcagccgatgggctccggggaggagccgtcgcagatgcggagggcgctggtggactcgctcgcgggtgccatctccggcggcatctcccgcaccgtcacctcccccctcgacgtcatcaaaatccgcttccaggttcagttagaacccacaacctcgtggggtattcttcgaagggatatatatggaccttccaaatacactgggcttctgcaagcaaccaaagatattctcagagaggaaggtttaccgggattctggagaggaaatgtaccggctttgttgatgtatatgccatatacagctatacaattcactgtcctacacaaactaaaaacatttgcttctggttcatctaaaacagaggatcatttgcatttgagcccttacttatcctatgtaagtggagctctagcaggatgtgcagcaactatagggtcatatccatttgaccttctgaggactattcttgcatcacagagtgaaccaaaaatttaccccaacatgaggtctgcatttgttgatataattaaaacccgtggtgttcaagggctttattctggtctatctccaactcttgttgaaatcataccatatgctggtttgcagtttggttcatatgacactttcaaacgttctatgatgacatggaacagatataaatattcgcatcttaactttggaagcgaggatgattctgtatcaagtttccagctatttctttgtgggtttgctgctgggacattttcaaaggctgcatgccacccacttgatgttgtaaagaaaaggttccagattgaagggctaaaacgccatccaaggtatggagctcgaattgagagcagcacatacaagggcatgtaccatgccctaaaggagattgtcgcaaaggagggatttggaggcctttataagggccttttcccctctttggtgaaatcggcccctgctggtgctgtgacatttgtggcatatgaatacatctcagactggttagagtcgatactgatgtgaaaatcttcaatgcagatagggagcaaggctggagttgagtgaggtcttgatggatcatggagctatcaagataccatgacgagaactttttgcacaccgtggacatggaggatggagaccggaaggtcaatcgtcaagtgcatacaattcctagagatccgatacatgtaaagccttacatagaaaagagctgttttgtcgtttcttattctttccccaattgcctaatgtggtggtagggcattcgttggcttgtaaaacaaggctgactacaactaacttagtgatcgcgacgcgtcatacatgactaagtcaaaagcagccggcagttttgctgggatcgtgttacc

SEQ ID NO: 26980 - DNA, 1640 bp, Zea mays
  Clone ID: LIB4700-005-B2_FLI
attctatacttccgccacgtgctccctcgcctccgcctcctcccgttccccacctcgccgccgccgcgtctccctcacgggccagtccccgagcacccccctcacgcgccacagtcgaaaccaaagcagctcgcggtggccacacccggacctcgggctcgacatggggttcatgctcgtgcgcaagccgcgtccgggggacgagaagccggacctggcgaactggatgcggtgcttcctgtcgcagcgtctgtctcagcccgccgcggcggcggaggagaccgcgaacgcggagggtaaggccgccgggagacgagaggaagaggagggtggcggggatgacgctgaccacctcgtcgtcatggtgaacgggctgtacgggagttctgcggattggaagtttgcagcagagcagtttgtcaagagattgccgggaaaagtctacgtgcatcgtagtcagagcaattattcaaaattaacatatgatggagttgacttaatgggtgaaaggctagcagaggaggttcgacaagttgttcagaggagaataaacttgaggaaaatatcttttgttgctcattcacttggtggcttagtaacaagatatgcaataggaaaactttatgaacctgccatggatgaaacatcttcttgtgacattgataagccttccgatgaacaaaatgtacgtgatgttggtaaaatagctggtttggaaccaatcaattttattacatctgctacacctcacttgggctcaaggttgaataagcaacttcccttcctttttggtgtcccacttttggagaaaactgctgcaggaacagcacattttatagttggaagaactggtaaacatctattccttacagacaacgataatgggaagcctcctcttctcctacgaatggttgaagattgtgacgacgggaaattcatgtctgctttgcgctgtttcaagcgtcgtgttgcctatgctaatgtaacatatgatcatatagttggttggagaacatcatcgcttcgacgtcaacatgaattaccaaaactcaagctaacagcaaacgatgaaaagtaccctcatgttattaatgtcgataaaggaaatctagaggatcatgggcaagagggatctgtagaagattcactggcagatagttatgaagaggtgatgatccgtggccttacacaagtggcctgggaacgtgtggacgtatgctttcataagagttggctaagatacaacgcccataataacatccaggttaggatccatccaattaattcagatggagaagacgtcatataccatatgatagacaattttgtagtgtagccaagtagtccgtccggtgaatgccaactacgtaaaagattactgctatttccagtggattcgccttgagaggtcattaatcttttaccatgtgggttgctatgcacaacagttagataattggcatcagcggatcagcacttaactcacacgtgctgctaggtgattcgagcgtaggacctgtgcttgttggtttgttgctggcaatgtaaatataagtgttaggtaatgcaaatattagcatgacagtgcatattcttgtaaatgggaatttaccatgttattggaaatccaaagttcaagc

SEQ ID NO: 26981 - DNA, 1075 bp, Zea mays
  Clone ID: LIB4700-005-E3_FLI
ccgggattccgtcgtcgtcgtcagcagcttctgcttgctctggggggaaggagagagagagagcgagagagagatctagtagagaggctagctaggtggtcctcgaacgaagatgttggcggtgttcagcgggcaggtggtggaggtgccggcggagctggtggcggcgggcagccggacgccgtcgcccaagacgaaggcgtcgcagctggtggggcgcttcctggccacctcgcctactcccacaccaaccaggcgctcctccgccccaggtcgttcgcggccaaggacgaggtgttctgcctgttcgagggggtgctggacaacctgggtcgtctgagccagcagcacgggctgtcaagcaagggcgccaacgaggtgctcctcgtcatcgaggcctacaagacgctgcgcgaccgcgcgccctacccggccagcttcatgctcgcccagctcaccggctcctacgccttcgtcctcttcgacaagtccaccaactccctgctagtcgcatccgaccccgagggcagggtgccgctcttctgggggatcaccgccgacggctgcgtcgccttctccgacgacatcgacatgctcaaaggctcatgcggcaagtcgctcgcgccgttcccgcaaggctgcttctactccaacgccctcggagggctcaagtgctacgagaaccccaagcacaaggtcaccgctgtccccgccgacgaagaagagatctgcggtgccactttcaaggtggtggaaggctctactgtcctgacggcgctgcactgatcggtcatcagctggcggaggcgatgcgatgatgatgcagaactttgtacatgcgttggtggatggtggtgtaacatagtggctgccaacaagtcatgctcatgcaaaccgatgaatctatctctgtatcatcgatctcggttgcttgctagtccagactccagacatggctatatatatatagctggtgctaataaataggagtataatcgtcatatcgatcggttgcgtgtggaatgccaatcatgtgtgtaatctgttggcaaataacaaacctctgttcctccct

SEQ ID NO: 26982 - DNA, 1452 bp, Zea mays
  Clone ID: LIB4701-001-C9_FLI
atcgaggccggccgggcccaagtaaacgccagagaggagaggagaggagtggagagcagaggagagcagcagccagccagcagcagcagccgagagcccaaccccaactccacaagcaaagatgctgtcgtcttccacctccaccctccgcctccaccaactaacccgaccccaccggcgccacccgccggccccggccttgggggtcgccacccacctggcctccccgcggcggtggcgcggacacgccccgggggcgggggcgcccctccgcgcgcggccccagcgcatccgcgcggtggacgccgcccagccgttcgactacgagtcccgcgcggcggggctgctggaggagcggcagcggctgaagatcgccatcgtcgggttcggcaacttcgggcagttcctggcgcgcacgttcgcgcggcaggggcacacgctgctggcgcactcgcggacggaccacacggcgctggcgacgacgctgggggccaccttcttcgcggacccgcacgacctgtgcgagtgccacccggacgtggtgctcctggccacctccatcctgtcggccgaggccgtgctgcgctcgctccccgtgcaccgcctccgccgcaacacgctcttcgtggacgtgctgtccgtgaaggagttccccaagaacctgctgctcagctccctgccccccgactttgacgtcatctgcacgcaccccatgttcggtccggagtcggcgcgcgacggctgggacggcctgcccttcgtgttcgaccgggtccgcgtcggggactgccccgcgcgccgcgcccgcgccgacgccttcctcaacatcttcgagcgcgagggctgccggatggtggagatgtcctgcgccgagcacgacgcgcacgccgctgagacccagttcctgacgcacaccgtggggcggatgctcgccatgctggagctgcgctccacgcccatcaacaccaagggctacgagacgctgctccgcctcgtggacaacacctgcagcgacagcttcgacctctacaacggcctcttcatgtacaacaagaactccaccgagctgctcaaccgcctcgagtgggccatggactccgtcaagaagaggctcttcgacggtctccacgacgtgcttcggaagcagctcttcgaggggtccccgcacgcccccgacgtctcctcctccaacgtccgcaagtagacacggccgccgccgggggggttcgtctcgcccccaatctcatcatcatctgttgttagtaataaattaaattccagttccaattctccttgccattgtatttgtagtaccagcatgtatctgtattctccatttctcctcccaactccctcctgtcagttcagttttacagttgagggatgaaatgtggcagcttggcattgcaatttgtgacaaacaaactgaataaataagcaatctttggcact

SEQ ID NO: 26983 - DNA, 1971 bp, Zea mays
  Clone ID: LIB4701-002-D6_FLI
gtggggtccatttccttcaattgtggcagtggccgtctcgaaccctctataaatcccccaccccggacacccttccccgaccacacggtccacacagcccaacaaaggagcgcggcggcccctccctccttcctcccacttctctcgcgcggcgctcgcttacctcgcctcgcattccgttcgagcaggggagcggcagtgagaagggagggaattaaggcaagatgttcatcgagagcttccgcgtcgagagcccccacgtgcggtacggcccgacggagatcgagtcggagtaccggtacgacacgacggagctggtgcacgaggccaaggacggcgcctcccgctgggtcgtccgccccaagtccgtcaagtacaacttccggaccagcaccgcggtccccaagctcggggtcatgcttgtggggtggggaggcaacaacgggtccacgctgacggctggggtcattgccaacagggaggggatctcatgggcgaccaaggacaaggtgcagcaagccaactactacggctccctcacccaggcttccaccatcagagtaggcagctacaacggggaggagatatatgcgccgttcaagagcctcctacccatggtgaacccagacgaccttgtgtttggaggctgggacatcagcagcatgaacctggcagatgccatgaccagggccaaggtgctggacattgacctgcagaagcagctcaggccctacatggagtccatggtgccacttcccggtgtctatgatccggacttcatcgccgctaaccagggctctcgtgccaacaatgtcatcaagggcaccaagaaagaacaggtggagcagatcatcaaagatatcagggagtttaaggagaagaacaaagtggacaaggtagttgtgctgtggactgcaaacactgaaaggtacagcaatgtatgtgctggtctcaacgacacaatggagaatctgctggcatctgtggacaagaacgaggcggagatctcgccatcaacactatatgccattgcctgtgtcacggagggggtgccgttcatcaacgggagcccccagaacacttttgtgcctgggctgattgatcttgctatcaagaacaactgcctgatcggtggtgacgacttcaagagtgggcagaccaagatgaaatcggtcctggttgattttcttgttggtgctggaataaagcccacctcgattgtgagctacaaccacttgggaaacaacgacggcatgaacctgtctgcccctcaaacattcaggtccaaggagatctccaagagcaacgtggtggatgacatggtctcaagcaatgccattctctatgggcccggcgagcatcccgatcatgttgttgtcatcaagtatgtgccgtatgtgggagacagtaagagggctatggacgagtacacatcagagatcttcatgggcggcaagagcaccatcgtgctgcacaacacctgcgaggactcgctcctcgccgcaccgatcatcctcgatctggtgctcctggctgagctcagcaccaggatccagttaaaacctgagggaacggacaagttccactccttccacccggtggccaccatccttagctacctcaccaaggcaccactggttccacccggcacaccggtggtgaacgctcttgcaaagcagagggcgatgctggagaacatcatgagggcttgcgttggcctggccccagagaacaacatgatcctggagtacaagtgagcgaagtggcgtggcctgcagctagatatggaggaggctgcacgaaggggactagagaggcgagattagctgtggaattgtgttggcttctcgtgttttcttttgcgttcttttcctggtcatcgctgtggcgcttttgtattttatttgttggacccgtaacactatcagggctctgctattagcgcttgaagcctgtaatggcattggcatc

SEQ ID NO: 26984 - DNA, 1493 bp, Zea mays
  Clone ID: LIB4701-002-G7_FLI
ctctgtctcctcacccgacgcccaaagaagcagagcaggcaacggcacagttagagagagagagagagagaggcgcagagccaaggaagcggagcagagcaacagcagcaggtcgaggaagaggagaagagaaggtccaggagacagcacagcagccaggaagagcaagagcaagatgctgcgcgggggcacgggcatgctgggggtggtgaacttcataaccttcctgatctcgatccctatccttggcggcggcatctggctggcgtcgcgggccaactccaccgactgcatccgcttcctgcagtggcccatcatcgtggtggggctcgtcctcatggtcgtctccctcatgggcttcgccggcgcctgctaccgccagacctggctgctccgcctctacctcttcgccatgttcttcgtcgtcctcgcgctcctcttcttcgtcgtcttcgccttcgccgtcaccgaccgcggcgccggccaggtcgtcatgagccgccgcttccccgagtaccagctctccgactacggcggatggctccgcgaccgcgtcgccgacccgcagtactgggccaccatcagcgcctgcctccgcgacggccacgcctgcgccggcatgaggcgcctcgcgcgggaccccaacacgggcatgctcgtgccggagacgcccgccatgttctacggccgcaacctctccccgattcagtctggatgctgcaagccaccgacgtcatgcgcattcacctacatgaacgagacgtactgggaacaaaaccccggtgtcccgaccgtgaccaatgaccctgactgcagcaggtggagcaacgaccagcagatgctgtgcttccagtgcgactcgtgcaaggccggcgtcctcgcgggcatcaagaagagctggcgcaaggtggccgtcctgaacatcgtggtgttgatcatccttgtgattgtctatgtcgcaggctgcgccgcgttccgcaacgccaagaggatcgacaacgacgagccggtgggcatggcgcggatgaccaagtcccatccaagcaggttccagttctaggcaggcagctgctgccgtcgcgggttcggaagcttctgccttgtacagatgatgaccagaccagtgggtggtgctaaggcctgggctttgctatatcttactgagatgtggattgtactgcatttgggggtgaaaaggggaagttcagtgtggtttgagttcgtgtttgatttagtgtttagggtaggtatgttatgtggtagggggtacaatatgggatctgcaagaaacaagagaagatcaatcatctaggaactgttctgtattggagatttttttttaaaaaaaatctgggggatatttgtatgatggtgcttggtgccagccatgatggaatattttctgaatttctcactgtatgggaatgctagaggtatgaatgtatgatgatatggctgtacggcagcttccagtatgaatattagggttctag

SEQ ID NO: 26985 - DNA, 1485 bp, Zea mays
  Clone ID: LIB4701-003-G11_FLI
ccgggtccgctgtcaccggcagttctgacataacacaccgcttcttccccagttcaagtgccacaccgctcgtcgccttcccatctcgccgctacatgaatttcggccgccacctgctcctcgccgcggtgttcgcgctcctcctcgctgtctgcgcttctgcggcgagcaggggcgctggttccttcgacccatcccgagtggtccaactctcgtggcgccccagggcgttcctgcacaagggtttcctgtcggatgcggagtgcgaccacctcatcgcgctggccaaggacaagctggagaagtctatggtggccgataacgagtccggtaagagtgtccagagtgaggtgcgcaccagctccggcatgttcctcgagaggaagcaggatgaagtagtaacgagaatagaggagaggatatctgcttggacatttcttccaccagaaaatggcgaatccattcagatattacactaccagaatggtgagaaatatgaaccccactacgactacttccatgacaaaaaaaatcaagccttgggtggccatcgcatcgccactgtgctgatgtacctctctaatgttgagaagggtggagagaccatcttccccaatgcagaggggaagctattacaaccgaaggacaacacttggtctgattgtgcaagaaatggatatgcagttaaaccggtaaagggtgatgccctgctgttcttcagcctccatcctgatgcaacgacagactctgacagcttgcacggtagctgccccgtaatcgaaggccagaagtggtccgcaactaaatggatccatgtgaggtcatttgacctccctgtgaagcagccgggttcctctgacggatgcgaggacgacaatatcctctgcccccagtgggcagctgtgggtgagtgtgccaagaaccctaactacatggtggggaccaaggaagctcctggcttctgccggaagagctgcaaagtatgcgcagagtaagcaggggcactaggcatgactacgacgacctacttgatgctgcatcctgccgaggatacctaattgtttcgtctttgcacaattgaaggaggtcgatcgatcggcagggcagtcttttgattgcgatccatgccatgcacatgcatatcgaaatctcagacaagcaactgtagcagcggtacatacatcactgttcactccagtccagctagctagccagtggcagtaactgtggttagttggattcacctaaaaggttgtacgggcatcgccgcgggtttttgcgtgtcccccctctcagaataatcctgagatcttttagcttctatccgagcagtagtcggtacatatatataagtatcctttcatcttaattagcatctactttagtactagttattagaaagtattgaagattttttggtttttgagtttgctacttctatatgtacctaatcctatcatgatttatgatgtggcttaacaaaat

SEQ ID NO: 26986 - DNA, 1340 bp, Zea mays
  Clone ID: LIB4701-004-E9_FLI
ccgggaaccatggcaccctcgcatgcccactctcgctccgtgccgctcctcctcctcgtgataggagtttgttgctgctgcagtggagcatcatcgcccgtcgtcggtcgtctcgacgacgacccgacctgtcctcgggagccgacggcggcggtggcagccgtgtcgtcagctgagtctagctacgtcgagccacgccggtgccagccgccggcgccgcacatcgcggtggccgtgttcccctacgacgtcgacccgatgcagttcgcgctgaacctggagtacaccgaggccgagttcttcctgcacggcgcgtacggcgtggggctcgaccacgtcgcgccgagtctggcgctgggcggcccgcctccggtgggcgcccggaaggccagcctcgacgaggtgacgaggcgcatcgtcgcggagtttggcctgcaggaagttggccacatcaggttcctgagcccctttcctgctcatgcatcggaagtaccacggttctgatgtgcatcttgaattttggtttgtgtgcacgtgcatacagggctatccagcgcacggtcggtgggattcctcggccgttgatagacctcagcgcccacaacttcgctagggtgatggacgaggcgttcgggacccgcctggaccctcccttcgatccctacgtcaacagcctcaacttcctgctggcctcgtacgtcatcccctacctcggcatcaacggctacgtcggcaccaaccccatcgtcgacggctaccagacaaagaagcttctggcagggctgctgggggtggaggcggcgcaggacgcggtgttccgggcgcgcctcttcgagcgcctcggcgaggccgtgccaccgtacgggaacatcacggtggccgagttcacggaccgcgtgtcggcgctgcgcaaccggctggggcggtgcggggtcaaggacgaggggctcacggtgccccgccggcaaggcgccgagggcgccatctgcaccaacgtgctctccgcggacacggactcgctctcctacgcccggacgctcgccgagctgctcagcatcctctacctcaccggcgacgagcgcgtgcccggcgggttctatccggagggtgccaacgggaggatcgccaggtccttcttggcaagccacatggaaactagccaatgcaagctgcccgaggccatcagtgccctgcgtagcgtactacgagtgctgcgtgcatgatttgaactacgtgtccgtgcagaaacccggagcatatatatggttggatgaacttgcaaagtttgctgaataatataacagtggattgatatcagcaagtggtccaccaattcttcc

SEQ ID NO: 26987 - DNA, 1575 bp, Zea mays
  Clone ID: LIB4701-005-G5_FLI
agacgaaaactatcaatatgaaaaaacaaaggcaaagcgaagaccagagagtggaaaaaattagcagagggggaggatccatccgcggcctcctatataacgaccacctcctcccaccgcttcctcccacgcctcccaacctcctctgctctcccccacctcccggtccggcagcagagagcgggggtgcagagagatcgagatccggaggccgcgagtgggagcgccaccaccagcgactgcggcaatggcgggcacggtgacggtcccggggtcgtcgaccccctccacgccgctgctcaaggacgagctcgacatcgtgatcccgacgatccgcaacctcgacttcctggagatgtggcggcccttcttccagccctaccacctcatcatcgtgcaggacggcgacccgaccaagaccatcaaggtgcccgagggcttcgactacgagctctacaaccgcaacgacatcaaccgcatcctcgggcccaaggcctcctgcatctccttcaaggactccgcctgccgctgcttcggctacatggtctccaagaagaagtacatctacaccatcgacgacgactgcttcgttgccaaggacccatctggcaaggatatcaatgctcttgagcagcacatcaagaacctcctcagcccatccaccccgttcttcttcaacaccctgtacgacccctaccgtgagggtgctgactttgtgcgtggataccccttcagcctcagggagggtgctcacaccgccgtctcccacggcctgtggctgaacatccctgactatgatgctcccacacagctggtcaagcccaaggagaggaatgagaggtatgttgatgctgtcatgacaatccccaagggaaccttgttccccatgtgtggcatgaaccttgccttcgacagggatctcattggccctgctatgtactttggtctcatgggtgatggccagcccatcggtcgctacgacgacatgtgggcaggatggtgtgtgaaggtcatctgcgaccacctgagcctgggagtcaagactggcctgccatacatctggcacagcaaggctagcaaccccttcgttaacttgaagaaggaatacaagggcatcttctggcaggaggacatcatccccttcttccagaacgtgaccatccccaaggactgcgacaccgtccaaaagtgctacatctacctctctggacaagtgaaggagaagctgggcacgattgacccctactttgtcaagctcggtgacgccatggtcacctggatcgaggcctgggatgagctgaacccgtcgacccctgccgccgcaaatggcaaggccaagtagatgtgccatcacttcggcactggagtgaaaaagaaagtatgattgggtcctgcctaggccccatagatatagctcttttttgagaagggagagagattaattcagcagcagcttttataaattctttgttgtcatgaagcaggtggttcttttgtagttgatgaaagggatttgtcgtcgctatcgtttacataattcagacaataattttatattgtgtaattctgagaact

SEQ ID NO: 26988 - DNA, 1779 bp, Zea mays
  Clone ID: LIB4701-005-H3_FLI
atgtgtcgtcggactagcaagggtcctctccctcgcgctgtgtgtatcaacaagccatggtcgacaccgtcgccggcgccaccgactaccgcggtcagccagcctcacgggccgccaccggcggctggaaaccgtcggttttcgtcatggcgatggagatcgcggagcggttcgcgtacaagggcgtggccgcgaacctcatcacgtacctgacggggccgctggggcagccgatggcgcgcgccgccgcgtccatcgacgcctggaagggcgtctcccagatgctgcctctgccgctcgcgtgcgtcgccgacgcctggctcggccggtaccgggccatcgtcctcgcctctctcatcttcgccgtgagcatgggcgcgctgtcgctgtcgtcggcgctcccggcgctgcgcggcggccacgtggccatcttctacgtggcgctgtacctggtggccctcggcgagggcgcgcacaagccgtgcgcgcaggcgttcgcggcggaccagttcgacgagaaggaccccagggagagcgtggcgcggagctccttcttcaactggtggtacttcggcatgtgcgcaggcaccgccgtcaccaccatggtctccagctacgtgcaggacaacgtcggctggggcctcggcttcggcatcccctgcatcgtcatcgtcgcctcgctcgtcctgttcctgctcgggaccaggtcgtaccgcttctacacgaccgcggcggccagccccttctctcgcgtcgggaaggcgttgctggcgttggtccagagctgggcgccgaagcatcgcaccagaaaactaggcgacagcgacggtgacgccgtcgccgtcgaggaagtgaagagcgtgctccgcctgctgcccatatgggcgtcgtgcataatctacgcgatcatcttctcccagacatcgacgttcttcacgaagcaggccgcgacgctggaccgccggatcggcgcgaggttcaaggtgccggcggcggcgctgcagacgttcatcagcgtcagcatcgtcgtcttcatcccggtgtacgaccggctcttcgtgcccctggcgcggcgctacacggggaggccgacggggatcaccatgctgcagagggtcggcgccggcctggcgctcgccctcgtcgccgtggccctgtcggcgctcgtggagatgaagcggctccgggttgcggcggaagccggcctggtgaatacccccaaggcgcagctccccatggcgctctggtggatggtcccgcagtacgtcctcatcggcgtcgccgacgtgttcgccatgatcgggctgcaggagttcttctacgaccaggtccccaacgcggtgcggagccttgggctggccctgttcctgagcatcttcggaatcggccacctcctcagcagcttcctcatctccgtcattgacaagacgacagcaaagagcgggacgagctggttctctaacaacctcaaccgcgcccacctcgactacttctactggcttctcactgggctctgcgccgtggagctcgtcgcctttgtgatcttctcgcgagtgtatgtttacaagagaaaggttggcaatgatggcggcaatggtgatttcgtataatagtatatgcaatttgagccgtactgatcacttgaggggtgccggtagctgtagttgtttgtacagtacccgtcttggaaaaaaacgtacgaagtaaggtgtgaccgtgtgactacgggattctgtgttaacgcatattttttcatcggaaaaattttaaaaaaaaagc

SEQ ID NO: 26989 - DNA, 1660 bp, Zea mays
  Clone ID: LIB4701-006-A8_FLI
ctcgaggccggccggggttcccaaacctcaccgcctcaactgcttcgccttcgactgcgggcggcggcggcgtacaaagaaccaaaagatgactccttgcgctctcaccgtcgactccctaaacccaaaggtgctggctctcgcggatcacctcggcgacaacgccattgcccgccgcgcgcagtgcatccagaacgagatagaagcagaaccggggtcacaccctttccgcgagataatcgattgcagcctcagcaatccacagtccatgggacagcggccaaacaagttcttccgagaggttcttgccttgtgcgactatccccatcttctggaacagagtggaactaattccttgttcagctctggtgcgatagcaagggcacgggagattctagacctctttcccgggagagcaacaggaggatatagccactctcagggcactgaaggattgcgcgacataatcgccgctggaatagccgctcgagataatttcccctgcaacgcggatgacattttcctgacagatggagcagctccgccggttcacatgatgatgcacctgctgatacgggatcaaaaagacggcatcctctgcccagttccatcgcattccttgtacacgagtgctatgcttctccagggcgctactcttgtgccatatttccttgacgaatccagaggctgggaagtgagcatgtcagacctgaagaagcagctggatagtgcccggtcaatgggtgttttcgttagggggcttgtggttataaatccaggcaaccctactggacatgttctcgtggaggcaaatcagcgtgagattgtggatttctgcaggaatgaagatcttgttcttctagcagacgaggtttaccaggaaaatatttacgcagatgagaagggatttcactctttcaagaagatagcacggtccatggggtacggcgaaggagacatatctttagtgtccttccattcagtttctaatggatattatggtgaatgtgggagaaggggaggctacgtggaagtcactggcttcaactctgatgtaaagaaacaagtgtacaaagttgtatccctaagctcgtgctccaacatctccggccagatcctcatgagcctagtcatgaacccgccacaggtcggagacgagtcgtacgcctcttaccatgccgaaagacacggcgtcctgtcatctttcgctcgctgcgcagaggccatggtgcgctcattcaacgggctggaaggggtgacctgtagcgaggctgaaggagcagtgttcgtgttcccttcagtccgtctgccaaagaaggcggtcgcagctgccgaggcaagcaacacgcagccagatgcgttctacgcgctccgcctcctcgaaaccaccgggatcgtcgttgtgcctggctctgtttttggacagatgcatggaacgtggcatttcagatgcacggtcctgccacacgaagagaagaagatgacggtgatcatctccagctttgtggcgtttcatcgagcgttcatggaagagtttcgcgactaacagaattcagctcctcttctatctctgtattgtaccacaacttaatgctgtacgtcggagaaaacctagaactctccaaatgcatgattcctgtatgaaactgtttgttttttt

SEQ ID NO: 26990 - DNA, 1679 bp, Zea mays
  Clone ID: LIB4701-006-C4_FLI
ccgggatcgcttcagctcggcgtcttcacaaacgccggcgcaaactcttgcccgagcccgacagatctctaattccccataccgtccaccgatcgaccttcacgccagtctcggtctcttccgaaggcgtcgcgcgcggttgtttgagaggagaggaggaagatgagggagtgcatctccgtccacatcgggcaagccggcatccaagtcggcaacgcgtgctgggaactttactgcctcgagcacggcatccagcctgatggccaagtgcctggagataagaccgcgggacatcacgatgatgccttcagcaccttcttcagccagactggtgctgggaagcacgttccccgtgcaatcttcgttgatctagaacccactgtgatcgatgaggtgcgcactggcacgtaccgccagctcttccaccctgagcagctcatcagtggcaaggaggatgccgctaacaatttcgcccgtggccactacacaattggcaaggagattgttgatctgtgccttgaccgtatccgcaagcttgctgacaactgcaccggcctccagggcttcctggtcttcaatgccgttggtggtggcaccggctctggccttggttctctcctccttgagcgcctgtctgtggagtacggcaagaaatccaagctgggcttcactgtgtacccatctccccaggtgtcaacctctgttgtggagccttacaacagcgtcctctccactcactcactcctggagcacactgatgtctctatcctgctcgacaacgaggccatctatgacatctgcaggcgctccctcgacattgagaggcccaactactccaacttgaatcgccttgtgtctcaggtgatctcatcgctgactgcttctctgaggttcgatggtgccctcaatgtggatgtgaacgagttccagaccaacctggttccttacccgaggatccacttcatgctgtcctcctacgcaccggtgatctcttctgcgaaggccttccacgagcagctgtctgtggcggagatcaccagcagcgcgtttgagccggcttccatgatggtcaagtgcgacccacggcacggcaagtacatggcttgctgcctgatgtaccgcggcgacgtggtgcccaaggacgtgaacgccgcggtggccaccatcaagacgaagcgcaccatccagttcgtggactggtgcccgacggggttcaagtgcggcatcaactaccaggcgccgacagtggtgccgggtgccgacctcgccaaggtgcagcgtgccgtgtgcatgatctccaactccaccagcgtcgtcgaggtgttctcccgcatcaacagcaagttcgacctcatgtacgccaagcgcgcgttcgtgcactggtacgtcggcgagggcatggaggagggggagttctccgaggctcgcgaggacctggccgccctggagaaggactacgaggaggtcgccgcagagggcggcagtgatgacggtgacgaggaggaggaatactgatctgcttgcatgaatctgtttggctgtcgagccaggttgtggtgttgaaaaacctttgtttgtgtcctggccccctgggtaatgtttgggtgtttccttccatcatcacttgctgaactgctctagtatttgcatttgtaattgaagtctgtcgctttaagagc

SEQ ID NO: 26991 - DNA, 1263 bp, Zea mays
  Clone ID: LIB4701-006-D5_FLI
ccgcccgcgcgcttattaataacggccacctcgttcccccgcccgccccgaaggccgagggaagtgtacgcgcctagcgaccagcatagattcgttccacgcctacctcctgccctcgcccgtgctctcagatctcgcgcgcgccccgcaaagggtaactttgagccatgggcacagttgtggatgctccagcagttgtggctgaagaggtcactgagaacatgttgggtggtaagaaagttacagctgtatttgttctaggtggtcctggaagtggaaggcacacagtgtgccaacattgtggaacactttggattcacccatcttagtgctggagatcttttgcgtgcagagattaaatctggctctgagaatggaaccatgattgaaaacatgataaaggagggaaagattgttccatcagaggtgactataaagctgttgcaggaggcaatgataaaaaatgaaaatgacaaattcctgatcgacggatttccaaggaatgaggagaatcgtgcagcatttgagaatgttaccaaaatttctcctgcatttgtgctattctttgactgttctgagaaagagatggagaaacgtctcttggggcgcaatcagggaagagttgatgataacattgaaactatcaaaaaaaggttcaaaacctttgttgagtcaagtttgcctgtcattgagcattacaactcaagggacaaggttaaaaagattgatgctgcaaaaccaattcctgaggtgtttgaagacgtcaaaaccatttttgccccatatgctccaaaggctgaatagagcagtctaaaagggacatgataaaggtgtcataggcaacacacaaacatatatgtgattatgaacccttcaatatagaacagaagttttggctcatatgagctaccagcgcatcagtaggcaattcgatttgttatcagcaatatttagatctgattctcaggggtcctgctagagtaacattttaccactgttgtttatgtatatcctttgatgttgtgttgtaccaatgtggaatttactttagggctagtttggacatggaaatacaggggatccatcaggcctgaggcaggaatccccttgttatttataaattaataagaggattcctgcctcatggattctctccattttcctatccaccaaaccagcccttatagagcaatgagaccttgtgcgatcccatcagatttcttgtggcattatggaaagtataaaactgctgccatattcttt

SEQ ID NO: 26992 - DNA, 1830 bp, Zea mays
  Clone ID: LIB4702-001-E9_FLI
ctcgaggccggccgggaaaaacccagcctgctaatcgccccactaggaggagtaggaggactctccgaggtccgagcggggtaggcaggtgtccgaaacggatcaccaaaccccgccggcgcagccgagagatccgacgtcgccgcgatccatggccgcctcgacggcggcggcgcggcgtctcctcctcgccctcgccgtcctcgccgcctgcctcggctcggcgccgcacggggccgtcgcgctccgctcgctcggcgtcgggggcgccaaggcggccgacggggacgcggccgtggacctcgacgcgtccaacttcaccgccttcctccagacttcgccggagtcgttcgcggtcgtcgagttcttcgcccactggtgtcctgcctgcagaaactacaagcttcactatgagagggttgcaaaacttttcaatggcccagatgctgcacatccagggactgttgtgatggcacgagttgattgtgcatcaaaggtgaacgtggatctttgcaacaaattctctgttgaccattatccttacctggtgtggggtccgccaacaaaattcaatttggttcagtggaaaccaaagcaagagaatagtgaattggaactaattgatgatggaagaacagcagatcggttactgaaatggataaataagaagatgggaagctcattcaatttagacgacaaaaagtatgagaatgaaagtatgcacccaaaaaatacttcagatcctgaacagattgttcgagcaatttatgacgttgaggaagctacatctcatgcattgcagataattttggagcacaagatgatcaaaccagacactcgtgactcgcttattagctttttacaaattttggtggctcatcatccatcaaagaggtgtcgaagaggatctgctgagctacttattgactttgatgatcactggcatacaaacctctcattaagtttggaagacagtactacactgttgaaaggtgcaggagagaaagtatgtggaaatggagtgccacgtggatactggattttctgccgaggaagtaaaaaggaaacaagaggatttagctgtggcctatgggttttgctgcattcactaactgtccgaatcggagatggagagagccaaacaacatttacatcaatttgtgatttcatccacaatttcttcatatgtgaggaatgccgcacacacttctatgaaatgtgttcaagtgtatcagtccccttcaaatctgcccgtgaccttgccctctggctatggaccgcgcataacaaagttaacgagaggttgatgaaagaagaaaaggagttagacaatgctgatccttcatttcctaagatcatctggcctccaaagcaactctgtccattgtgctaccgttcttctagtaggacggctgatggagccatgcaggttgagtggaatgaagatgaagtattcaatttcttggttaactactacgggaagatgcttgtatcatcctacagggagacctccatgcagtcctttcaagtaggctcaatttctgacgattcttccgcatccagtgccgcaacagtacctattggagctgccctgggtatcgcccttgctagctgtacatttggggcgctagcatgcttctggaggacccaacagaagaacagaaagtactaccatttacgttctttaaagaaaatttgactaaacattttaggttcgtaggattccattactaatccgagccttgtagattcatatcatagagaagtgattagggtctttttgtctcctttgttcatttcacaggcaaagaaagaactggaactaaaaag

SEQ ID NO: 26993 - DNA, 1901 bp, Zea mays
  Clone ID: LIB4702-001-G6_FLI
acttcacaagcagctcaaggctctagctatagctagctagcaaaggggggaaaaaatggctccgcttctcgctgctgccatgaaccacgctgcagcccatcctggccttaggagccatctagtaggacccaacaatgagagtttctcacggcaccacctgccgtcttcttctccacagagcagcaagcgaaggtgtaacctgagctttactccacgatctgcaagagtaggcagccaaaatggagtccaaatgttgagcccctcggaaatcccacaaagggactggttcccctctgacttcaccttcggtgccgccacttcagcgtaccaaattgaaggtgcttggaatgaagatggaaagggggaaagcaactgggatcacttctgccacaatcatccggaaaggatactggacgggagcaattcagacattggagcgaattcgtaccatatgtacaaaacggacgtcagattgctcaaggaaatgggcatggacgcatataggttctctatctcttggcccagaatactgccgaagggaaccaaagaaggaggtattaacccggatggcatcaagtactacagaaacctcatcaacttgttgctggaaaacggcatagagccatatgtaacaattttccactgggatgtacctcaagcactagaagagaagtacggcggcttcctagataagagtcataagagcattgtagaagattacacctacttcgctaaggtgtgctttgataacttcggcgacaaggtgaagaattggttgacctttaatgagccccagacatttacttccttttcctacggaactggggtctttgccccagggcggtgctcacctggactagactgtgcctacccaactgggaattcactcgtcgagccttacactgctggccataacattctcctagcccacgctgaggctgttgatctttacaacaagcattacaagcgcgacgacacccgcatagggcttgcgtttgacgtaatgggtcgtgtgccatacggaacatcgtttctggataaacaggccgaagaaaggtcctgggacatcaacctaggatggttcttagagccagtggttcgtggtgactaccccttctccatgagatcattggctagggaacgactacccttcttcaaggacgagcagaaggagaagctcgccggttcctataacatgttggggttaaactactacacctcacggttctccaaaaacatcgatatctcaccaaactactcacctgtgctcaacactgacgacgcctacgccagtcaagaagttaacgggcctgacgggaagcccattggtcctcctatgggaaatccatggatctacatgtaccctgagggcttgaaggatctccttatgatcatgaagaacaaatacggaaacccacctatctacatcacggagaacggaatcggggatgttgataccaaggagacacctctacccatggaggatgccttaaatgactacaaaaggctagattacatccagcgccacatcgctactcttaaggaatcaatagacttgggatcaaatgtgcaaggctacttcgcttggtctctgctggacaactttgaatggttcgccggcttcaccgaacgttatggcattgtctacgtcgaccgcaacaataactgcacgcgctacatgaaggagtctgccaagtggttgaaacagttcaacgccgcgaagaagcccagcaagaagattcttacgccagcttagaaatcgggggcctcatgatgtgggtgcagcccataaaaaactggtgtgtggtttggaaccgaaaattttctgtttttttccgccacgagaggttctggaggcatactctccagcaccgtggctaataacgcattgttccaattcg

SEQ ID NO: 26994 - DNA, 1287 bp, Zea mays
  Clone ID: LIB4702-002-D9_FLI
acacccgcaccagcctcttcagcgccctgcacccaagctccagctccgatccgtaacccaaacaaacgacaccttgggcttggagcctactgtgccaccggcccgcccacgagaccccgcggccatgtccatcccgcggctcctcctcctcgccgtcctcgccgccgccgctgcgtgcgcgcccgcgcacgccgccggcgccggcgcctgcgcggcggagaagttctcgggcaaccgcgcgttcgcggcgtgcgccgacctggcccgcctgggcgcgtcgctgcactggtcctacgacgccgcggcggcgtccctgtccgtggcgttcctggcggccccgccttccgcgggcggctgggtcgcctggggcctcaaccccagggcgcagagcatggacggcacgcaggcgctggtcgccgtccccagctccggcggcggcggcgcgtacgaggtgcagacctacagcatctccgggacctcgctcggcgccccgggcccgctctccgcctaccggacgtcgggcctcgccgccgaggtcggcggcgacggccgcgtccgcgtgttcgcgaccctcgtgctccccaacggcacgggcgccgaggtcaaccacgtctggcaggtcgggccctactccggcgggatccagatacacgacaccaagggcgacaacatgaacgccaaggggacgctcaaccttctaaccggcgccactgccgccgccagcggagggggcagcatcatcaggaagaaaaatactcatgggatcctgaatgcggtgagctgggggcttctgctgcccatgggagccatcttcgcgagatacctcaagacgttcaggtcggctgacccggcgtggttctacctgcacgtcgcttgccagctgctcgggtacggcgtcggggtgtccggctgggcgaccggcatccatctcggaaacctgtccaaggggatcacctactcgctccacaggaacatcggggtcacagtcttcgctctcggcactctgcagatcttcgcgctcttcctgaggccgaagaaggaccacaagtaccgggtgtactggaacgcctaccaccactcggtcggctacaccgtcatcgtgctgggcgtcgtcaacatcttcaagggcatggccatcctcgacgtggagcagaggtggaagacgggctacatcgccgccatctccgtcctcggcgccgtcgccgtgccctggaggccgtcacgtggggcgtcgttctgaggcggaggaaggaggaaagcaagagctacaacggcacctcaaacggc

SEQ ID NO: 26995 - DNA, 1630 bp, Zea mays
  Clone ID: LIB4702-002-F4_FLI
taccctcgaggccggccggacattccatcccgaacctccagacctgtcagctccatacacaaatcgtgtaatgctatctttccaacacaatcgagactggcatcgtcattattggtgcatggaggaactccataaatcgctttccatcgtcttattcatcacttgtatagctggagcggtagcatactctgatcgttctgaattattgtcccacaagacatgcccacagccacaggatttcccaagtgagcagctatatcgttcctacgtggtaatccagcgcttcaagagcaccattaccagcgaccccaagaacgtcaccgcaacctggatcggcaatgacatctgcggagaaacgacctacgtgggtttctactgcggagtacttcctgggcgaggtaacaacctgacagtcacagcggtccttttgaatgggtatagactacatgcaccgaagctgcaagggtttgtagatgagatccccgatctcgcactttttcatgctgcttccaacaattttggtggtgacattccacgtgtcgttggcctcgggtatttatataacctcaatgtcggagttgaccttccattacacactaccagatatgggaattcgatgactgtcggatctaatctagtggttacgctgcctcctatgtgcgtaactactaccctaaatttcacatttagtattggaattgacggtggtaagggacgaaaatttcctggtgttacggatgccaaggccctccttctcaatcacaatagcctgtctggggcacttccggcggaccttggctattccaaggtgagctacctagctctggctaacaacaggctgacagggccaatcccgcaatcgattggccacctccaggattccctcttcgagatgctcctcctcaacaaccagctttccggatgcctcccgcacgagctcggcatgctcaccaaggccgccgtgatcgacgccgggatgaaccagctcacgggcccgatcccgtcatctttctcgtgcctcaccagcgtcgagcagctcaacctggccgggaaccggctctacggtcaggtgcccgaggcgctctgcaagctcgccgggcctgccggccgcctcaccaacctcacgctgtccagcaactacttcacttcggtggctccggcgtgcgcagcactgatcaagaacggcgtgctggacgtgaagaacaactgcattcctggcctcgccagccagaggcgccccgcggagtgcgctgcgttccagagccagccaaagacgacgtgcccggcggagagcaccctggtggcatgccccgccgcagctgccatggacgcggcggccctcggggagaggaaagtcagggactactccagctacgtgacgtacgctactctgcatgactgagccggcgccacatcggcatgcagtaggaaacagagttccttgctgtcattttggctatttgttcttgtattcatgatgcgtgtacactagtgtgtggtgtgattgttgtctatttgcattgcacgtgtgttgctgtcacatctagatcgtccatttgaactgccatgcatgtccattatttcatgaaaaaagttgttggtgctttaataaagttgtacctgtcttagc

SEQ ID NO: 26996 - DNA, 2265 bp, Zea mays
  Clone ID: LIB4702-003-B5_FLI
agttagtagttcaccagagttcacacaaaaatcacaagcaagcagtcgcgtgtgtagctcgcaacaatggcgacgaaccccggcctcttcaccgagtggccgtggaagaagctcggcaacttcaagtacctgctgctggcgccgtgggtggcgcacggcggctaccaagcggcgaccaaggggtggagggcggccgacctggggtacgtggccatcctcccgtcgctgctcctccgggcgctgcacaaccaggcgtggatcaccgcgtcccgcctgcagagcgcgcgcggccggcggcaggtcgtggaccgcggcatcgagttcgagcaggtggaccgcgagcgcaactgggacgaccagatcctgctcagcggcatcctcctgtacctgggctccacctacctgccggggggccagcacctgccgctgtggcgcgcggacggcgccgcgctcatcgccctgctgcacaccggccccgtcgagctcgtctactactggctgcaccgcgcgctgcaccaccacttcctctactcccgctaccactcccaccaccacgcctccatcgtcaccgagccaatcacctccgtcatccatccatttgctgagctcgtggcgtatgaactattgttctcaatcccattgattgtgtgcaccttgaacggaactgcttcaattattgcatttgagatttacgtgatctacatcgacttcatgaacaacatgggccactgcaactttgaattggtgcccaattggctcttcaaatggttccctcctctcaagtatctcatgtacacaccctcgtttcattctcttcaccacactcagttcaggacaaactactccctgttcatgccattctatgactacatatataacaccatggacaagtcatcggacacgttgtatgagaagtcactcaagggaaaagaagaaacggcagatgtggttcaccttacccaccttaccagcctgcactccatctatcatatgaggcccgggtttgcagaatatgcttctagaccttacactgccaagtggtatgtgcggatgatgtggccgatgtcatggctctccatggttctgacatggtcatatggttcttcatttactgttgagaggaacgtcatgaagaaactcaaaatgcagtcatgggtcatcccaagatacagtttccattatggattgagttgggagaaggaagcaatcaatagcctcgttgagaaggcaatatgtgaagctgacaagaaaggagctaaagttgttaccctcggactccttaaccaggcacataacctcaacagaaatggagaactttatcttcagaagtgcccaaagttgggagtaagactcgtagatggcaccagcttagctgctgcagtagttgtgaatagtgttcctcaaggcacagatcaagttgttctcgcagggaatatttccaaagttgctcgtgctgttgccgcagcattgtgtaggaagaatatcaaggtagtaatgaccaacaagcaggattaccattttcttaagcctaacatggcagaagatgcagctgagaaccttttgttttcaaagacaactactgcaaaggtgtggttaattggggatggtctagatgcttctgagcagtttaaggcacagaaagggacccagtttatcccatattcacagtttccaccaagaatggcacgcaaggacacctgcacctactcgacaactcctgcaatggttgtacctaaaacactacagaatgtgcactcctgtgagaattggctgccaaggagggtcatgagtgcatggcgcattgctggaatggttcatgcattggagggatggaacgagcatgagtgtggggacatcgtgctagacatggagaaaatgtggtctggtgctcttctgcatggtttccgccctgtggctcaagtttgattctccagttgcaaatgcaaggcagcacaataagttattgaaagttataacataatgctcgcgagaactatgctacatacatatcagtatgttggtgttctgtacttctgtttgtccatgctctgcctcttatcacttaagacatctgctatctatgaagttaagatgaactcatgtagtgtaaaaaccattctgcagaagcagggtgaaaaatagcatctctacaatggtaagaggggatgggatgtagtatataagtgagtctgatctactgctagatgtttactactttattcacaccctacgctcaaagatcaacgatgaattaattatgcgtct

SEQ ID NO: 26997 - DNA, 1436 bp, Zea mays
  Clone ID: LIB4702-003-C5_FLI
ccgggaacctatcatatcagcgccatgcgccccggccggtcgtaacctagctaggagtagctagctaggactagctagctaggagcctaagcgcccagcccagtgggtggtagcctaccaagggtgaggaagaggagctgagctaggaccgcgaggcgagcgagatccaatctgcaccccacgaacgaaaagattcttccccgccggcgtcgctctctcatccgtcgacgtctcgctccttccttcctctctctctctctctctctctctctctctctctttctctctctcagccagcagcaagcatatagcccagcaccaccacatgcccaagggccctccctctccctcgtcgtcgggccaattgagtgtgagagctcgaaaaaacccaggggatcggccggacgagcagcgcgcgagcgcgagcgcgagctctgtgtgcgtgcgtgtgtctgctctagattagatcacctccatcgtcaataattgcaggcagatccatagtctgctggtggcgagacaaagcaacggatcgtcgtcgatccggagagcggaaagcgcgcagatcgcgacggccatggggcgcggcaaggtggtgctgcagcggatcgagaacaagatcagccgccaggtcaccttcgccaagcgccggaacggcctgctcaagaaggcgtacgagctctccatcctctgcgacgccgaggtcgcgctcgtcctcttttcccacgccggccgcctctaccagttctcatcctcctccgatctgcttaagactctagagcggtaccagaggcacatctatgcttcagctgatgctgcagttccatcttgcgatgagatgcagaataactatcaagaatatgtgaagctgaaagcacaagttgaggttttacaacactcacaaaggaatcttcttggtgaagaactggctccacttagcccaagtgaacttgaccagcttgagagtcaagtagacaagaccttgaagcaaataagatcaagaaagactcaggtgttacttgatgaactttgcgacttaaagagaaaggaacaaatgctgcaagacgctaacagggttctgaaaaggaagctgcacgagtttgaggcagaggctgcttctcccccgcaattggcgtggcaaggcggaggcggcatgttgtcccatgaccctccacagccagaacacttcttcgtggctctggagagcaacgcgcctctgcaacctacataccatactatggacatgaaccagcagccagagccagcgccgggcggctgctaccctcctgcgtggatggcttagccagcgctttggttccattgccttgagaagtgccgtgtccttcagagatcgctacgagtgctgttgcctgcccactttgctgcctgccatgcttaccgaactgttcaaataagaaataaccacatggtcctac

SEQ ID NO: 26998 - DNA, 1895 bp, Zea mays
  Clone ID: LIB4702-004-A11_FLI
accgcgttagctaaacccgacccagcaaccaggccaccgctcctttcctctccgatccggatctccccacccgctccggcgagccatcgccgcgtcgcctccacgcgaccgactacttctcatatcaatctatctatccggcttacccgccgccgcacgcaccaaggttgcgttcaccatattacctgtttgcttatcttctcccgagcccagcaaaccctagccgccgccacccatggacatagaggccgacggacgattcggcaacaaacgagtgcacaatcgcctaggcccgggctccggcggcgctccaccatctaccaacggaaaggtctgcaactactggcgtgccggtcggtgcaaccgctttccgtgccccttcctccacagcgagctccccgaggctgcgccgcccaagcgccccactggacccggggggaacgtatggcgcaaccccaacaccggaggacgaggaggtggccatcacaatagatgggggaagggcccaggagggggcagcgggattgcgagccacaagccgcctgagaggccctgcaagtactttctcgccggtaccgaatgtagctatggcgagaggtgccgctatccgcacagctactgcataagcgatagtatcgcgatgcttaccttgctcaagggacacgagcagggtgtcacgggcattgcactgcccgctgggtcagacaagctttattccgggagtaaggatggaactgttcgcatgtgggattgccaaactgggcagtgtgctggtgtcatcaccatgggtcgtgaggttgggtgtatgatcattgaaggtccgtggttatttgttggaatacctgatgcagtgaaggtttggaatatgcaaacagcagcggaaatgagccttactggaccaactgggcaagtctatgcactcgccgttgccagtgagttactctttgctgcaacacaagctgggaggattttagcatggagatttagtgccgcaactaactgttttgagccagctgcttctctagatggccataagcttgctgttgtttcattgatagtaggaggcatgaggctttattctgcttcaatggataaaactatcagagtatgggatttggcaactttgcagtgcatacagactctttctgatcataccgatgttgttatgtccgtgctttgctgggatcaatttctattatcttgctctttggatcaaacaataaaagttagtcgccatctacatcatcattttgttgagtttgggccgctacagagagtggaaacttagaagtaacatatacacacaaagaggatcagggtgcacttgccctcagtggtatgcctgacgcacagtcaaaacctgtgctactgtgttcattaaatgacaacactgtccgcttatatgatctgccatcgttcagtgacagaggcagattattctccaaaaaagaaattagggcaatacagatgggtcctggtggtttattttttaccggggatggaactggtgagctcaaggtttggcagtgggtagatttagcccaaacctaatgaacatagtgtgctagattagttttctctcatgtattttatgagggagttcgtacaaatacgcataatgagttcaggttgtggtcggtggccatttctttttttgtaatatgccccacatttgtcacaaatgacacgagattcggtggatctgttcggcagtaaaatcagaagcagagtatgtgttatggactgtagttttgtcctggaatggattttaagacaggagaataattggttgttgtaatatgtaaggcactggaacgagcaactctgacgactgcttggaggtggtggcagtttcaaaaggatatatgctaatatacaagggtttgttcaggctg

SEQ ID NO: 26999 - DNA, 1952 bp, Zea mays
  Clone ID: LIB4702-004-C4_FLI
ccgaggcgtgcgtgcggttattaaatatataggagcagcagcttcatcattctaataatcggtgtcaactacggttgatggtgtttgtatagggattcgcggccccgtaccgtacgccaaagcacaatccatgggatattccccgcaaatttcggtttttttaactagaccgactggatcagttgaagcacagggaggaaacagttgctagcccaaaccccatacccaaacctagagctcgttattagggggagttgttgcatcttctgtgtgatactctgtatatatatccccggcagtgggctgttgcgagttctgttgagggaggagaagggggtggccaaagaaagcaggggcagaggaagcagagtagtagagcgaaggcgagcgtatcaatgatggggcctctgcctctccgccgccgcgtgggcgtcctcctgttcctggccctcgtgctcctgggcggcggcggcgcggacgccggcacgacaagctcgtacaggcggaagctggaggcgacggtggagatgccgctggacgccgacgtgttccgcgtcccgccgggctacaatgcgccgcagcaggtgcacatcacgctgggcgaccaggagggcacggccatgatcgtgtcgtgggtgacggccaacgagccgggcaacagcaccgtcgcgtacggcgaggacccggcgaggatggagcgccgcgccgacggcgcccacacgcgctacgactacttcaactacacctccggcttcatccaccactgcaccctcagaaacctcaagcacgccaccaagtactactacgccatggggtttggccacacggtcaggactttctggttcaccacgccgcccaagccgggccctgatgtgccattcaagttcggcctcatcggcgaccttgggcagacgttcgactccaacatcacgctgtcgcactacgagtccaacggcggcgacgccgtgctgtacgtgggcgacctctcgtacgccgacaaccacccgctccacgacaacaaccggtgggacacgtgggcgcggttcgtggagcgcagcgtggcgtaccagccgtgggtctggacggcgggcaaccacgagctggacttcgcgccggagctgggcgagaccacgccgttcaagcccttcgcgcaccggtacccgacgccgtaccgcgccgccgggagcacggagccgttctggtactcggtcaaggtcgcctccgcgcacgtggtcgtgctggcctcctactccgcctacggcaagtacacgccgcagtgggcgtggctgcaggcggagctagcgcgcgtggaccggaagaccacgccgtggctcgtcgtgctcacgcactcgccctggtacaacagcaacaactaccactacatggagggggagacgatgcgggtgcagttcgagcgctggctcgtcgacgccaaggtcgacctcgtgctcgccggccacgtccactcgtacgagcgcagccaccgcgtgtccaacgtcgcctacgacatcgtcaacggcaagtccacgcccgtccggaacgccgacgcgccggtctacgtcaccatcggcgacggcggcaacatcgagggcatcgccgacaacttcacgcgcccgcagccgggctactccgccttccgggaggccagcttcggccacgccacgctggacatcaagaaccggacgcacgcctactactcgtggcaccgcaaccacgacggcgccaaggtcgtcgccgacggcgtctggttcaccaacaggtactggatgcccaccgacgacgacacaaactgacgatcaccgccccagagggaacaaattactgatagatcagcgtagcacgttcctgagctagccccgcccccttttatgttctccaattcagtaatgcaatgcgtttttataattactgatgaatgaataagaaaaatggctacgactgcccgccggtcg

SEQ ID NO: 27000 - DNA, 2562 bp, Zea mays
  Clone ID: LIB4702-004-D12_FLI
ccgggacagatctctctcggccccgtgcccagcgctccgaaaccctagcgccgccgcgggtgccaggccgcgagcgtcgccatgggcatcgtgtttacgcggctcttctcgtcggtcttcggtaaccgcgaggctcgcatcctcgtcctcggcctggacaatgctggcaagaccaccatactctatagactgcaaatgggagaggtcgtctccacgatcccgacaattggattcaacgttgagacggtgcagtacaacaacatcaagttccaagtatgggatcttggtggtcaaacaagcatcaggtaccggctctttatcatgatagtaaattcctgactgtcatttctgaagtaaataatactattgcatttatttaatcaccgatgaaaagcagtgcaatagaggtactctactactacctttttgtttattataagtaattggtggagagtggagacagtaccttgttattaccctgccacttcagtttccacaagctaaattatgaggctgtaagaatggacatgtttaatgaagataagaaaattttatttttttcccataacaggatgagcctgaatttaattgataatgcaacgaattagaaaggttcctcattgcagtgtttaatgtctcccaaaccatgtaaagatcaatctttttctaagacatgctgtaaagattattagatcatgctgactaatctagttgtttttgacatggaagcctggtctatggctttactgctatatgtacatcgtgcctgtcttggatgtaatgcttttaggttgatctttgccaacatggagataaaaaagaacttgaccatgagagagatatgcccctcgtgttcccttaagtaatagctacacaaagattggaagaattagacagctttatgttaataagaaaaggcacccaatttcacctaaatgagtactcgttggtggcctggacttaagtccacatcctcaaccagttgatcaaggctgtcacactatgatcccaagtgttatggtttggccttggatcatttcataatttggtgtcacaaccgcacaacatatatgacattcatgtatagtgtagtggatacacaatgaaaaatagttgtgtagttgaaggctagtaattccagtagaactagtttatagagtcgaaaatgtgagcaaggtatggtagtctagtctctatgacgctgtgtctagattcatttgtaacattatcctcagttgccaataatttgtttctatattcctttccatgtgagctccgctttaggggggaaacttggatagtgtttggttctggtgctggcaacatgacttatttacggagggtaatagatcctgttgcatgctgtttgagcgtaacgctcctgccactgtgctatctgataccaccattgtctttgctagccatgacagcatgtctccgtcaggttccctcacgtggccgttggatcaggatagcgtgtcgaaaacaaaatgacaggcggagccccactctgctttgttgtccagtagctactgtgttaaagttaccaatatctaaccaaacggatcaagtaattgcttaccatatttacgttagcgctgtttatccattccccttacatttgtgtttctttatcctaaccaaacactaccttaagggcatttcaagtattctactagttgtaagtattttttttctttttatacttgcataagtgttggaatgatcctttatgacatatagcatgattttttcaatcctgagactttttgggtttcttagagaaaactaacatgtcaactagtttgaattttcattgccacttctgtgcttttgaacatcagaactataaccattacttttgcatgatgcattttttcatgaactaatacatttaattttccattaatatcattgtcatgtgtgcatttcaggccatactggcggtgctactttccaaacacccaggctatcatatatgttgttgattcaagcgatacagataggcttgtaacagcaaaagaagaattccatgccatccttgaggaggatgaacttaaaggtgcagttgtccttgtgtatgcaaataagcaggatcttccaggtgcactcgatgatgctgccattacagagtcattagaactacacaaaattaagagccgccaatgggcgattttcaaaacatctgcaataaagggagaggggctcttcgaaggtttggactggctcagtaacacgctcaaatctggaagcagctaaggagcctccgcctcgtcatgaatcatttgctggatggtaaagaatagccgatgcttgcaagtcagcgcgcaaatcccattctctttgttttaactccagaagttctacaccgccatcaattatctgtaaagtgcgtgttaaattttttggatactacattagatgtacccccaggttgagatcaagaataggtctgtggaaaatgacgagcaaactgtgctactgtctttacccgtaaatctcatggatcatgacaagtttttttttgtaccccagtatgattaaacttactccacatttctg

SEQ ID NO: 27001 - DNA, 1761 bp, Zea mays
  Clone ID: LIB4702-004-E1_FLI
atgctctcaggcagcctctcgctgtgtcagttccgctttgtaactgtagaaggagagtgagctcatcatcaagtcgagacgatgggccgcaccgaggcggcggacggcgccgagtccggcgggctgggggtgggggagacggtgcgcgagctgcgggaggcgtacgagggcggcaggacgcggagcctagcgtggcggcaggcgcagctgcggggcctcctccggctcctcgaggagaaggaggtggaggcgttccaggcgctccacaaggacctcggcaagcaccacgccgaggcgtacagggacgaggtcggggtgctcatcaagtccgccaacggcgcgctgcagcagctcggcaaatggatggccccggagaaggtgcgggtcccgctgatcgcttggccggcgaccgcgcaggtggtgccggagccgctcggggtcgtcctcgtcttctcctgctggaacgtccccttgggcctgtcgctggagccgctgatcggggcgatagcggccgggaacgcggtggctctgaagccgtccgagctctcgccgtgcaccgccaggttcctgggcgacaacatcgggaggtacatggactcctcggcggtgaaggtcgtccagggcggccccgacgtcggagtgcagctcatggagcaccgctgggacaaggtcctcttcaccgggagcccccgcatcgcgcgcgccgtgatggccgcggcgtccaggcacctgacgcccgtcgcgctggagctgggcggcaagtgcccctgcatcttcgacgccatgggcagcgcccgggacctgcagatctcggttaaccgcatgatcgcgggcaagtggtcgtcctgcgccggacaggcctgcatcgccatcgactacgtgctcgtcgaggagcgcttcgcgcccatcctgatcaaggtgctcaagtcgacgctgaagaggttcttcccggaagcggaccacatggcacggatcgtgaacgagcgccacttcgagaggctgagtaaccttctcaaagacaggtccgtggcgccgtccgtcctgcacggcggctccatggacagcaagaacttgtacattgagcccacgatactgctgaacccgccgctggactccgcgatcatgaccgaggagatattcgggcccctgctcccgatcatcacggtcaagaacatcgaggacagcatcgccttcgtgaaggccatgccgaagccgctcgccatctacgcgttcacccgggacgccgccctgcggcggcgaatcgtggacgagacgtcgtccgggagcgtcaccttcaacgacgcggtagtgcagtacgcgatagacgggctcccgttcggcggcgtcggccagagcgggttcgggcagtaccatgggaagtactcgttcgagatgttcagccacaagaaggcggtcatgaagcggggctaccttgtggagctgacactcaggtacccgccgtgggacgagagcaaggtcaccctcatgcgctacctctaccgcttcaactacttcgccttcgtcctctctttcctcgggctcaggcgatgaacttcactccagcatcaacgcaagggtcgcacagggattgggcccaataaaccggcattgacagtggatggaggaacatgccaatatagacaatatgcagtagttgtgttgtttgtgaggaacaagtgtcatgccgcacttcaaaaacagtaatgtgctaacctgcatcctaattcctatgatcctatctatgattgcctctagtgagac

SEQ ID NO: 27002 - DNA, 1395 bp, Zea mays
  Clone ID: LIB4702-004-H9_FLI
ctcgaggccggccggggatcccaattcccttcccatcccacccccgcacccaccgtggcccgagtcgccgtggccgccgcgtcaggccggcagcgccctcccggcggtgagcgcagcccggcgcgcgcgccgcggccaccgcgcgcgctcgaagcgcctagatctagggactagcggcccccctcctccatggcgcggcgactgccgttgtggacagcactgctcctccccttcctcctcaccggcgttggtaccgccgtcgctgcatccccgccccacgatgagtgcccggtgcctactatcgtggaatccgttcttagtactcgagacgcgtgctcgacgctggatcttggcaacccggtcggcgtcatggagggggatgagttcaccttagcaacggcagttaatcttcttcatgcaaacaaggatgactatattgctgtacttttctatgcctcgtggtgcccattctcacaagaatgcaaaccaaatttcgagacactggcctccttattcccaaccattagacattttgcatttgaggaatctgcaattaggccaagcataatttcaagatacggcatccatggtttcccaacactctttctcttgaattcaaccatgagagtacggtatcatggaccaaggactgttaaaccacttgcagctttctatactgatgtctcaggtatcaatgcctcggtcaatgtcaagtcaactgcaggggagaccatggtacatcccttgcacgatattgagcgtaaaaaggatgctgaacaggaaaattgcccgttttggtgggctcggtcgcctgagaaaatacttcagcaggatacttatctagcattggctatcacatttgttattttgaggctgctgtatcgtctttttccaaagattgattcctttgctagatgggcatggaggaggcataatctgtttgcaaacttgatgggggcacatgaatatttcctcacctaccttgagcaaggaagacagaagtttcatcggctatacccttcaagttcgaagcgaggaaatctgcaggagggggcaatgaacgctaccgcttgggcctccaaatcattagcatctgtttcgattggagaaccaagtgcgattggaaggacaaactctaccagtgagcttagatgaagtgtaacccttttttctctccacagagatatatgtacagtacagtagagcgatcaggatatggacacccagaatctgttgtaacggctgtattactctttgtatcctctcctccttagaataagtatatccatggttttgcaccttttttttgttgttacatcccaattctttggaggagtaaagtttctggtgtattgtgtagtgtcttgtgttctgaaatttgaaatatgtaccaag

SEQ ID NO: 27003 - DNA, 1748 bp, Zea mays
  Clone ID: LIB4702-005-A4_FLI
cctctagcttcccactccgctcggccaccagctttgaccgcctcccctcccctcgtctcctgtgttcctccataccccactccccccgcaggagcggcgcggcggcggcaaaggcaaaggcaaaggcaagatgttcgggcgcgcgccgaagaagagcgacaacaccaagtactatgagatcctcggggtgcccaagtcggcgtcccaggacgacctcaagaaggcctaccgcaaggccgctatcaagaaccaccccgacaagggcggtgaccccgagaagttcaaggagctcgcacaagcctatgaggttttgagtgatccagagaaacgtgagatttatgatcagtatggtgaagatgcccttaaggaaggaatgggtggtggtggatcccatgctgatccatttgacattttctcatcattctttggaccctcttttggaggaggtggtggaagcagcaggggaagaaggcaaaggaggggagaagatgtagtccactcacttaaagtttctctggaagatctttacaatggaatctcaaagaagctctctctttcgcgcaatgtcatctgctccaagtgcaagggcaagggctcgaagtctggtgcttcaatgaggtgccctgggtgccagggctcaggtatgaaagtcaccattcgtcagctggggccttccatgatacagcagatgcagcagccttgcaacgagtgcaaggggactggggagagcatcaacgagaaggaccgctgcccagggtgtaagggtgagaaggtcgttcaggagaagaaggttcttgaggttcatgttgagaagggaatgcaacacagccagaagatcaccttccctggtgaagctgatgaagcgcctgataccgttactggagacattgtattcgtcctccagcagaaggaccactccaagttcaaaagaaagggtgaagatctcttttatgagcacaccctgtctctgaccgaagctctatgtgggttccaatttgttcttacacatctggacaacaggcagcttctgatcaaatcaaaccccggcgaagttgttaaacctgaccaattcaaggcaataaacgacgaggggatgccgatttaccagaggcccttcatgaaggggaagctctacattcatttcacggtggagttccccgactcgctggcaccagagcagtgcaaggctctcgagtcggtacttccgccaaagccttcgtccaagctgacagacatggagatcgatgaatgcgaggagacaaccatgcatgatgtgaacaacatcgaggaagagatgcgcaggaagcaggctcatgctgctcaggaggcgtacgaggaggacgatgagatgcctggtggagcccaaagagtgcagtgcgctcaacagtaagcagactaccataatgggattcaaggcactctggttgctcttcaattatgcgagtgcgcctgtggactgtatggttctatggttttgctgtcgctgagctacgaagtaggaagctgatgcgcccctggctctgcaagcgggggaatgtatcctttttttgctgcagctggaaaatgctacccaggcatagctggctaccttataacttttgcttgtgagatttgctagagtgacgattttaatttataggtggacttaatgtttgtgtaaggctaggcataacatcatgtctcaatggacgttgccgttgcacattggtgcattttattttaatgtgacgcctgtgcttgtgctgttg

SEQ ID NO: 27004 - DNA, 1496 bp, Zea mays
  Clone ID: LIB4702-005-C3_FLI
ctcgaggccggccgggacggacagtagcaaaagccccccacaaaaccctaccacatcccagcgctggcatctcacggggaggactagtagtatgctcgccgccgcctggaggctgtcgcagcgagccgtcacgtctcctctcctaggcatcgggcgatcccaaatccgaaaccctttctccaccatggcgtctctctcgccggcagccgcctcgccgaagaggctgagggtctactcgtctgccgcggccgacggtgacggcgcggggagcggcaagcgcgtggggacccacaacggaagcttccactgcgatgaggcgctcggctgcttcctcatccgcctcacctcccagttcgccggcgccgacgtcgtccgcacccgcgattcccagatccttgatacattggatgctgttcttgatgttgggggtgtctatgatcccagtcggcatcgctatgatcatcaccagaagggcttcagtgaggtttttggacatggattcaacacaaaacttagcagtgctggacttgtgtacaagcacttcggcaaggagataattgctaaggagcttggggttaatgaggatcatgaagatgttcactgtttgtatctcgcgatatataaaagctttgttgaggcacttgatgcgattgacaatggaatcaatcaatatgacacagatcaaccgccaaagtatgtgaacaatacacacttgtcttcacgcgttggacgctttaatctggactggactgatccagaccagtcacttgagaaggagaatgcggcatttgaacaggcaatggtactagctggaagtgaatttatggagagcgttcgcttccatgttaaatcatggttaccggcaaggtctattgtcctggagtgtttgttatcaaaaggaaacattgatccaagtggagaaatcatggttttggatagattctgcccgtggaaacttcatttatttgagcttgaagaggagctgaagactgatcctctgaccaagtatgtgctgtatcaggatgagaggagcaagagttggcgagtccaagcagtcgcagttgctcctgacaggttcgagagccgaaaggctctgccagagaagtggaggggcatgagagacgacgaactttcagcagaaaccggcatccctggctgtgtgtttgtccacatgagtggcttcattggggcaacaagacctacgagggagcattggaaatggcgagagctgctctgaaattctgattcaaccaaagcatattacccgtgttaccattatatcagtaaacacatcagtaacacatgatgcagttgcgctttctccaatgttatcgttgactcgagccgtggttaactgcgactgattcttgcactgatcttctgttatcctcgtcttacagaagaggtcgattgacccttttcattctttcgtgggatctggtattgtttagaatgtgacggtttatctgaaaaaaaatgatggaactttttgccat

SEQ ID NO: 27005 - DNA, 1412 bp, Zea mays
  Clone ID: LIB4702-005-H6_FLI
cccgtctttaaaaagtacaccctcgactcgtcctccgcattccccgtcttccttgtttaccattcctccccaaaacacatcctgcgatcctcgaagcctccgccgagcatcgatcatgtcggcctactgcggcaagtacgcggatgagctcatcaagaatgctgcctacatcggcacccctggcaagggtatccttgctgctgatgagtcaactggcaccattggcaagcgcctttccagcatcaatgtcgagaacgtggaggagaaccggcgggctctccgtgagctcctgttctgctgccctggtgccctccagtacatcagcggtgtgatcctcttcgaggagaccctctaccagaagaccaaggatggcaagccttttgtcgatgtcctcaaggagggaggcgtcctccctggcatcaaggtcgacaagggcaccattgaggttgttggcaccgacaaggagaccaccacccagggccacaatgacctcggcaagcgctgcgctaagtactacgaggccggtgcccgctttgccaagtggcgtgctgttctcaagattggccccaacgagccgtcacagcttgccattgacctgaatgctcagggtctggctcgctacgccatcatctgccaggagaacggtctggtgccaattgttgagcctgagatccttgttgatggccctcatgacattgatcgctgcgcttacgtcactgagacagtccttgctgcctgctacaaggctctcaacgagcaccatgtcctcctggagggtaccctcctgaagcccaacatggtgactcctggctccgactctaagaaggtgacacctgaggtgatcgcccagtacaccgtccgtaccctccagaggaccgtccctgctgctgtgcctgctgttgtcttcctctctggtggacagagcgaggaggaggccaccctgaatctcaatgccatgaacaagctcagcaccaagaagccatgggccctgtccttctccttcggccgtgccctccaggcgagtaccctcaaagcctgggctggcaaggtggagaacgtggagaaggctagagcggccttcctcgccaggtgcaaggccaactccgaggctaccctcggcacctacaagggtgatgctgccgccgacaccgagagccttcacgtcaaggactacaagtattgagttgcttctctttgcgatcccgttgttttgaaactcctgcctgcgagtaggttgctgagtgttgtttgcttgttagagcttttatattcgaacataaaaaaaacatgcttcctatgtggatgatggttatctttatattcgtatattaactactagtctctgttgttagtttccgtgtaatttgctcctcccagatgggagaatcgaacaccgcttttttgttctatcg

SEQ ID NO: 27006 - DNA, 1705 bp, Zea mays
  Clone ID: LIB4702-006-B10_FLI
ccgggtcggcattcctcagaaacatatccgcaagagtccgccgcagaaccaagctcgtgttcagctttctcgacaaaaaactcctggatcactccgtgaaccagacatacggttcgctggcgaggaacctgacgttcgtcaggtccgtcgcgtctggcatactggtcccgaaggactacatctggccggtgacggccgataactacctgctgccgtccacgtcgatcgtcaccgaagcgcacgaagcggggctggagatatacgcctctggttttgtgaacgataaggctgtcccctttaactacagctacgatcctctggcggagtacctgaacttcgtcggcgatggtggcttctcggttgatggcgtactgtcggactaccctattactgcatcagaggcaattggttgttttgctaacctgaattcaagtaagactgatcatgttacagggaaacccttagttatctcccacaatggcgctagtggagactacccggactgtacagacctggcctaccacagtgccgttgacgatggcgcagatgtcatcgactgtcctgttcaagtgacaagcgatggagtcctcatgtgcatgagttccattaacctgcttgacaccaccaatgttcagagaacacctttcgccactccttccctggttccatctatcttaataaatgtaattctttcatcactgatcaatctatcttctctaccgcagaatgctgcgttcatagcaaagtcactagggatcgacatggttgactccgtaaccgccgccttaagtgccgccggcttcagtaaccagaccaccaaggaagttctgatccggtcaacagacagcgccgtcctcgtcaaactgaagcagcagaaaacgagatgcaagctcgtgtacaccctccccctaggcatcggggacgcttccaaaccctcgctgaaggacatcaaggcgttcgcggaagccgtagtcgtcgacaggacctccgtcttcgctctgagctacgatttcatcatgggacagaacaggatcgtgcgagacctgcaggcggcggggctggctgtgtacgcgcaggtgttccggaacgagtacgtagcgcacccgtttgatttcttgggggatccgaccgtggagatcaactactatgttcagacgtttaatctgtccggcatgatcactgatttccccaagacagtcagaagatacaaagagaacacctgtacagctctggggaaggatatgcccaagtacatgcggccagttgaggctggctcccttgcagatttcctccggtccttccaaacccagccgccgtctgtggcaccgatgccggcgctgaactcttcaagcgtggaggagccgcctcttccaactgctgcgccgagaaacgtgccgcctggtggtggcgccccagcggacgccgccgggactgctggcggcgctgctccttctgatgcgagttccggcggcgctcctccttctgacgcgcgtcacacggctaccggaagtagcggtatgctgcttgtggtgctggtttccgcggctctgctgatctgattctgagcagacacatgagactgtatagtagacagagccgaagcaaatgcaaatctccgttggattcgatcaagctttgaccagcgatataccatacacttgtttttctcgggtatatatgtttgtatttggccgcatttttcaag

SEQ ID NO: 27007 - DNA, 1913 bp, Zea mays
  Clone ID: LIB4702-006-F9_FLI
acaaatactagcaaggtcatctcaatcacaggccacagctattagcttttagccgctggcagacaaattcgacagagcagctcgcctgctggccgcaatccgtccgacatggcattgctgccgggggcggcgcggcgcctcctctgcagcctcttcctctgtctctggctgtccacgctcgcgcgtgccgcgacgcgccgctacgagtgggaggtcagctaccagttcaaatcgccggactgcgtgcggaagctctccgccaccatcaacgggcagacgcccggcccgaccatccgcgccacgcagggcgacaccgtggaggtgaaggtcaggaactcgctgctgacggagaacctggcgatccactggcacggcatccggcagatcggcacgccgtgggcggacggcacggagggggtgacgcagtgcccgatcctccccggggacaccctcacctacgccttcgtggtggaccgcccggggacgtacatgtaccacgcgcactacggcatgcagcgctcggcggggctgtacggagtcgtcgtcgtcgtcgtcgcggcggcgcccggagccaaggccgacgacgcggagccgttcgcctacgacgacgagcaccacgtgctgctcaacgactggtggcacaacagcacctacgagctggccgtcgggctcgcgtccgtgccaatggtctgggtcggggagccgcactcgctcctcatcaatggccgtgggaggttcaattgctcggcggcggccgtgccggggacctgcaacgccaccagcccggagtgtgacacgccggtgttcgccgtcgtgccgggacagacctaccggtttcgcatcgccagcgtcgcatccttgtccgctctcaactttgagatcgagggccacgaaatgacggtggtggaggcggacgggcactacgtgaagccgttcgtggtgaagaacatcaacatctactccggcgagacctactccgtgctgatcaaggcagaccaagaccccaaccgcaactactggctcgcctccaacgtcgtcagccgccagcctgccacgcccaccggcactgccattctcagctacagcggtgaccgcgcaccgccatcgacgaccccgcccacgggcccggcctggaacgacaccatgtaccggttccagcaaagcgtggcgacggtggcgcacccggcctacgtcgagcctccgccgccgcgcgccgaccgcaccatcctcctgctgaacacacagaacaagatcgacgcgcacaccaagtgggcgctcaacggcgtgtccttcacgctgccgcacacgccctacctggtggccatgaagcgggggctcctggacaccttcgaccagcggccaccgccggagacgtacgcctaccaggggtacgacgtgtacgctccgccgcagaacccgaacgcgacgaccagcgacgggctgtaccgcctgcggttcggctccgtcgtcgacgtggtgctgcagaacgccaacatgctggcgcccaacaagagcgagacgcacccgtggcacctgcacggccacgacttctgggtgctgggctacggtatcggccgcttcgacccggcggtgcacccggcgtcgtacaaccttaaggacccggtactgaagaacacggtggcggtgcatccatatggctggacggcgctgcggttcaaggccgacaaccctggagtgtgggcgttccattgccacatcgaggcccatttcttcatgggaatggggatcgtcttcgaggaaggcattcaacgtgtcgccagtctcccgccggagatcatgggatgcggggaaactaacggtggacaccgatgattatatcatgtattgtagctatgagtgtagtaaacactttctttcctctaatgatatcgtttgtcaaatgttcagtgctc

SEQ ID NO: 27008 - DNA, 1890 bp, Zea mays
  Clone ID: LIB4703-002-E1_FLI
taccctcgaggccggccgggacacactctttggttgaactcttcgcaccttaccttctattctcaaggaaacctttatccatggtccgaggtatcatactgctcctgcttgtgacccccctcgccatctccatggcactgccatcactatcaacgagaatcgaagggagtgtcataggggagagatccaacttgttctcacagctgcactccgataattctagccctacagaaaacaaactccaaccaggtgaaaagtcctttgcatcggaggcatatgcggtgaactggaacgaaccaccagaccaacaatcgcaagactccctcgagcagctagagccgtatcgagtgatatggaagcaaccagtgcaaggtgaaaagtccttcgtatccgaggcatatccggcgaaatggaacaaaccaccatcaccaagcaagcaatcgcaagactccttcgagccagaggcatatcgggtgaaatggaacaaatcaccaccaccacaccaacaatcgcaagactctttcgagtcggaggcatatcgagtgaaatggaacaaatcacccccaccacaccagcaatcgcaagactcctttgagccggaggcatatcgggtgaaatggaacaaatcaccaccaccacaccaacaatcgcaagactccttggagcaggaggcatatcgggtgaaatggaacaaatcaccaccaccacaacaacaaacgcaagactctttcgagcaggaggcatatcgggtgaaatggaacaaatcaccaccaccacaccagcaatcgcaagactccttcgagccggaggcatatcgggtgaaatggaacaaaccaccaccaccacaccagcaatcgcaagactcctttgagccgaaggcatattgggtgggatggaagaaacatgcgcaaggagcaacggacgttgctgatgagacaacgccagcacgtggtcatggtctgcatgtcgcgaccgggatgctcttcacgaggaagagcttgcctccagggacagccctaccggaaggtaccaagttctgcggccacggcttcctcgatcccgagaggtttgaactacgagcggatgcggatgccatcccgttcagctacagccagctcgacaccatcctgaggatgtttcggatccctcgggggtccaagaaggcagagcaagtcgccgccacgctccggacatgcgaggctgagtccccagaggctcatgcctgcgccacctccgagcaggcggcggccgacttcgctgcctcctcgctcggggtcagggccagcaagctggtcgcgctcgtcaccaccgtccatggggggaaggacgccactagatacgtggtggcgcccaacggcatcacacgcatcggcaaggcggcaggggccgcggccgtagtgccgtgccacccgatgccgtacccgtacatggtccactactgccaccagccggcggacgtggaggcgctccgtgttgagctgaccgggctcggagacggtggcgtgacaaccgcgatcgccatgtgccacgccaacaccatgaactgggacgatcgctacttccaaatgctgaacgtgacgcgcggcgaggagatctgccacttcatgccgcgcaactatgtgctctggctaccagctgccgagcttctagggaactagtggcaatgccactatgttaggtgtcgttgctttgataaaatgaagtgtatgacaatgacagcatcaacaattgttcgtatgaacatatggttggacatgataactgcgagaaagagaggatatatgttgttgcgccctatgaattgtgatatggtgttgtggtggaggatgcatcaaatgatggggaagctaccttagttgtgcaaactacttttaagaactccatttttcc

SEQ ID NO: 27009 - DNA, 1771 bp, Zea mays
  Clone ID: LIB4703-002-G6_FLI
agtacgtctctccccgttcccggcctggatgccacccacaacgttttgatccgccccgatcgcaactccgcaccgcgctcctgttctcagatacacacactgtcaactcatatcaaaatatacatacaaccaccgcagcatggggatggtagtaaacagcagtgcagtcccgttctccatcgcgctgcttgccgtcgtcatcgcggcagtagtaatcaccaaggctgcactgggacgacgacgacgacgacgaacagccgcagccaacaacccagcaccaccaccccgcaacgacgtcgacaccggccggcggcgtccccccgcggccatcaccggcgtcacctcagccgtccgactcgtgcacgcgctcgccaccaagggtttcgaagccacgctgtacgagcagtacgcgaagctggggagcgtgttcacggtgagtctcttcgggatgaagacgacgacgttcctggccgggccggacgtctcggcgcacttctaccaggggcccgactccgagatcagccacggcgacctcctcgagttcaccgtccccatgttcggcgagggcgtcgccttcgccgtcgacgccgccacccgcgccgagcagcatcgcttctacctcgacgcgctgaagccggccaggctaaggtgccatgtcgctcccatgctccaggaagtggaggagttcttcgcgagatgggggcagcagggcaccgtggacctgaagcaggagctggagcaggtgctgatgctgatcacggcgcggtgcctgctggggaaagaggtgcgggagaggatgctccacgaggtcttctccgcgtaccgcgacctcacggagaacagcctccatctcaccagcctgctgttcccgtacgcgcccacgccggcggcgcggcggcgcgacagggcgcgcgccacgctctccggcatcttctccgagatcgtccgctcgcgcaggcgctcgggccgccgagccggggacgacgacggcgacgtgctgcagagcctcgtggacgccaggtacagggacgggcgcggcacgacggaggccgaggtcacggggctcgtcatcgccatcctcttcgccgggaagcacacgagctcggccaccagcacgtggactggcgcgcggctgctgcgccacgcggagtgcctggacgccgccgtcgacgagcagcggagggtcgtggcggagcgcgggagcggcgtcgactacgacgccctggcggagatgggcttcttgcactgctgcatcaaggaggcgctgcggatgcacccgacggcgccgctgttcctccgtagggcgcaccggggcttcaccgtgcggacgagggagggggccgagtacgatgtcccgagcgggcagaccgtggccagccctctgctgatcaaccactacatcccctacgtctacagggacccgcacgtgtacgacccgcggaggttcggtccgggcagggaggaggacagggtcggcgggaggttctgctacaacgcgttcagcggcgggaggcatgcctgccctggagaagcgtatgcgtacatgcaggtgaaggtgatatggagccacctgctgaggaacttcgagctcaagctggtgtcgccgttccctcggaccgattggatgaagctttcgccggaggcgagagggaaggtggtggtgagctacaagaggcggatggtgccggttgggagcgtgttggagaactgatgtctctgatggttacttttgtatgagctgtgtgtttgtatgcaatgtgtgttgagcacc

SEQ ID NO: 27010 - DNA, 1974 bp, Zea mays
  Clone ID: LIB4703-003-B3_FLI
ctcgaggccggccgggatgtcacgatgtaggttgttcatctccgtcccccaaatggcgccgcgacgggaaaactatataaacaaacaaatcatcaggatccatctcctccctatatatacgccactctccgtcttcgcctttggtctccatcactgattctgattctgattccagccaccctgaccggcgaagcgcggctgacatttcccccccaccataccgccaccacctgagaagagatcgatccaatcagattaaccaattagcagggagggaggagaggggcaaaggcaatggccgggacggaggtggaggacccgccggcggcggcgttggaggtgcccgcgaaacgcggccttctgcggtacaactcgccgctggcgcaggtgtccctgctgggcctcatctgcttctgctgccccggcatgttcaacgcgctgtcgggcctcggcggcggaggccaggtcgaccccaccatcgccgacaacgccaacaccgcgctctacgcctgcttcgcggtgttcggcgtgctgggcggcgccgcgcacaacctgctgggcccgcgcgcgacgctgctggccggcgcgctcacgtacccgctctacgccggctccttcctctactacaaccaccgcccgggctcgcaggtgttccccgtcacggcgggcgccctgctcggcgccggcgcgggcttcctctgggcggcgcagggcgccgtcatgacgtcgtacccgccgcccaatcgccggggcacctacatctccctcttctggtgcctcttcaacctgggcggcgtcctcggcggcctcctccctttcgccctcaactacaaccgcggggacaagaaagggagcgtcagcgacggcacgtacatcgccttcatggcattcatgctcgtcggcgccgcgctcaccgtgctcgtgctgccgcccgccaggatcgtccgcgacgacggcaccagggccaccagggtcaccttctcctccccggccaccgagggcgccgagatcctcaagctcttcgccaactggaagatgctgctcgcgctgccggccgcctgggccagcaacttcttctacacctaccagttcaacaacgtcaacagcggcctcttcacgctccgcaccaggggcctcaacaacgtcttctactggggcgcgcagatgatcggctccgccggcatcggctacttcctcgacttcggcttcgccagccgccgaaagagggggctgttcggggtcgccgccgtcgccgccgtcggaacggccatctggggaggcggtctggccaaccagctcagctacaatgccgtgccggtgcccgaccccatcgatttcaaggacggccaccgctacgccgggcccttcctgctctacttcagctacggactgctagatgccatgttccagagccttatctactggattatcggcgcactcgccaacgactcccaaatcctcagcaggtacgtcgggttctacaagggggtgcagagtgcgggagcggcggtggcatggcaggtggacaggcgccacacgcccctcatgtcccagctgatcgtcaactgggggctcatgaccatcagctaccccttgcttgcgctgctggtgttcctggccgtgaaggacgagagctactcggtttcgtcggtggaggacggccgggagaaggacagcaagctgtccgcgccgaccagcttccactgatgaagaagaagaaggatagaccaagatgcacgtcactgtaattgtaacacggtgtttccatccaagtaagttttagtagtagaaatcaagaaacaactggagcatactcagggtgtggcgttcgtttttaagtaagttgtagtagtattcgttttggtgattgttatttattatagcacctctgggttagcttgagcatcatgcttccttgtcagtggtgtgaccaagaaattggatagaatctatatgaaggaattcttttgctat

SEQ ID NO: 27011 - DNA, 1587 bp, Zea mays
  Clone ID: LIB4703-005-A12_FLI
cacaatacctctatcttgtgccacttatatagtacgtccatcctagtgaaacaaaccatggtttccgaaacaaaccagtccaagaatgtgtgtgtaattggagctggaccatcagggctagtggcagcgagggagctgaaaagagaaggtcataaggtggttgtgttggagcagaaccatgatattggaggtcaatggctatataacccaaatgtacaagaggaggaccctttgggaagagacccttggctaaaggtgcatagcagcatctatgagtctttaaggctcatgtcccccagagaggtcatgggcttcactgatttcccctttttagtcaagaaaggtagagatccaaggaggtttcctagtcatagagagctccttctctaccttaaggacttttgtgaatggtttgagttgagagacatgatcaagttcaatacaaaggtgcattatgtgggaccattaaattatggtgtccctagtgaggatttgaaatgggttgttagaagcaaagacaagaacagcgaggaggaagttgaacaagtgtttgacgctgtggttgttgccactggccattactctaaccccagattgccatgcattcaaggaatggccatatggaaaaggaaacaaatgcacagtcacatttacaggtcgccagagccattccgtggggagatagtggtggtggttggaaattcttttagtggacaagaaatatcaatggaacttgtgaaagtagtgaaggaactccacctcagttcaaaatcacttgacatttatgagggtttatctaaagtcatatccaaacacgagaactttcatcttcgtccacagatagagacccttcgagaggatgggacggtcattttcaacgatggctccagcattatcgcagacactattttatactgcactgggtacacctattccttcccctttcttgacaccaaaggaatggttgttgtggatgataacagagtgggtcctttgtatgaacacacgttccccccagcacttgctccttctctttctcttgtaggcatccccagaagaatcctggggctccctttctttgagtcgcaaggaaaatgggtagctcaactgctttctgggaaaaaggctttgccatcatatgaggaaatgatgaaatcgatcaaggagttttatcattcaaaagaagaagctggcattcctaaacattatacccatgaaattgaaggctttgattattgtgataaatacgcagaaaatgtaggactcccaaagttacaagaatggaggaaagatctgtgtgtatcagctgtagtgaacttatttatcaacttggagacatatcgtgattcgtggaatgatgatattgatgagaagcttcaagaagcccttcgaagtccttacttcactcaactaggagttgaacctgaagatccttctctgtaaaactcaaattaattagcgattacttgtatttctatgttgataacttcaatctttgtggctcaataatctcaaccttggttcctccaaatttgtggactcttattgtttgattcaaatgatcataaaatgcgacgaagttcatgt

SEQ ID NO: 27012 - DNA, 1954 bp, Zea mays
  Clone ID: LIB4703-006-D4_FLI
ccgggacctctctgcgccgtgctcagatttgcccccctctgcctgcctgcttctactacctgctgacacggcggtgcgggtcgtgctcggtggacgccagggggctacccctacccgggatccaggatcgtgctgtctgctcgccctctcctgctccttcaatcccatcggagatccgtgctggcgtttcctcccgatgtgttcattttcaagtattttatcgctttgccagaaatcttttttatgatgacttaaaatgtctgtagtatattaatcacaatttttagacttgtgctccgtcactacatatgccagacatatattgaagctcatgcagctcctattctcaaacccagtttcagcgcccaattgtttggtttgaagaaatcaagttcagatgggctccattctaagtgctactagtactacggctaagtctatggatcagcatgaggcatctggaacagatcctaataagagggtgaagatatctacttatgagtatgggtcaaacccaaggataattccaactcttcctgatgagctctcactccagatcccggcaaggtcaccacggatccattaccttaacttgaagctggtttgccgagcctggaaggcagcaatcatcggctatgaactttcccagctgaggagagagcttggtgtaagtgaggaatgggtgtatgtactgaccaaggctgaggcatacaagctccattggtatgccctggatccagtgtttcagaaatggcagaggttgccaccgatgccttctttcgtcaatcaggaggaatccaatcggacagcatcttcggcgttctggatgtggaatgttgtgggatcaagcattaggattgctgattacgtgaggggcttattttggcgcaggaacagtttggaccagatgcccttttgcggttgttcagtgggtgttgctgatggttacttgtatgtcattggcggtttttccaaagctgttgccctgaatcgcgtttgtagatacgacccttttctcaatttgtggcaggaagtgagcccaatgatgactgggcgggctttctgcaaggcggcatttttgaatggcaagttatatgtagttggtggagtcagcaggggtcggaatggcttgcttcccctgcgttcagctgaggcgttcgaccctaaaactggattgtggagcgacctaccagaaatgcccttcgcaagagcgcaggtactccccactgctttcttggtcgatgtgctgaagcctatcgccacaggaatggcaccctacaagggaaagctgtatgtccctcagagcctgtactcatggccattcttttttgacattggaggtgagatctacgacccagatctgaatgcctggtcaacgatgccggatggtctcggcgatggatggccagccagacaggcaggcacaaagttgggtgttgtgatcgatgacagactttacacgctagagccttccagctctttggacagtggtaagataaaaagatacgactccgagggggacgcatgggtaactatcaccccacaagttccagttaatgatttcactggtgcagaggccccttatttactcgctggcctcggtgggaggctccatgttataacaaaggcggcgaacaacactcttcaagttatgcaggctgtggtgcagaataactcggtatctgaagaaaatgtggtatggacaacagtggcttctaggaactttgggacggctgagcttgtcagctgccaggttctagatgtttaaaatgtgggtcgcaagttacgctttgtagaggatatagtatgccatagaccaacgatttagccaagaaaaatattacatagtttttgctttgtgtgtgtgtggaacaagagttcaatttgacgtggagggagatcaattacagatattcagatatgtataactgtataagctaactcatttactggg

SEQ ID NO: 27013 - DNA, 2047 bp, Zea mays
  Clone ID: LIB4704-001-A10_FLI
gcctgtccgggaagacgcctccccgctccgcgttccccagcgccagcggtaaccccacccaactcctctgagctgtgacacagctgtcctcctccccccactccaggcgctcacacaccctccacttccctccacaggaatccgccgccataatctcctccgctccgctccaccccgcattgcaggattgcgccgagcacgagcaccctcctccccgaagcctcttctttgctctgctttcggtggtatggtgggatgatgagcagggcggcagtgctgctgtgtctcctctgctgcctcgccgccgtcggcgaggcggcgtcagtggtgggcgagggcgaggcggcggagctggccgtgtcggtggacccgtcgtggcggttccctagccagcggctgcgggacgcgtacgtcgcgctgcagacctggaagcagcaggccatcttctccgaccccaggggtttcaccgccgactgggtgggcccgggggtatgcaactacaccggggtcttctgcgcgccgctgccgcgcggggtgccgggcgccggggagctcgccgtcgcgggcctcgacctcaaccacggcgacatcgcgggctacctcccgccggagctcggcctgctcgctgacctctcgctgctccacctcaactccaaccgcttctgcggcctcgtccccgccactctgcgccgcctccagcttctcgtcgagctcgacctcagcaacaaccgcctcgtcggggcattcccggccgtcgtgctggagctcccggcgctcaagttcctcgacctccgcttcaacgacttcgagggcgccatcccgccggagctcttcgaccgcccgctcgacgccatcttcctcaaccacaaccgcctccgctccccgctccccgacaacttcggcaactccccggcctccgttatcgtactcgccgacaacagcttcggcggatgcctcccggccagcctcggcaacatgtccggcacactcaacgagatcctcctcatcaacaacggcctcgactcctgcgtcccgccggaggtcggcttgctccgggaggtgaccgtcttcgacgtcagcttcaactcgctcgtcggcccgctgccgcagcaggtggccgggatgcgcaaggtggagcagctggacgtcgcgcacaaccgcctgtccggggccgtcccggaggccatctgcgccctcccgcggctcaagaacctgaccatctcctacaacttcttcaccggcgagccgccgtcctgcgcgcgcgtcgtgccttcggacggtgacaggaggaactgcctgcccaaccgccccacacagcgcacgccgcagcagtgcgccgcgttctactcgcagccgcccgtcgactgcgccgcgttccagtgcaagccgtttgtccctgttccgccgccgccgccatcataccccggcccgttgccaccggtataccctatgccgtacgcatcgcctccgccacctgcgcagtaccgatgattcgtcgaggagggagaagcactatcactttcaccttaattcaccaccaccgctgctgcgctggatgaagacagcaaagttcaccgtcacaattgtacgtggtcagtcattgttgtgcttagattagtagtgttcttgattgatagctaccggcatatagaagattatattattataaggtgcatatatcgctcttgcttttgcattggtcggtctctgtttttcgcgtcgatccgggttggcgtcgtggcgacggtggaaaggattgaaggttggggtgatggagggaacagtttgagattgagcttggattgattgttgactgggttgtgaataataaactgcttgagagagagagattacgaggatgaggaggattggttggtgacttcacctgggcctgggatgtatagagggaactaagcttcttcagttaagctgctgctttcagttgagagtccagagataagttttcagaccaagtaatgtatcctacttactattctttttttgtgtctcacagctacttactgttaatcgattgttattatactcg

SEQ ID NO: 27014 - DNA, 1909 bp, Zea mays
  Clone ID: LIB4704-001-E9_FLI
ctcgaggccggccgggagacaaacagtcgagctcgggaccctgagaaacaaccagggagggcactagggcagggacaggacgaccagacaggctccgcgtttcccggcccgcgaacgcgagcgcgagttcatcgccttcccggttcccgccgcgccgcgggctttcccgccttccccgagccctcctcccccgcacacccacgaccagtgtgtgggtggagactagtgggagtgggaggcgttataatcggtcggcgcaaggacgtgggggagaaggggggctaatccggccgtgcacgcaaccggaccgggcgcggtagccagtgcgtaggcgccgttccgccgctgccgcctcgcccggcgttcctcgccgccagcacagggcgtggccggagtccgcgcgccaccatggcaaggtcatggctgataacttgtaggggaattgctaagaaaataaggtacacaaatcctggcgctaatcaccatataagtgaactggttgcagaagcacggagggaatgcccaaactgcagttatattattgataacagcgatgttgccatgcagtggcctgggttgcctgctggagtcaagtttgatccttctgaattggagttgcttgaacatttagaacagaaagttggcctgggagattcaagaccacatgtgctcattgatgaatttattccaactatagacaatgatgagggaatctgctattcacatcctgaaaatcttcctggtatgaaaacagatggtagcaatgctcatttctttcatagagtttcaaaagcgtatggttgtggtcagcgcaaacgtcgaaggaccatcaactgcagtgatcacactgtttctgatgagcatgtgagatggcacaagacagggagatccaaagccatatatgaaaatggtgttataaaaggttggaagaaaataatggtgctgtacaaaatttcgcaaagaggcagaaagcctgatagagctaattgggtaatgcatcagtatcatcttggagaagaggaagacgaaaaggacggggaacttgtagtatctaaaatattctgtcagttgccaaataagagtatggaaatttctgaaacagaaactgcttatgaagaacctggtgcacctgcttcggtgattggtccgaaaactccaaagacagtcacaccacagccacgccatcctaaaaatagtccatgtgaaactgagcagagtattttcatcctgcaggaccagctactactggacggtgaagacgagcctaccatgcctatcgttagtctggcggatgatgcaatgaaccctgcatggtgtgctgtagctgaagaagagcaggttgttggagaggcatctcgggctcagtcaaactcagatgaacctcttctctgtcgcgaagacccaaattccttaaacgacgaagcattgcttccctgggactatccgattctgtcgcaatgcaggagtgagatttttgatcggaacctgaatggatacgggttgcctgatctccataatgtggatctcggcacgcctccagatcttcagcttgctgatttccagtttggctctcaggaaagcctcggcagctggctggatcgcatctaggaagatactaaagtacgtatttggtagagcagctcagcaacctgatcgatgggcatcttttttgcacatgatatggtaaccggtggcagctatttttgggcttgcaacacaaagattgcattcttgcattagtgttgtattagtgttgcgctgtcaaactttatctggaaaccaaagaacctttcgctcttttctattttctttagaacctttaacagctggctatcagaacactagccttgaaatatagctgtaagttttgtggcatggttggtgcaaacctacattgccccgctgtagg

SEQ ID NO: 27015 - DNA, 1979 bp, Zea mays
  Clone ID: LIB4704-002-E7_FLI
gggtccaccatgccgtgttcctcctcttcgtcgtccaaccccttccactccctcgcctccgccttccccttcctctcctccacatcccaacccccatccccacccgcctcgcccgcgcccgccgctccccacctcgccgtcccgctcctcctccccgtctcctcggcttccgagtcccgccgcggggcgcagccgctgccgggcacgcggatggtcggcgcgggcgcgaccggcgggggtaacatggccagcggtggtggggggcccgcgttcgtgggccaggtgttcaccatgctcgacccatccgggaacgggctcatggccgttaccacacgcttcgagctcccgcgcttcctcaccaacaggactcctatgtggttcaaaaggatgctatcaccgtcgaagaagactgaaaatagtccagtatttaggttttttatggatctgaatgatgcagtatcctatgtaaagcgactaaatgtgccaagtggcatggtgggggcttgtcgccttgatgtagcatatgaacatttcaaggaaaagcctcacatgttccagtttgttccaaatgaaaagcaggtccatgctgccaataagctattgaagtcacttccacaaaggggcagaaggaaaaaacttgatggggttcctgtttttagtgcgcaaaacttgaatattgcagtggcaacaaatgatggaattagatggtacacaccatacttttttgataaaaacttgttggacaatatccttgaagcttctatggatcaacatttccattcgataatgcaaaatcgccatacacgtcgtagaagggatattgtcgatgatagtttaacatcagaaataattgaagaaagtgctgaaagcttgcttgagcccccagaggttcaagaattaatgaatgagattggcccagctggtataccattaaatgttgtaacgaaagctgcagagattcagtttcttgatgttgttgataaagtccttctaggaaataagtggttaaggaaagcttctggcatacaaccaaagttcccttatgttgttgattcatttgaagaaaggactgctgtttcaattgccaatattgctactaccagcagtttaactgcttcaaatgacgacagcagttgccagaataatcaagaaactcaagcttccgagccaagtggtgacaacagcagctacagaaatcacaataatgaagatcataatcactttccgtttagcaatctgcttccaaatatatggccagggcatgacagaaagttcaaatcacaagagagtgacaataagtttagcagatatgatgcagacatgaagagtaagttacaagcaaaccctcttcttccgaaaatcaccatggttggcatctcaatgggtgatggtgcacagatgagcaaagccaacttaaagaagacaatggaagacttgacaaaagagttggagcaaacgagtgaagaaaatatgttcggtgatgaaaaagacccactttttgttgccaacgttggtgactactcaaggataacaaagattagctctgcatgaggctcgttgaccaacaggcgacagcaagggtgttgtactgaactgctaacgaagtctacagtccatgatactgatcttaagagggctctactgatataatgatgcaaatcggaggtcatcagatcatatggacattcgactgtagaccgttctgactttagaggctatccaacgtcaacagttacaagccaatctaaattttcggatatgatttgtcaaaaggatgattgtaaatagaaaagtttgcagtatgtccaccatgcagttaggcgtgaagatctgaagcaacatgttgttggatttctaagatcttagctcgtaacagctgtagagtatggtggtatatagcttcaggattgagatgggggtcacaggagtctgtcaggtgagcagagtcgaataaattgatgtgggtagcatttttcttc

SEQ ID NO: 27016 - DNA, 1917 bp, Zea mays
  Clone ID: LIB4704-002-F2_FLI
ctcgaggccggccgggaccagaagtaagagaaaccacgcgtgtcagctagccattggatcaccaccattcgcgctgttcggcgtgcgcacccgatcccgtctccgtgcggctttgtgagtagagaagggaaggggaagcagagcaggaggggttcgtcatcgcgtggtggccgcgccgctctgttcctccgtcccctcctccttccggctctcgctgtcacatgtcgtgtggtgtgggggcgctctgatccggatggtgcagcgccgcgggatcgcccacggccatgattgatcgcgaacgagcagaggaaatgcaagttaataatgaggcaccactagggtgcctcaagccaaatatttctcagtataactctccagagcagataggtggtgttgaagggtttcctgagaataatgaaaaaaggaatgatattgttgctgcggaaaaaatctgggaggcgactccaaaccaaggccttagcaggcccatctaccgacaagaattttatgcctggccatatatttattcagattatcaaatcgtgcgtcagccactaccttatggttttgacaaccaattttatcagataaatagggaccacggtttccctattgagaacagggttcaatatcttccattcaagatgctccctcaaggtcacccccatgatgcacagcttcaggaatttcagtattttgtggttattgactttgaagcaacctgtgacaaggtgaacaatccatttccacaagaaatcatcgagtttccatctgtcttggttaacagtgcaactggaaaactcgaagaatgcttccaaacatatgttcggccgacgtatcatcaatttttgactgatttttgcaaggagcttactggcatacaacagattcaggtggacagaggtgtgcctctaggtgaagccttactcatgcacgataaatggctagaggacaagggcatcaagaacacaaactttgctattgtgacctggtctaactgggactgccgtataatgctggagtcggaatgcagatttaagagaatcaggaagcccccttattttaacaggtggatcaacttgagggtaccgttccaggaagtgtacggggacgtccgctgcaacctgaaggaggcagtccagctggccgggctcacatgggaggggcgcgctcactgcgggctcgacgacgcccgcaacaccgctcgcctcctggcacttctgatgcaccggggcttcaagttctccatcaccaactcactggtgtggcaacctgccgccgctccgcagtcaaccgccgccacctgccacttctccccggaccgctctccggacccagtcgtcgtccagctccagcaccagcagcagcagcacaagccgaaggaggcgctggggtctcccgcgtcgcaggtgaacccgtcgtacgccacccccgcgggagggaaggacagagccatgtactgctactgcggggtgctgagccggtggagcgtcgtgcgcaagccaggacccatgcaggggcgctacttcttcgggtgcgggaactggaccgccacccggcgcgccatctgcccgtacttcgcatgggcctcgtgaatagcaaagcaagcagagatctgggctggtgctttaaccgagggaggcgcgccatgttgctgcggctggctgctgcgcctcccagttccgtatatattattgttattattattatggtataataactttgctcgcgagacaaatggaggttctctaggtagtgtctctaacctgtcgtactgacttctgtcgatagaagagaatggggccagatgctgcttaggtgtgatctatcctatccatccatggataataaagaagtttgtggattgctgttttattaacttgatggaactccgtaggtgtggtttgtgcaacttag

SEQ ID NO: 27017 - DNA, 1727 bp, Zea mays
  Clone ID: LIB4704-003-B7_FLI
atcgaggccggccgggactagtgactagttccgggtttctggcccactagataccaaattgtaaattcgaattacaagcgtagtcggtgttatagtcataggattacataatccaacatgcataccttatggtttgctgtcgagttgtgcacttcatatactacagtattggttcctctccctttattgtagggactgatgacgatctccctccagcacaaaatagaggactaagagggcgatctttcagtgggaatgtcgtagcatctgctggggcatttccttacatgagggcaaataatgatctggagagtgaaatacatcgggttgagcaagatgcatatactggtattcttagggcatttaaagtgcaatctgatgcaatatcctgggaaaaggagagcttgattactgaactcaggaaagaactgagggtttctgatgaggagcatagggagctattaaataaagtcaatgaagatgggaccatccgtcgaatgagggagttaagacaggcaggtggatccccaagtggtttgcatcatggcaacatggttttatatggtgcagaacctgggtccactaccaagaggcaaagggcatctcattcgattcctttgcaatcagcaggcctccagtcccctatgatgccctcccactcagtttcatctgcaaaatggggtcctttgcaagcaagaggcacgaaagcgaggacgcccattcctttggcgttaccatctgtggatccaagttcactaataaaccataaagtttatacaaggtggccagaagacaacaacttctatgaggccaccataacacgatataaccctgtgacgggtgagcatggacttgtctatgacatgggcacacaagccgagagttgggaatcagttagactttgtgatatggcacctgaagatataagatggggatttgatggacacctttcaaatcgtgatgtctggagcccttctggccctatgttgatgaggcacatgaccaacaatggtgctatggcaggttcaatcaagggaagagggaggttatcaataaatgagactataaaggactatgctccacctgaaaatggcaccaataggaattttgatcatgtcgacataccaaataccggaagtgttgttatggaggtgaagagggtattgttcaacccaaatatgcctgaaatcgagaaggcaaggaaacttttgaaagatcaggagcagtcattacttgatgcaattgccagacttgatgaagcatctgatagcgataatgaagatatggccatggaaggccgaatgggttctgctggggaaaggaatggcatcactacgtagttgcttctggcatgttggaattttggtagattaacatgcatttgtgtagcacctacctcgaccgcagaacaaggaaaccacattatggcaaaactgcatgccagaaaatggtgtcctggaaacggttgacgcctgaaatgggattttttggctacacaaaattgagcgcacgagcggcagagatgcaaatgttaaagaactgtttaagcgccattgcatggtgtttcctatgtagcaaactagaggcaactaaatgttctagttgatcattagcatggagcacttagcattcctgattcagtacaggtagatgtctaacactccagcataatatccaacttggctgttcttgtactctaatgtgaaaaaggattgttgtgcaaaaag

SEQ ID NO: 27018 - DNA, 2181 bp, Zea mays
  Clone ID: LIB4704-003-F10_FLI
tattcccctcgcgtcgcgtgattcgattggattccgttcccccgccccgttccgttccttcagcgccgctgccgctgcggctgcgccgaggcccgaccccaaaggctgcggcctgcggccgtcgcagtcccatcgattcctcccgcttggctttcccacccctcgaagccgaatccgatggttccacccgttgaccgcctccgccatcggaggccgcgccgcctcctccccgccttcttcctcggtccccgcgcccgcctcctcctatagatataccgcccgcgcatcgctccatggcggtcggcggcgacgacgacagcatggagcgggacttcgccgccaggctgcgcctcgcgcattcgccctccccggccacgcctgccgccgccgcctcatcctcccccaccgccgctggggggatcgccttccgcgcgccgcaggagcagttcaccgccgacgacttcgtactcggcaagatctacggcgtcggctcgtactccaaggtggtgcgggccaagaagaaggacactggtcgcgtctacgcgcttaagatcatggacaagaagttcatcaccaaggagaacaagatctcctacgtcaagatggagcgtattgtactcgaccagctcgaccaccctggcgtcatcaggctcttcttcactttccaggacacatactccctctacatggcgctcgagtcgtgcgaaggcggggagttattcgaccaaattgttcggaaaggtcggctctctgaggacgatgcacggttctatgctgctgaaattgttgatatattggagtacttgcatggccttggcctaattcatcgggatgtcaagccagaaaatctactgcttacttctgatgggcacatcaagattgctgactttggtagtgtgaagcctacaagggatactcctatcaaagttctcccaaattcaactactgaaagggcctgtacatttgttggaaccgctgcatatgtaccacctgaggtcctgaactctgccccagcaacctttggaaatgatttatgggcattgggatgcacactgtaccaaatgctttctggctcttcgccatttaaagatgctagtgagtggttaattttccagagaatcattgcaagggacctcaaatttccagagtatttttcagctgaagctagagatcttgttgacaaattgctggatgttgatccaggcaaaaggccaggtgcaggacctgatggttattcttccttgaaggagcatcctttcttcagaggcatagactggaagaacctgaggaagacacggccacctaagctcgcaatcgatgcaaatgcaaatgaagatgaggatagccaagattcaaattggttggcacacatgggaagtgtggcagtcaaccaacagtcaaatactgttggtaataatggtgccccgtcatcatctgaagtgcgctcccatatatctaaattagcttccatcgactccttcgactcaaaatggcaagaattcctggaccccggcgagtctgtagtcttaatatcaaagctgaagaagattaataagctagcaaacaagaagatccagttgatcctcactgacaaacctcaattgatctgtgttgacccttcaaaaatggtggccaagggaaacattatttggtctgatgacccaagtgaactcagtgtgcaagtatcagattcttcacattttagaatatgcacgccaaagaaggtgtcaacatttgaggatgcgaaacagcgtgcttggcaatggaagaaggcaattgaagacctccaacgctgccaaaggaattaattttcaattcaaatcaaaactctaaaatgtcgaattaggcactgttaatacatcatatccttttcacttgggaggaacatgagggggtttatttctcctgcatcctgctccaatgcctggttgcaaggaatttgctactcgctaattcacacactgaatgatggcccccaattttttcccttcccatccatgttttcaaatagtacacaattttgtttgtcacttttgtgaaccgttggagcagatagcgtcaaaacaggctgcagtctggaaatattgacacaggaaactattttaacagtctgccatacttattctctttgttgtcttttgttcaagagcatctatatcagagtaattctttggttttgcg

SEQ ID NO: 27019 - DNA, 2109 bp, Zea mays
  Clone ID: LIB4704-004-B1_FLI
ggccggccgggaccaccacaccagagcaggaactagcaagccagccagccattgccgaccggagcgatggctaccatggcgaggtcaggtgccgtgaggctctgctgctgcacctccgctcttcttatgctctgctgcttcctcctcccaggcgccctcgccgaggagcgcttctacgagttcgtcgtccaggggacgccagtgaagaggctgtgcaagacccaggagatcatcacggtgaacgggcagttcccggggccgacgatcgaggtgtacagcggcgacacgctggcggtcagggccgtgaacctggccaggtacaacgtgaccctccactggcacggcctccggcagctgcggaacgggtgggcggacgggccggagttcgtgacgcagtgccccatccgccccggcggcagctacacgtaccgcttcaccgtccaggggcaggagggcacgctgtggtggcacgcgcacagctcctggctccgcgccaccgtgcacggcgcgctcatcatccaccccaggaggggcgtcccctaccctttccccaagccacacaccgaggcccccgtcatcctagcggagtggtggaggagggaccccatcgccgtgctccgccagtccatgatcaccggcgcgccacccaacgtctccgacgccctcctcatcaacggccagccgggagacttgctcccgtgctccagccaagagacgagcatcatccccgtggtcgccggcgagacgagcctgctgcgcatcaacaacgcggccatgaacaccgagctcttcgtcagcctcgctggccacaggatgaccgtggtcgccgcggacgccatgtacaccaagcccttcgagaccgacgtcgtcctcctcggccccggccagaccaccgacgtcctcgtcactgcccacgcagcaccgggacgatactacctcgccgcgcgcgcctacgcttcggcccagggcgtccccttcgacaacaccaccgccaccgccatcttccagtacaagaacgcccccggctgccccaccacctccggggcaggggctggagctggagccggtggcggcagcaccttcagcggcccagtaggccggtcctctaggtcctccggctacctcggccgcgcagggccgcaaccgatgctcccgttcctgccggcgttcaacgacacgaacacggcgaccgccttctcgaacaggctccggagcccagtgccggtgaaggtgcccggcccggtgacccaggaggtgttcaccaccgtggggttcgggctcttcaactgccgccccggcccgttctgccagggccccaacaacacccggttcggcgcgagcatgaacaacgtgtcgttccagctccccgacaccgtctccctgctgcaggcgcactaccaccacatccccggcgtgttcaccgacgacttcccggcgctcccgcccgtgttcttcgacttcacctcgcagaacgtcccgcgcgcgctgtggcagcccgtcaagggcacccgcctgtaccgcgtcaggtacggcgccgtggtgcagatcgtgttccaggacacgggcatcttcgccgccgaggagcaccccatgcacatccacggctaccacttctacgtgctggccacggggttcggcaactacgacccgcgccgcgacgccgccaggttcaacctggtggacccgcccagccgcaacaccatcggagtgcccgtcggcggctgggccgtcgtgcgcttcgtggccgacaaccccggggtttggctcgtgcactgccacatcgacgcgcacctcacgggagggctcgccatggctctgctggtggaggacggcgagtccgagctcgaggccaccatggcgccgccgctcgacttgcccatctgcgtgctgtagagatttttcagtttgttgctggcgtgcgtcactacgactacgtggagttacagggaggctgtgtcctgtgtgcatcgtgctatgtgtttgcatcggtagttgggcatttgcattcttggatttccatttgaatttgcgaaggaaaagggaagtagtatatggctgaatacggatcacgctcattggctttatttccgcaatgggctttcttgacgg

SEQ ID NO: 27020 - DNA, 1550 bp, Zea mays
  Clone ID: LIB4704-004-C7_FLI
ccgggagaaacaaccccagccgccgccaaccccaaccccgttctccggcccgccgctctctctctcctagtccccttctatcgtggcaacgacgagcgacagtcgctgccgccctacggcaggtgcccaggtcttcttcggtcccttcgccgtcgacgagcactaccaggcaacaattctatggctcttgtagccccacggccagggatggagctggctaatattcaacatcatccaaatcaggctcctgggcctggaggaaaacaacgcacatctagcctggaggcaccaataatgccacttacaggtcaccagagtgctatctactgcatgaaattcaatcctgcgggaactgtgatagcatcaggttcccatgacaaggatatcttcttatggtatgttcatggtgaatgtaagaactttatggtactgagagggcacaagaatgctattcttgaccttcagtggactactgatgggacccagatcatctctgcaagtcctgacaagactgtgagggtctgggacgttgagactggtaaacaagttaagaagatggctgagcactcatcattcgtcaactcatgctgcccagcacggaagtggccacctcttgtggttagcggttcagatgatggtacagcaaagctgtgggacttgcgtcagagaggtgcaatacaaactcttcccgacaaataccagatcacagccgttagcttctcagaggcagcagataaggtattcactggtggcctggacaacgatgtcaagtggtgggatcttcgcaagaatgaaacgacagaatatctcaaaggacatcaggacatgatcactgggatgcagcttagccctgatgggtcttacctcctgaccaatgcaatggacaatgagctcaagatctgggatctgcgcccttacgcaccagagaaccggaacatcaagactcttacaggtcaccagcataactttgagaagaacctactgaagtgtagctggtcgccagataaccgcaaggtcactgctgggagcgcagaccgcatggtctacatctgggacacaacatcaaggcgcatcctgtacaagcttcccgggcacaatggttctgtcaatgagactgctttccatcccacagagccgatcattggatcttgcggcagcgacaagcagatctatcttggggaactttaagtgactatcagttccttttcagctagatgttcttgtgacactttgatgaggagaggaggcactgacaccctgttcctttgcctgagaattggaacactcagtttggctgatctggatttgacatttgttgattgtcttgttaagcccagttggtcttgccgttcacaaactgccccatactttgcaccttgtggctttccgatattaagctagatggcatgcttgaaggtcactggttgcatgtactgtgtctagaaccttactaaaaacttgcatacggtagtactgtatgctatattgttatcttttttaatcgtatgaaactagttggagaagtgataccgccttcttcgcatggttcc

SEQ ID NO: 27021 - DNA, 2314 bp, Zea mays
  Clone ID: LIB4704-004-D9_FLI
cattaggttgcttgaccgcgccgccgcggcgaggggccagcgtcgtcggccgggacgggatggacgacctcaagcagatcctggcgcgcccgatccagctcgccgagcaggtaataaagtggtccgacgaggcctacacgttccggcaggagtgcatggagctcaaggccaaggtggagcgcctcgccggcctcctccgccaggccgcgcgcgccgacctctacgagcgcccggcgcgccgcatcttcgacgacaccgagaaggcgctcgacaaggcgctggccctcgtcgacaagtgccgcgcccacggcctcgtccgccgcgtcttcaccatcatccccgcgggctccttcaagaagatgaccaaccagctcgacaactccgtcggcgacctctcctggctcctccgcgtctcctcgtcggccggcgacgacgacgacgacctcgacgcccacatcggcctcccgcccatcgcgcagaacgagcccatcctcttcctcatctgggagcagatcgccgtgctctacaccggcaacctcgacgcccgcgccgacgccgccgccagcctcgtctcgctcgcgcgcgacaatgacaggtactgcaagctcatcatagaggaggacggcgtgccgccgctgctcaagctcgtcaaggagccgcacctcgaggggcaggagaactgcgcgctcgccatcggcctgctgggccgcgacccggagtgcgtcgagcagatggtccaggccggggtgtgcctcgccttcgccaaggtgctcaaggagggacccatgaaggtgcaggccatgctggcctgggccgtctcggagctcgccgccaaccaccccaagtgccaggacgccttcgcgcagcacaacgtcatccggctgctcgtcggccacctcgctttcgagacggtgcaggagcactccaagtacgccgtcacgtccaagatgtcgatacactccgtgctgatggacagaaagaacaacgccgcctctgcggttcagccggacttgctggatgcaggggagcacgccggcatgaggtatccgactggacacgttccccagggcaagaacgagatccacagtctggtgcagtccaccatggctgcgaagcctaacggaggcagtggtaagcacagcaacatatcatccactagtaacgctggtgtcgcggcaacgaagcagcacaacgcgtcactgtcaggaacgagtacaaggggcagggagttcgaggaccctgagacgaaggcatacatgaaagctaacgcagccaaggcgctgtggcagcttgccaagggaaacgccgctatctgtaagaacatcacggagtcaagggctctgctctgcttcgccgttctcctcgagaaaggtgaaggtgacgtgcagtataattccgcaatggctctcatggagatctgctgcgtggccgagcagaattccgacctccgacgatcggcgttcaaaccaacttctccggctgcccgggctgttgttgaccagttcctacgtgtcgttgagaaggccgagtacgacgatctcctgattccctgcattatctcgctgggttgcttgtccagaaccttccgtgctacagagacccggatcatcgggccactggtgaagcttcttgatgagagggaagcagatgtctctcgggaggcagcgattgcactgaccaagtttgcgtgcacggataattacctgcacgttgaccacactaaagcgatcatcagtgcaggcggagcgaagcacctggttcagctcgtgtatttcagcgagcaggtggttcagatcgcatcactcacccttgcatgctacgtcgcacacaatgtcccggacagcgaggagttggcacaggcggaaatcctcacggtgctcgaatgggcttccaagcaagcttacatggtgcaagacccagtaatagacaacttgttgccagaagcaaagatcagattggagctgtatcaatccagaggcgcaaaaggctattattagattacctgctgtgggaagggaattttaaggcgttcttcttggatcggccaagtactgtatatacatccaacggcttctatgtatactctggctaaacctttttttattcccggcatggcaaaagttgttgaagttacacacctctggttgggttcttgatatagggaagtaagttttatttgtaggcttggatgttcagaactccaatttctcttgttggtggtatagtttttggaagattagcatcttgtgctctctttggcctaaatgatgtatcgtgtatattacatttcactcatcaacatgaaaaagttcat

SEQ ID NO: 27022 - DNA, 2221 bp, Zea mays
  Clone ID: LIB4704-004-G1_FLI
gcccatcagccctccctctctctcctgcgtctccgaggcgcggacgacggcgacgacgcgaacgcccccgccgcctaggcacatttgctgggaattagggcaatcaacgtttaagtacatgtggtctactgctgtttgattattactgagattcaatcatttggtcagatgagagttctggctggggacttacaagtgtagcactgttgtcggcttgtgactaaatagcatcacttcacatacaacactggataatggatcgtagggatacttcagggtttgttagtggaggatgcaaaaataatgaagcctactagtttctctatatcttctaacttggtagctttattgacaattatttaacccagaagtgaggccagctggtacttcccataaagtttggttactctaatagcaatggaacccaggcatgggcgttcagcattcactataagtttctcaaatccaaatggctttgctaatcagtgcaccgccattccagccgtcagttattcagcggctggttctagccaacttgatgtgctggctcctactagaggttgcaagagaaagtggactgagttggctctaggtctgggtgacacatcaagctcagacagcagcaagcagagcataggtactggctgcactgtttcttctctcaagggaagcgatgatgtctcatgtatggattacgacataagtttcaagttatctcttggcaatgaagatacttccaagctgcataaacaggcttgtggttctaaaaggactatggagaagcctcggttggatcttaagttatctttggctccatctcaatccgatgtaactgacgcggatctaatcagaggcagtgcacctcaggacatgtttgtgcagccgtacttgatgtcctcagtgccaacagtcgatgaaggatctacatctgctcgacatccatctggaggcatggtggtttccttccttaaccaggctgggatttctccgaaccagttgcccccacttaactctcatctggtccagggtccagcttgttcagcaccaacagtgctccaactgccaaaaagttcagctgccacttcttctgggtttgtccgcccacagcaacgcaacggtagcacaaagatctgttcagagccaggttgtgcaaaaggagccaggggttcatctgggcggtgcattgcccacggtgggggcagaaggcgccagaaagaaggctgcaacaaaggagccgaggggaggaccatcttctgtaaagcccatggagggggcaagcgctgtgagcgccttggatgcaccaaaagtgccgaaggccggacagatttctgcatagctcacggcggcgggcggcgttgcagtcatgacgggtgcaagagggcggcgcgaggcagatcgggcctgtgtatcaagcatggtggcgggaagaggtgccaaacgctgaactgcacaaagagcgcggaagggcggtcaggcatgtgcatcgctcatggtggcgggcggcgctgccagtacgctggctgcgggaagggagcccagggcagcacaaacttctgcaaggcccacggcggcggcaagagatgcacgcaccccgactgctccaagggcgcggaggggagcacggcgttctgcaaagcccacggaggcggcaagcgctgctcggctgacggctgcacgaagagcgtgcacggcgggacccagttctgcgtcgcgcacggaggcgggaagaggtgcgtggtggaagggtgcgggaagagcgcgagaggcaggaccgaccgctgcgtcggccatggcgggggcaagcggtgccactccgccggctgcgggaagagcgcgcaggggagcaccgatttctgcaagtcccacggcggtggcaggcgctgctcgtgggggcaccctggctcagacctcgggtctggtggcgctccctgcgaccggctggcgagaggcaagaaggggctgtgcgaccggcacaacccgctggtccatgacaacagcgtgcatgggggtgcgtcgttcggtggcttcagtgtcgtcagtgccgccgccctttctgagggagatggctctccatctccaggcaccgagacaagcatgcgcagcttcttcatgcacgcggtggaggctcctcgctgtgtggcggcctcggcccatgaaggccgggtgcatgggggcaacttcatgcctatcatgctcgacggtggcgtgggactcgggaaga

SEQ ID NO: 27023 - DNA, 1920 bp, Zea mays
  Clone ID: LIB4704-005-H9_FLI
ctcgaggccggccggggattttgaaccgtaataaccgaggccgaggccgaccggccgagagaaacaccgacccgaccgaactcaactcgttctcgacccgaaaccccaaatccctcgcggaaaacccttccctcccgatggcaaccgccgccaccgccatggtggtacccgagcagccacgccgccggaagccggccccggggcgcgggggagtggccctccctgcgggtctctcggaggaggaggccagggtgcgggccatcgccgagattgtctcggcgatgggggagctctcgcggcgcggggaggacgtggacctcaacgcgctcaagtccgccgcgtgccggagatacggtctggcgcgagcgcccaagctggtggagatgatcgctgccgtgcccgaggccgaccgcgccgcgctgctgccgcggttgcgcgctaagcccgtgcgcacggcgtcgggtatcgccgtcgtcgccgtcatgtcgaagccgcaccgttgcccccacatcgctaccaccggtaacatctgtgtctactgcccgggcggtcccgactccgatttcgagtacagcacgcaatcctacactggatacgaacccaccagcatgcgtgccattcgggcaaggtataatccatatgtgcaagccaggagcaggatagatcagctcaagaggttagggcatagtgtggataaggtcgagttcatcttgatgggtgggactttcatgtccttaccagctgattatcgcgattattttatcagaaatcttcatgatgctttgtcggggcacacttcagcaaatgttgaggaggctatttgttattccgaacatagtgctgtcaaatgtattggtatgacgattgaaacgagacctgattattgcttggggcctcatctgcgccagatgctatcttatggttgtacccgcctggaaattggtgtccagagtacatatgaagatgttgcccgtgacacaaacagaggacacacggtggctgctgttgctgattgcttctgtttggcaaaagatgctgggtttaaggtggttgcccacatgatgccagatttacctaatgttggagttgaaagagacttagaaagtttcagagagttttttgaaagtccagcattccgggctgatggtctgaagatttatccaacacttgttattcgtggaactggtctttatgagctctggaaaactggcagatatagaaattatccacctgagctcttggtggatatcgtggcaagaattctgtctatggttccaccatggacacgagtgtatcgggtccagagagatattcctatgcctcttgtcacttctggtgttgagaaaggtaaccttcgtgagctagctttggctcgaatggatgatctgggcctaaaatgtcgagatgtcagaacccgtgaagcagggattcaggatatccatcacaagatcaggcctgatgaagtagaacttgttagacgtgactatgctgcaaatgagggctgggagacgttcctctcttatgaggatacacgacaggatatcctgatcggcctgttgcgcttgcgtaaatgtggctgtaatgttacatgccctgaacttgtagggaggtgttcaattgttcgtgagcttcatgtctatggaactgcagtccctgtgcatggccgtgatgtagacaagctacagcaccaggggtatggaactctgttaatggaagaagcagaaaggattgctcaaaaggagcaccgttcaaagaaattggctgtcatttcgggggttggtactcgccactactaccgcaaattgggttatgagctagaaggaccttatatggtcaaatgtttggcataataccgtttcatttttttcgtgctcatgtagaacagactagtgtttataatgtaacttgtgtagttttttc

SEQ ID NO: 27024 - DNA, 2064 bp, Zea mays
  Clone ID: LIB4704-006-A5_FLI
acagaaagcgagagaagtccgtctgctggttgcaaccgagcaggatgctgtcattgcccagaacggcggcggcggtgactgtgtatgcgctggtcgctcttatcgccggcgccggcgccgtcgccgccgcggcgggaggtggcgagcagccgctgtcgaggatcgccatccaccgcgccaccgttgcgccccagccgggtgccttcgtcgacgcttcgcctgcccttctcggccgggaggggggggacagagaatgggtgaccgtcacatatagtaaccccaggccctcgaaggatgactggattggagtcttctcccctgctaatttcaatgattccacttgtccaccagagaatgaatgggtggagccccctcttttatgcacagctcctatcaagttccaattcgcaaactacacgaatcgtgattatggaaacactggaaagggatcgttgaggcttcagctgataaatcagagagagggtttctcttttgcattgttctctggaggcctgtcgaatccgaagctcatcgcccactcaaagagtgttactttcatcaacccaaagactccggtgtacccgcggttagcacaaggaaaatcctggaacgaaatgatagtgacatggacaagtggctacggtaccaatgaggctacaccatttgtcagatggggcatagaagggcaaatccaaaccctttctcctgcaggcacccttactttcagtcgcgacaccatgtgtggtcctcctgcaaggacagttggttggcgtgatcctggtttcatacacacaagttttctcaaggacttatggcccaatctcttgtacacataccaagttggtcatcgcatttttaacggttctatagtttggggacatcagtatagcttcaaagcacctccttatcctggggaagactctttgcaacgtgttgtaattttgggggatatgggcaaggctgaggttgatggttcaaatgagttcaatgactttgagcctggttcacttaacacaacaaaccagctaattaaagacttgaagaacattgatgtagttttccatattggagacatcacatatgccaatggctatctttcacaatgggaccaattcaccgcacaggttgagcccattgcttctactgtgccttacatggttgggagtggtaaccacgaaagagattggcctggatcaggatctttctatgcaaatcttgactcaggtggtgaatgcggggtaccagctcagaatatgttctacgtgccagcggaaaaccgtgagcagttctggtactcaacggactacggaatgttccgtttctgcgtagccaataccgagttggactggaggccaggaacggagcagtacaggttcatcgagcactgcctgtcatctgttgatcggcagaaacagccatggctcatcttcctcgcgcaccgtgtcctgggttactcgtcggccaccttctacgccgacgaaggaacgaccgaggagcccatgggccgcgagagccttcagccactctggcagaagtacaaggtcgacatcgctatgtacggccacgtccacggctacgaacggacctgcccagtatatgagaacgcgtgcgtggccaaggggtccgacctctacgccggcgccttcacggcgacgacgcacgtcgtggtgggcggcggcggcgccagcctcgccgactacacggccgcgcgggcgcgatggagccacgtgcgggaccgcgactttgggttcgtgaagctgacggcgttcaaccacacgaggctgctgttggagtacaagaagagccgggatggcagcgtgcacgaccacttcaccatctcccgcgactaccgcgacgttctggcctgcggcgtcgacaactgccccagcaccaccctggcgtcgtgagcgagcggtggtgtcgattatattcggtttgtgtcgctgttggattttgatttcaagatcgatgcactgtgctgtactgttgtggactgaatgaaatacctgagtgaggaagcagctgctggtgcagcaggtctacatgctgcttcggattgtccct

SEQ ID NO: 27025 - DNA, 1997 bp, Zea mays
  Clone ID: LIB4704-006-A7_FLI
aagaggtgtccccgctccgcgcccagcggtaaccccacccaacccctgtgagctgtgacacagctgtactcctctccccactccaggcgctcacactcacatccccttccctccacaggaatccgccgccacaatcccctccgctccacattgtgggattgagccgaacacaagcaccctcctccccgaaacctcttctttgccctgctttcggtggtatggtgcgatgatgactagggaggctgtgctgttgtccctcctcttctgcctcgccgctgccggcgaggcagtgtcactggtgagccagggcgaggcggcggagctggcggtgtcggtggacccgtcgtggcgcttccccagccagcggctgcgggacgcgtacttggcgctgcagacgtggaagcagcaggccatcttctccgaccccaggggcttcaccgccgactgggtgggcccgggggtctgcaactacactggggtcttctgcgcgccgctgccgcggggggtgccgggcgccggggagctctccgtcgcgggcgtcgacctcaaccacggcgacatcgcgggctacctcccgacggagctcggcctcctcgccgacctctcgctgctccacctcaactccaaccgtttctgcggcctcgtgcccgccacgctccgccggctccgcctcctcgtcgagctcgacctcagcaacaaccgcctcgtcgggccgttcccggccgtcgttctcgacctcccggcgctcaagttcctcgacctccgcttcaacgaattcgagggcgccatcccgccggagctcttcgaccgcccgctcgacgccatcttcctcaaccacaaccgcctccgctcgccgctccccgacaacttgggcgactcgccggcctccgtcatcgtgctcgccgacaacagctttggcggatgcctcccggccagcatcggcaacatgtccggcacgctcaacgagatcctcctcatcaacgacggtctcgactcctgcgtcccgccagaggtcggcttgctccgggaggtgaccgtcttcgacgttagcttcaactctctcgtcggcccgctgccgcagcaggtggccgggatgcgcaaggtggagcagctggacgtcgcgcacaaccgcctgtcggggtccgtcccggaggccatctgcgaccttccgcgcctcaagaacctcaccatcgcatacaacttcttcaccggcgagccgccgtcctgcgcgcgcgtggtgccacgaggcggcgacacgaagaattgcctacccagccgccccgcgcagcgcacgccgcagcagtgcgccgcgttctactcgcagccgcccgtcgactgcgcctctttccagtgcaagccgtttgtccctgttccgccattgccgccgccgccgccatcgtaccccggccccttgccaccggtataccccatgccgtacgcatcgcctccgccacctgcgcattaccgatgattcgctgcgggagagaagcaatatcactttcaccttaaattcgccaccgccgctgcgctggacaaagttcgccgtcacaattgtacgtggtcagccattgttgtgcttagattagtagtgttcttgattgatagctactggcatatagaagtttattattataaggtgcatatatcgtccttgcttttgcattggtcgttctctgttttttgcgttgatcggggtttgcgtcacggtgatggtgaaatagatggtcagatggaggtgaaaaggattggaaggaacaatttgagtttggattgattgctaattggctgactgcttgagagagagatcaggatgacgaggaggattggttggtgacttggcgccaccttgggcctcggatgtatagggggaattaagcttaagttcttcagttaagctactgctttcagttgggagcccggagataagttttcagaccaaggaatgtaccccacttaactattctttttgcatttttatgtcacagctacttactgat

SEQ ID NO: 27026 - DNA, 1401 bp, Zea mays
  Clone ID: LIB4705-002-B11_FLI
cggccgggctcccaaaaccctcgcatcctctcccacgcatgtcacaatcgccatgaccgacagaaaccccgccgccgcctcaagcaagcgtcactgtgacctctccctcgacgatcccacgccgtcggccaagctccagcggtgctccgagccgtcagaaccaacgccggcggggaaaccgaacggcggcgcggcgacgggagaggagagcgagatgatggccggcgcacggaaccctagggcgcagaggtacctggtcgccgtggagtacattggcacccgcttctccggctcacagaagcagcccaaccagcgcaccgtcactggggtcctcgaggaggcatttcaccgatttattgggcagccagtttcaataatcttttctagccgaacggatgcaggtgttcatgctttatcaaatgtttgtcatgttgatgttgagcggataagtaaaaggaagcctggcgaagttttaacacctcatgagcctggagttgtaaaacgtgctgtgaaccactttctactgaagagtgaaggtgacataatggtgactgatgtctgctgtgttgcaccagattttcatgctagatacaaatctctagagcgcacatatcactatcgcttgcttgctggacctgaatcaacatctgtttttgagaaaaactctgttcggcatatatctgaagatttggatattcagtcaatgaagaaagcatgcagcatacttgttgggcatcatgatttcagttcatttcgagcggctggatgtcaggcaaactctccagtgcgaactctggatgaacttagtgttacagaagtattccctttcatgttttttccttcaagtgtagaaagatcagagttggaattatcaaatgtctctcttgtttattcaaggaaaccagacatggaatcttctgggaaaggatctgatggttcctgtaccagtagtgtgaaatcagattttgagaatggaaaagattttggaaagcggtcaaggcaccgttgctttgttgttactgcaagggcacggtcttttctttaccaccaggtaaggttgatggtcggtcttctaaaatctgttgggactggagatctaacaactgcagatgttgagagaattctggatgcaaagacggttactgctgcacccagtatggcaccttcttgtggtctgtaccttgctaacgttaaatatgatctgaatacctgaagacaagttttatctagtggcttctgttggtgggcctccagattttgtcagctgttggctatcaaaggtatatctgaatccaatctatgaatagtgcacctcagtgagtgcaactttgaagtatctgtaccaggtcgaataagatattcaaacatgtcctttgcttatcaagaatgatacatcattac

SEQ ID NO: 27027 - DNA, 1777 bp, Zea mays
  Clone ID: LIB4705-002-C12_FLI
taccgactttggaatacatatgtattggaaaactggaatctgtagaatacatgacacagtattcatctgttgtaagatggtctactcgtgctaaccaactttggaatagtttgcaaaagtaaataaatttgtcggattcgcaaaatctcagcctttctacctatatatgttgtgtaaggttttctacctgctcttttggaattacctttctaccaaacctcaagtactttctaaaagttgaccttatttaagtttgtagtcggttcatgtgaccccacaggacccaaaacagattgccgccatcaaagatggaatctgggagcacgttctatggaggggaaggtctctccatcgaccccaagtggtttatcgacccgaagcttctctttgttgggccacgcatcggcgagggcgctcatgcaaaggtctatgaggggaagtataagaaccaaaatgttgctatcaagattgtgcacaaaggggacacccctgaggagatgaccaagagggaggggagattcttgagagaggtgaccatgctgtcaagggtgcagcacaagaacctcgtcaagtttattggggcctgcctagaacctgtcatggtggtcgtgacagagctactagtggggggttcgttgcgcaagtatttggtcagtctccgacctaggagccttgagcctcgtgtagcagtggggtttgcattggacattgcccgagctatggaatgcttacatgcacatgggatcattcatcgtgatcttaagcctgagaatctgttgctgactgcagaccagagaacagtaaaacttgttgatcttggtttggctagggaagagacactaacggagatgatgactgctgagacaggaacataccgttggatggctccagagttgtacggcacagtaacactgaggcatggagaaaagaagcattacaaccacaaagtagatgtctacagctttgcaattgtgttgtgggaactcctccacaataaactgcccttcgagggaatgtctaaccttcaagctgcctacgctgccgctttcaagaatatcagaccaagtgccgataacttgcccgaggagctgtcagaaatcctaacatcctgctggaaggaagacccaaacgacagaccaaacttcacacagataatacagatgctcctacactacctatccaccctttcgccacaagagaccttggcgggcccccgccgcacgttcagttcggagaacacaatcctgcccccagagtctcccgggacaagctcgctgatggcttcgcggggcgacctcggcgacacgcccaagggcaagaaggaagacaagccgaggggcttcttcttctgtttcagcgagtgctattagcacgagcccccccaaagggggaacactccgataagcttgcaaatactgaacgaacaccgtctctccccagctccgatgccctgcgactcaagccatgtccagccggtcaagtcccaggcatccatagtccgcaccctgaagaacggaagtgtagtcgaacactgttttgttttcttctgctaatcaaggtctcctgcatcgctgacatgctgatgacatataccagcagggtaaaacgacgggtaaaccttttgactccagatagtaatggtgggaatagcttacctcccctgtgttttctggcgcaccatggtgtaacggagttgctagagcgcgactatagattgccttcctgcctgcctgtctcgcccgacatcgtatagaaataaaaccaataattcgcatag

SEQ ID NO: 27028 - DNA, 2261 bp, Zea mays
  Clone ID: LIB4705-002-C9_FLI
ccgggatccgacaaagtgcgtgggcgcgcgggtgggtagttggcgcccgcgcccgcgcgcgcgcgcatagcctgcctgccttgccatgccacagtcgctttccccctcccttatcagttatcacccagccaaaagcgagggaggggtggtggggactcggtcttgttcgtttccgccggcgggtttattcgccgggaccgcggttccattgctctctgcttctctagacaccggcggccgtcgccgtcctcgccagccagtcctactcctaccactcgcccgctcgtccgcgagcgagctgatgggttgcgtcggtcggctcggctgattgggttccgtcttccgtcctctcaatcattcggttccgcgacctggggtcctaagacctaagcgtcgcgtccgtccaaggccacggagagtcctggtggccgtgcgggcactgtgcgcccgtggaggtgtcgtgtctcggtgcccacacgacaacgacgctcctctgcacccccgtctctacaagtaccacctggctgactccagtttcccgacgccattccacgtatctcttgtttaggccgggctcgagagagttgggctccgaatcctgggtgggtttggagttggagaatcgccttcgtcgctcgacccagaaagattcgatgccttcagccatcttgatcctgcctgcctgcgcgtgcctatctgatggagagccacaacccatcgcactctcagatcgccgaagtgacgatggacatcgcagcgtcagcttctggagcggcagggagcaagttctgcaagggcgcagcctgcgacttctccgacgccagcaactcctcgaaggacgccagggagaggtcggcgtcgatgaggaagctgatagtcgcggtggtcctctgcgtcgtattcatggcggtggaggtggtggggggcatcaaggcgaacagcctggccatcctgaccgacgcggcgcacctcctgtcggacgtggcggcgttcgccatctcgctgttctcgctctgggccgccgggtgggaggcgacgccgcggcagtcgtacgggttcttccgggtggagatcctcggcgccctcgtctccatccagctcatctggctgctcgccggcatactggtgtacgaggccgtcgtgaggctcgtcggcgagagcggcgacgtgcgggggtcgctcatgttcgccgtgtcggcgttcgggctggccgtcaacgttctcatggccgtgttgctgggccatgaccacgggcacggccacggccatggacatggacattcgcatgaccatggccacggccatggggattcggacgatggccattcccaccacgacgacgaggagcaagaacagggccgtgtccatcaccacgagcacggccatggaggcgctatcactgtcacaacccaccaccaccaccatcatcacgatcacgatgttgaggaggcgctgatcaagcatgagggtacccagtctgctggcagagctggtaagaagcctcggcggaacatcaacgtgcacagcgcatacctccacgtgctcggggactccgtccagagcgtcggggtcatggtgggcggggcgatcatctggtacaagccggagtggaaggtcatcgacctcatctgcacgctcgtcttctcggtggtggtgctgttcaccacgatccggatgctgcgcagcatcctcgaagtgttgatggagagcacgccccgcgaagtcgacgccaccaggctggagagcgggctctgcgggatggagggcgtggtggccgtccacgagctgcacatctgggccatcacggtgggcaaggtgctgctggcgtgccatgtgaccatcgccagggatgcggacgctgatgagatccttgacaaggtgatcgggtacatcaagacggagtacaacatcagccatgtgaccatccaggtcgagcgcgagtagggagctctgtctttggctgctgtcttgggcataaatggctggcgccattcgagctctggtgtgctcggtggtgttgtctattgctagtctattaggcaggcgggggaattgtttgcgtcgaggtggtggtggtggtcgtcagtaagtcagtcggtgcataaacaaggatgtaattttcggtaatgctattgacagcatcgtggttcatcgaactgcatattctagtacgctgtgtcgtcacatcttgtgtaaggtcacgtttctgtgctgcggtatggaagatgtgaagttcgtggttggcatgttgctatttgttt

SEQ ID NO: 27029 - DNA, 1453 bp, Zea mays
  Clone ID: LIB4705-003-F6_FLI
ctcgaggccggccgggattaaaaaatgattttccctatatgcccaggcccagcgtattcctcttcggttcctccattgctcctcgcgtgcgctccctctcccgtctgcccctccctctctctcgtggagacgactgggccgggggccgccgtcgttgctgccctacgcggctacacccacgtcttcttcgggcccttagccgcgacgagcaccaccagggagtagaagaggttaaccttctggttggaaacgatgtacttcgaaggctatggcttccgtggaagtactttcgagcagacatatcgctgctatcctgcgtctttcatcgacaagccacaacttgaggccggtgacaaaattataatgccaccatcagctcttgatcgtcttgcatctctgcatattgaataccctatgctatttgaagtccacaatgcagcagcagaacggacttcgcattgtggtgttctggagttcattgcagaagaaggcatgatctacatccatattggatgatgcaaaatcttctgttgcaagagggagatatggtgttcataaaaaatgccaacctccccaagggcacatatgtgaagttgcagcctcatacaacagactttctagatatttcaaaccccaaagcaatcttggagaaaactttgcggaacttttcttgtctaactacaggtgacagcattatggttgcatataataacaagaagtactacattgatatagtagagacaaagccctccaatgctataagtattattgagaccgattgtgaggttgactttgctccaccacttgactacaaagaacctgagccagtaaaacctgctgttcctgcaagcacggagcctggtaccggtaagactattgtcctatgtgattactgttccccatatggttttttcatgcacattatttttatgattattttttcagacgttccagctgaagaagaaccaaagttcatccccttcactggttcaggaaggcgcttggatgggaagccttccaaagataaagatgtgctagcctcttcccctgcaaagcgacaagccaatgcgaccaacggtgtgcagccttcaacagccaccacatcacagggcagttcatcgcgtaaggccacaggaaaacttgtatttggctctggtggtagccgagccgaaaaggcacctgaaaaggaagcagaggagcccaagaaagaagacccaaaattcgcagcattcacaggaaagaaatactcactgaagggctgaataaataggaagacaatgtattatcagtatttccggtgacggacattctcagggagaagcgcttaccaaccatgttatgtgggagggtctttcggtgggatagtggtctctgtttctcctgaactattacccttgtgtagttgtgtcagccacaccggagcaactgatgtataaagccgctcttgtccgat

SEQ ID NO: 27030 - DNA, 1613 bp, Zea mays
  Clone ID: LIB4705-003-H9_FLI
tcgaggccggccgggtctccggcagacgacgtcttctccaacgatgtcgcagatgacgacgctcctaccccaactctcgacgctgctcaacctccatgctcaagctgttgttgtgcccatcatccgagctcttgtatcgctcttcctcgacgtcaactccaccttctacgctcgatgttttattttagttaaggggtaaagggtcgtattcgctagcgtttgagaaggagcatcatccccagccgaacgcacagcaatctggtccaacatccctgcctattcctcaaaggtaggccctgattaaataatccttaactgtctgatcatccatgttgcaacgattctcctgtactgtgatatggtataacaagtagtactgtacgattctcccggggagctcgacgatctagatggagatgacggggtctctccctgtgcccagcgtgcaggccatggtggccgctggtcgtcatgcaccagtgccaccaaggtatctccgtccagatctggccgcggatgtcgtcgttgccgacgacgcgacgaccatccccatcatcgacttccagcgactgctgctggtcgacccagaggaatctgcgcgcctccatgcggcctgccaggactggggcttcttccagctgataaaccacggtgttccggacgatgtgatggaggcgatgaaggccagcacccagtcattcttcgcgcttcctgcggaggccaagcagcagtaccgtcagcaggcaggacagctggaggggtacggccagctgttcgtcgtctccgaggaccagaagctggactgggccgacgtcctctacctcaacacgcagccgcccgagcaccggaacctcagcttctggcctgctggtgagagcttcaggcagacgctggacacctactccgccgccgtcaagcacgtcgccgaccgcctgctgggagccatgtacatgaacctgggcctcctgagcagcatggacatggacccggagcggggtgccgggatacagtcggtgaggatgaactactaccctccctgcgctgaagcggcggacaaggtcctgggcttctctccgcactccgactcggaccttctcaccctcgtcctccaggtcaaccagctccagggcctgcagatcaagaggccgcccgacggcggcggtgcctgggcctggcttcccgtcacgccgctgcagggcgccttcgtcgtcaacgtcggggacgtcctcgagatcttcaccaacgggaggtacaggagcgtcgagcaccgggctctagtcaacgcccacacggagcgcttgtccatcgcggcgttccactctcccagcatccatgccaccatagggccgctgccggagctcctcggggaccaggaggtgcccaagtataagacgctggaccaccaaagcttcattacgctcttcttctccgccaagctccagggcaagagcttcttggaacggatgaagaagctttcgtagagccaatcggacggaccggaaagttaagcaggccgacgtaaagtcggattacatgttatcggttcggccatagcaatatagcacgcatgtatgtccggattaatttggtgaccgacgagactagttttgtcg

SEQ ID NO: 27031 - DNA, 1173 bp, Zea mays
  Clone ID: LIB4705-004-G9_FLI
ctcgaggccggccgggacaaaaaggactcaaaaacaaaaaattcgggtttcccggagagccgcgacggtgcgacgccgaactccctaaccctaagtccctaagcgtaggcggcggggggcggcggtgtgaggcaagctgcacagcaacacgggccacgggcgcggcctccgcctccgcctccacgcttctgctgctaggctgcaagggcggcggcgcggcgcggtgagcggcggacagctggccaggtccagcccagtagtccaggtgacgaggtccgcactccgcaacggttctggcgttctgcagctgaggatagacgagagaggaagtgaggatttatattagtgatttacaaggcaacttgaaagacagcagggttgcatcccacaatgtcagctcccaacagtgatagcaacatgcagcagctagtccctatagcaccaccaggaaaggcttctggtggtgacagtgggaaggagctggttgtggcagatcctgcaggtaagagatcaggaggtgtaaaactgcgagaggatgaggaagacctggaggtgaagctcaggcgcatcatggagaatgtccctgtgcgtgtcagtaacacatcagggtcatctgctggctctggctctggtgatttccaccagtatcggcaaatgaggaggagagagcaggaccgtctagcacgaatggatgcggactaccagaagagaaaagagatagctgagttcgaactgcggagggaggagaggatgaaagcagctgaggagcggacagccaagaagcgcctgaaacggcaaaagaagaaacagcgtaagaaagagaagcgagctaaaactggtgataatggtggtgaagaacctaacagagtggagtcgtctgacgatgacgaaggctcagatgacgatgacaagtccaagcaatgacacgtcaatttcgcacctgaagatgatttcggactctctggttgtctgggcaatgaaacaaacgtctgtacggttgttgtaacaggttacagggcgaatctggtgctgtttctgtaagaggatatgatattctgagcagagatggatagcactagataatttgctgttagtgttcatcattcagagaagtgacctgcgtcagtaccttttgttcaggtctatattatatcagctgccttttttggctcc

SEQ ID NO: 27032 - DNA, 1412 bp, Zea mays
  Clone ID: LIB4705-005-G2_FLI
ctcgaggccggccgggaagagtcaagatacatcagagtagctcattgcatagtttcagtgtgtaattatatatttgtctcctctagtgcagtactagagtctagtctagctagtttagattgagtctgcttgttcatctagcgcgtgttttggggtagctagctagctagacacgcgcacccggacaaacgcacgcagcagacaccaagcaggaatcatcggcggcaggcggagggatggggctgagggagattgagtcgacattgccgccggggttcaggttctatcccagcgacgaggagctggtatgccattacctctacaggaaggtggccaacgagcgctccgtgcagggaacgctggtggaggtcgacctgcacgagcgcgaaccatgggagcttccagcttcagggaccgcaagtacgcgaccgggccgcgcacgaaccgcgccaccaagacgggctactggaaggccaccggcaaggaccgcgaggtgcgcgacccggccgcccgcgccgtcgtcgtcggcatgcggaagacgctcgtcttctaccagggccgtgcccccagcggcgtcaagtcatgctgggtcatgcacgagttccgcctcgactcgccgcgtacgacgacgacgccaccgaaggaggactgggtgctgtgcagggtgttccagaagcggaaagtcgacggcagcgagcaagacaacggcgtctccccctcgccgccggtctttgccagcgcatcgcagtcgcagggggtcgtcctgccgccggaccagccctgcgtggtggacgcgtacgtcgtggtagaccagccgggctcttcttccgtcggcctcgcgccgccgcaggagaacctcggtagcggcctggacgcgttgctgacgaacggagcgatgtggcagtacacctcgtcggtcttcggtcacttgttgccgcaggaggcgaccaactccccgccggtgatggacctaggctccaggggaggaggaggaggaggagactacgggtgcagcttcttctacgacagcagcttcgaggacatggccaacatcgggttccgacaagggtggatgggctgatccaggaccaggaggcacacgtacgtgcgtgcagtcatgcgatatggaatgtgcatttgtgaaggaagtgattgaattgattccattagtagtagcaccctctagtgttgtacagtaggtacgtatagtgtgagattggattattgggaattgttagagtgcacgggcctctcaaatccaaagaagtaacagcggaaagaaaagctagtagctagagcacacatgtatatttgcacaaggtagatggtttgatcaaccgcatgacacggcaattgtatatatctctccacccctactaccatgtttgtaaataaattaatataaatcaatc

SEQ ID NO: 27033 - DNA, 956 bp, Zea mays
  Clone ID: LIB4705-006-A4_FLI
ctcgaggccggccgggaaaaaaaaaaaaaaaaactttcatttcagccatgcccatgagcatcccccgcgcggcgcacctccttgtgctcctctccgttctagccatctccctctcgtcgtgcggcgccgcggcagcgttgccggtctacgacacggacggccacgagctgagcgccgacgcggactactacgtcctcccggcaccgccccgcgggagcggcggcggcggcgggctcaccatggcccccaagggcctgcacccgtgcccgctcttcgtcgcgcaggagacggacccgctccgcaagggcttccccgtgcgcttcgcgccgctgcagcaggaccagggtggcagcgaccgcgccgtgcgcgtctcctccgacgtcggcgtccacttcgccgccgcgacgacgtgcgtgcagaccaccgagtggcacgtctccggcgacggcgacggcgccgcgccgcggtcgggccgtcggctcgtcctcaccggcccggtcctgtcctcgagcccgaacggacgggagaaggtgttccgcgtcgagaagcacagccgcgggtacaagctggtctggtgcgggggctccagcgcgtcgacgtcgtgccaggacctgggcgtgttcagggacgatggggaccgccgcgcgtggctcggcaccaccgagacccaccgggctcatgccgtcgtgttccagaaggatacgaccatgcatgcttgatgcggtgcttcgtatgctcaactcgactctggtttgcaaatagttcgccaaaatagcttaaactccgccaagtcgccaacatagcccgtacgtgaagctaaaaaacagctctgccggtaaagtggagctatgacaaacagactaaattggacccagataaaatcaatagaaaacaagaaatcatgcaagcagaagatccgaggaacaacaatttcttctacttgtttctcatgaacc

SEQ ID NO: 27034 - DNA, 2412 bp, Zea mays
  Clone ID: LIB4705-006-A8_FLI
tcacccgcacccggtcctcctcacgcagctcgtctccctctacgccgccgcgggccgcctcgccgacgcgctccgcgccttccgcgcccacctacccagcgccaacctccacacctacgccggcctcgtgtccgccctcgcgcggccgtacccggacctcgcgttctccctcttctcgggctcgcgccgccagctccgccccagcccccatgtcatctccgccgtgctcgccgcatgcgccggcctccagcctctctgcggacgccaggtccacacgtgcgcggccaaggtcgtaccgcccggcgacgtgttcgtctacaccgggatggtcgacgtgtacgccaagggcggggacatggagtcgtccagaaaggtgtttgatgaaatgctgaaccggggcgcggcgtcgtggaacgcgctcctcgttggttacgccaggtacaagatgtgcctcgaagccctgtcggtgttcagggagttggccgcgcaggggcgggaggtgtctctcgatcaggtgagcgtgtcgagtgtgctcagcgcttgcgctgtggcaggggccctgaactatggtcgccaggtacacgcgtgcgctaccaaggtagggctggagctcagcgcggtttgtgtcagcaacgctcttcttgacatgtacaccaggtgtggatgctcacgagaatcttccgctctgctaaatgctgtgggttgcaaggatgttgtcacctggaacatcatcattcgtagctgcattcatgacaatcggttcaaggaagcttgtgtgctgttccggtccatggtcaggaacggtaccttgccggatgatgtagcctttgctactgtgttgcaggcgtcagcgtgtatgtcggcatgggctataggagcaagcatgcatgcctccgtcgtgaagacagggttcttatacagtgatggcgttgctagctcgctaatcaccatgtattccaaatgtggctgcttggacgatgcacaccgagcatttgtgggggcaaaagatcatctgcatataatgtcctggacggccatgataactgcactgcagcagcatggacatggcatgcaggcaattgatgtatttgagaatatgctagagaatggcattcctccggaccacatcacatttgtgagtgttctctcttcctgtagccacagcggactgttgagcaaggacgcaggtacttgatttcgatgacttgggttcataagatcacaccacggaatgagcactatgcgtgcatggttgacatgtttgggcgagcaggccttctaactgaggcaaagcaattcattcaccagatgggacctaagccagatgcatcagtccttggagcactcctttgggcttgcatgaactgcagggaccttgagatgggtaaggaggtagccaagacgctttttgtgattgagccaggtaataccgggaactatgtcctgcttgctaatatctatgcgtcacatggaagattggaggaggcaaaggaggtgcggaggtggatgatgtttcaggagttaaggaaggaaaagggatgcagtttaatcaacaattgagaaccaaatctgtaccttatgaatacttcagcaaaggtgaggtttctattgtctcaaggatggtacctgcacttgtcaaacataaaagctcgctacctattttatttagacacaattaaggtaataaggcctactggagtttctgcatactcaagggttcatgggcatcccaggctcccagaagtggaatctgcaaggtatggctcattcgaaccatatgcgaagaagtttaattccttattagtgagagcagaagacagaaaatgcagaacagttgtattcctacgcacgtccagccgtgtccagccgtccaggtatctccagctcgccctgggaaacagtgattccttgtttcctaggcgtccaggcagactcagcattcgcttggaagcctagtcgccttttcagcactggtggtcaatatacatgtattcctcgtagtaaccactgctacatgctgaactatacagaaaatgaggaaatagagcagtacagcatctcttgcaagaacttctactgtggtgccatcatgttggatcacatttttttggcagtcagatgagagcctcagggtcaggttaaggttccaagttagttttcttccacattagaccttgtttcgatgcacttgtatcaaactcaattcaagtaaaattataaaccaatccactccaacacacatggatcgaggtagaaaaagtgtatctaagcaaggcatagtgtgtagatgtttatcccttggcaatattcctgtttgagcttctcttcttttatccgtggctactcagagttgtatctgtggtagagataaaggaatatgaaacgtgacatagtgtgtagatgtttatttac

SEQ ID NO: 27035 - DNA, 681 bp, Zea mays
  Clone ID: LIB4717-001-C2_FLI
ccgggctagcctccaccccgtccggcagcagccaaaccctacataggcgccgccgcaggcggccccccgcatcgtcgccaaagatgcagatctttgtgaagactctgacggggaagaccatcactttggaggtggagtcctcggacaccatcgacaatgtgaaggccaagatccaggacaaggagggcatccccccggaccagcagcggctcatcttcgccggcaagcagctcgaggacggtcgcacccttgccgactacaacatccagaaggagtccaccctccacctggtgctccgcctccgcggcggcgccaagaagcgtaagaagaagacgtacaccaagcccaagaagatcaagcacaagcacaagaaggtgaagctctccgtgctgcagttctataaggtggacgacgccacaggcaaggtgacccgcctccgcaaggagtgccccaacacagagtgcggcgcgggcgtcttcatggccaaccacttcgaccgccactactgcggcaagtgcggcctcacctatgtctacaaccagaaggcgtaattgcttgccccgatttgctttatccgccaacctatcaagcattcagatgttggttactcaaattgtatctcatttagatctgtctgaggttgaaacttaaatggagcagtagtatctatcatattggtac

SEQ ID NO: 27036 - DNA, 750 bp, Zea mays
  Clone ID: LIB4717-002-A4_FLI
ccggggcgctgttggtcgtggggtgcgtgctagcctccaccccatccggcagcagccaaaccctacataggcgccgccgcaggcggcccccccgcatcgtcgccaaagatgcagatctttgtgaagactctgacggggaagaccatcactttggaggtggagtcctcggacaccatcgacaatgtgaaggccaagatccaggacaaggagggcatccccccggaccagcagcggctcatcttcgccggcaagcagctcgaggacggtcgcaccctcgccgactacaacatccagaaggagtccacactccacctggtgctccgcctccgcggcggcgccaagaagcgtaagaagaagacgtacaccaagcccaagaagatcaaacacaagcacaagaaggttaagctctccgtgctgcagttctataaggtggacgacaccactagcaaggtgacccgcctccgcaaggagtgccccaacacagagtgcggcgcgggcgtcttcatggccaaccacttcgaccgccactactgcggcaagtgcggcctcacctatgcctacaaccagaaggcgtaattgcttgccccgatttgctttatccgcctaccctatcgaacatccagctgttggttactcgaattgtatctcatgtagatctgtctgaggttgaaacttaaatggagcagtagtatctgtcatattggtacccctgttactgaattgatgtgatgctgagtttaattttgttct

SEQ ID NO: 27037 - DNA, 1797 bp, Zea mays
  Clone ID: LIB4717-002-C2_FLI
ctcgaggccggccggggtctctgggcctgctcgcttcattgcccccgtgctgcctgcgcttttgccagcgcgcgccccaccaccaccggaaaagaaattccccaattctactccacccggcgcgctctccccacgcgcatccggatccgtccgctctgatcgagaagtgagttgatctggactctgtgcctgcctgtgagggcgaggagggcatggacgagttcgagctggaggacaacctcgagttcatcctccagagcatccaggagctgatggaggacccgggggacaacaacgccttcggagacgccaaccagaacgagctcttcgccagcatcgttaactacgaccaggagaacatgctgcccgacgtgtctgcagcggacgttgctgcagggaaggacattcaggggatcccgtgggagaagatgctcttcgggagggataagtaccgggagatgaagatgaagaactacagaaattaccagaatctaagttacgcacgggaggatgctttgcaggagtgcaaacaagtgaagaaggatagtccttactatgatttccactacaacacaaggcgtgctcggccatcaattgtacattttcagctacggaacctagtgtgggcaaccacgaaacatgatgtttatacaatgcatgatcaatcagtgacacactggtcctcactggagcagacaagcactgagctaatcaatgccgatgattgcatcgtcccaaaacagaggggccatggttcacagtcagtggcaatggttcaggtcacaacaatggccgtggatagtaatttattggtagttggtggctttcaaggggagattatatgcaagcgtttggatgatgagggggttgtttacagcacaagggttacagatgatgaaaatgcaatcactaactctttagagatgtatcaggatcccagcggatctagaaggttggtggctgctaacaatgactgctccatcaggatttttgacactgagtactttgacctcctcaagcactatgtcttcccttggtccgtgaatagtgtttctgtgagcccgaatgggaaactctttgctgtcctgggagatcatgaggatggttgtgtggtggatcccaagtgtggcaaggcaattggctctctcaggggtcacttggattactcatttgcatctgcatggcatcctgatggcaatatcgtggcaactgggagtcaagacactacatgcaggctatgggacatcaggaacctatcccaatcagtagctgtgcttggtggaaggatgggctcaattcggtgtgtgaagttctctccagacgggcgcttccttgcaacagcagagcccgtggattttgtccacatgtacgatgcttatgcggactacagcagatctcacgagattgacttgtttggcgagattggaggtttagcattcagccctgacaccgaggccttctatgtgggccttgcggaccagacgtacggaggcatgatcgagttcagcaagaggcaccaacatcattactttaactccttgtggtgataaccacctgagcggaaatttggttgcacagctgttggaccccattgttgcattgtgtgctccagaggagtgcatggtcctacagaggaggatctcatgagtgcatgcagaagtgtataaaattctgggggggtttctttccctgttgctagtaatctgggttttgttgctcgacttgtggaactgaaggcggtagcatatgtatagcctttctgtttctcgacacctaacaatgtacatagtttgtggt

SEQ ID NO: 27038 - DNA, 2486 bp, Zea mays
  Clone ID: LIB4717-003-A4_FLI
gtagctcttccctctgctgctctctctgagcctggcccttgccctcctctccctccgggaaccagccctgctctctatgctcctcttccattcatagcctcggccttcgtcttcctccatggatccgcgctaaatgcattgcgaggttccaaactggtagcacttctccctgctccatctgccgcaagatgtaagcacggcctcacttgacactccgactggccatccagaatataccttcagatcttcctgtctgcgaaaagcgacgcccttttggcccgggcaatggaggagagcttcgtgcccttgcggggcatcaaggacgacctccacgggaggctcgcctgctacaagcaggactggaccggagggttccgtgccggtatcaggatcctggcgcctaccacttacatattcttcgcgtccgcgataccggtgatatcgttcggggagcaattggagaggaacactgatggagtcctcacagcagtgcagacgttggcgtccactgccctgtgcggcataatccactccattgtaggagggcagcccctgctgatcctgggagttgccgaaccgacggtactcatgtacacattcatgttcaactttgccaaggacaggcccgacctcggacggaatctgttcctggcctggaccggttgggtttgtgtgtggactgctatcctgctcttcttgctggccatactaggcgcgtgctccatcatcaaccggttcacccgcatcgctggcgagctgttcgggcttctgattgctatgctcttcatgcagcaggctatcaagggacttgtcgacgagttccgcgttcctgagagggaaaacacaaaggcactagagtttgttccatcatggcggttcgccaatgggatgttcgcaattgtcttgtcgtttggccttttactcactgccctcaggagcaggaaggcacgatcatggcgctatgggacaggttggctgcgtggcttcatcgctgactatggtgttccactgatggtgctagtgtggactggagtgtcttacataccttatggaaatgtaccaaaaggaattccgcggcgcctttttagccctaatccatggtcccctggcgcatacgacaattggacagtcgtcaaggacatgacacaggttccactcctctatatccttggtgcattcataccagcaacgatgatcgctgttctctactacttcgatcacagcgttgcgtctcagcttgctcagcagaaagagttcaacttgaggaagcctccatccttccactacgatttgcttctcttaggtttcctgacgttagtgtgtggccttattggtatccctccatcaaatggtgtcattccacaatcacccatgcatacgaagagtttggctactctcaagcaccagatccttcgtaaccggctagtagccaccgcacggaagggcatgagccagaatgcaagcctgagccaactgtatggcagcatgcaggatgcttatcagcagatgcagacaccactggtttatcagcaacagtctgtcagaagaggcttaaatgagctcaaggactcaacagtccagctagcttcgagtatgggtaacattgatgcaccagttgatgagacagtctttgacatagagaaagaaattgatgatctgctgcccatcgaggtcaaggagcagcgtttgagcaaccttctacaggcttcgatggtggtgggctgtgtcgctgctatgcccctgctcaagaagatccctacgtctgtcctctggggctattttgccttcatggccattgagagcttgcctggtaaccagttttgggagaggatcttgctcctcttcactgctcccagcagaagatacaaggtgcttgaagagtaccacacgacgttcgtcgagacagtgccattcaagacaatagccatgttcacagtgttccagacagcttacctgttggtctgctttggaatcacatggattccaatagccggagttcttttccctctcatgatcatgctcctggttccagtcaggcagtacatcctccctaagctcttcaaaggtgcacatctaactgacctggatgcagctgaacacgaggaatcaccagctataccattcagccttgctgcgcaagacatcgatgtcgcattgggacgcagccagagtgcagaaatcctagacgacatggtcacgagaagccggggtgagatcaaacgcctgaacagcccgaagatcaccagctcaggtggcacgcctgtggcagaactgaaaggcatccgcagcccatccatttctgaaaaagcatacagccctcgtctcactgagctccagcatgagcgcagccctctgggagggagaagcaggcctaggacgccatccaagttgggtgaaggctcggcaccaaagtgaataaagcaatgatgcattgcttaagctatgcaactactgggttactggcatcaattatataagtgattttg

SEQ ID NO: 27039 - DNA, 808 bp, Zea mays
  Clone ID: LIB4717-003-E11_FLI
ctcgaggccggccggggtactgctggagagagagagagagagagagagagagagagagagagagagagagagagagagagagacgcctccgccgctggaatcaggcgatgggagacgcggacgcctacgcgaagcgggtgctactcaccgcagctggcgacaccgtctcgcgggggatcgcctctaccctcaccaagcacggctgcagattggtcttgttgggcgacgagggcgcgctggccgcgacggaggaggaggcgcggcgctgcggggtagggggcggatgcgtcgaattggtcgggctggacttcaaggcgtgcggtgaggctgctgccgacgcggcggtggatcgggcctggcgctgcttcgccggactggatgccttcgtcaactgctactcctacgagggcgatcgcaaagcggttccaggatacaaaatctggtggatctattgtgttcttgactcagattattggtgctgagagaggattgtatccaggcgctgcagcatatggcacaagcttgggagccatccaccagttggtccgtctgtgtgcgatggagcttgggaaacacaagataagggttaacgccgcctgccgcggcctgcatctgcaagacaagttccccgtgtccgtgggcaaggagaaggcggagaaggcaacggcggaggtgatgccctgcggagatggctggatccggagaaggacctggcgtcgacggtgctgtacctggtcggcgacgagtcccggtacatgacgggcacaacaatattcgtggacggtgctcagtccatcgtgcggccctc

SEQ ID NO: 27040 - DNA, 994 bp, Zea mays
  Clone ID: LIB4717-003-H11_FLI
ctcgaggccggccgggccacacctccttatcacaacgcgagcagcagttgcattggaggcgaggaggagccacgccggggctcaaggaatggccgctctccgccacctcgccgccggccccacctgccaccaccaccaccaccacggcgtcgcggcagccaccgcctccctccggctccatcgcctccccctccccttccgcccccttcgctcccgctccggctccttcaccagggtttatgcgatctccagcaatgacatcagggtcggcaccaacgtcgaggtcgacggcgcgccatggaaagttctagagttcctccacgtcaagcctggaaaaggcgctgctttcgtcaggacaaaactgcgtaactatgtaactggcaacacggtcgagaaaaccttccgtgctggaagtacgctacaggaaccatccctttcaaaggagaccaagcaatttacatacaaggatggctcccagttcgtgttcatggatctgacaacatttgaagaaagtcggttaaatgaagcagatgtcggtgacaaacaaaaatggctgaaagaggggatggactgcaatttgttgtactggaatgggaagatcattgatttcgacctcccaatcactgtgaggctgactgtaactgatactgacccaggggcaagtgatagtgcgcaaggaggaacaaagcctgcaaccctggaaactggagctgttgtcactgtgccctcttttgtgaacgtaggcgatgatattctggtggattcaagaactgggcagtatatgaatcgagcataacaaattgaagaggatttcggatttgaggagagtactgcttttttgtttgaccattttagtcccattcacttgtacaaacgccctgggtctttggccccaggaaatttacatttctgctgcatgtgaatcctcactctgattataaccatgtacatctttggtttccagatataagggaaattgtgttcagatttttag

SEQ ID NO: 27041 - DNA, 1469 bp, Zea mays
  Clone ID: LIB4719-001-G2_FLI
accgacccaacccagatccattcctgtcccgtgtttaccttcactcagcggcgctgcccctgtcgtcgtcttcccgctcgcttccgagcgccgccctccccttctttccccatcgcctcccttccaccccctctcatctccgtctcccgcgccgacgacttaagtagggtttggccttagggttcaggcaagatgggtgagcgcaaagtgctgaacaagtattacccgccggacttcgacccgtcgaagatcccgcggcggcggcagcccaagaaccagcagatcaaggtgcgcatgatgctccccatgagcatccagtgcggtacctgcgggacatacatatacaagggcactaagttcaactccagaaaggaggacgtcgtcggagagacatacttgggaatacaaatatttaggttttacttcaagtgcactaaatgctctgctgagatcacattcaaaacggaccctcagaattctgactacacagtggaatcgggggctagtcgcaattttgaaccatggcgtgcacaggacgaggcagcagacaaagaaaagattaaacgagatgctgaggagatgggtgatgcaatgaaagcgttggaaaatagagcaatggattcaaagcaggatatggacatccttgcagctttggaagagatgcggtccatgaagtctagacatgctggtgtctctgttgaccagatgcttgaaattttgaagcgttcagctcacgagaaggaggaaaaagcaattgcagagcttgatgaagaagatgaggaacttataaaatcaatcactttccgaaactctggattctatgtaaagcggatagaagatgacgacgacgatgatgatgaggatttggctcctggccaatcaagtagaacaataaagatcaatgaatcttctgaatctgtgactaagccaacagatgttttaagcaaaaataacggatcagaggttgccaataaagaagggagcaagagctggatgcccaaatttattgtgaaaccgaagtctgcaagcgcagatcctcataagagacagaagattgaatccacggctgtccaagacaccgggaaaggccaagatgatgaacaaaaaagtgaacctgcgaagcaaaccaatgttctccagtccctctgccagaactacgatagtgatgatagtgaatgaatgaggacaccgccctcttgaagccataacagtcctggttgccaatgctgtattataccagaggatgttaacacatgtagttccccaaaccactggcattgtaccatcatggcacatgatatttatcacaaatctctgattgtcaatgggccaactacaagtattggctcttacaaatatgggctatccagatagggctgcgttattggataaaatgatagttgcagaaagtcagatctgcggtttgtacatcaaacagccatacacaagcttgtttatgcagcatcact

SEQ ID NO: 27042 - DNA, 1011 bp, Zea mays
  Clone ID: LIB4719-002-C1_FLI
ctcgaggccggccgggaggcaactaagacaaagtggcgtactcttctctgtactagctttcttcttcctcctcctcttctcctcccaaacagactggatttcatcaagataatcctgaaactggagccaacaagcagacagagaaagaagagcaagaagaccggctcccagccgatacaagggctcaaccggacaggcaagagctgccggctgcgctgggtcaactacctccaccctggcctcaagcgtgggcgcatgtctccccatgaagagcgactcatcctagagctgcacgctcggtggggaaacaggtggtccaggatagcacgccgcttgccagggcgcactgacaatgagatcaagaactactggaggacacacatgagaaagaaggcacaggagaggaagaggaacatgtctccatcgtcgtcctcgtcttcgctgacttgccagtcaggctacccagatactccatcaaccattggagttgagggacaggagcttcatggtggcagtggctgcatcacaagcatcctgaagggcacccctccggacatggatggctatcccatggaccagatatggatggaaattgaggcgccacagatgccctcggaggagagctttgttggggggaaccataatgtgtgcagcagccttgccaccccgctgccaccaccaactgtctgggaatactacccagatgcctgctggaaggttgacgatgagatcaagatggcaacacaatatcaatttggttatagtgaaggagttgggccctgcttctgatgccataaatattgggtcagattactaagttatacacctacctagcagaagtgaagtgcttttgtagaaacaagctttagcatggatctgaatatttatctccgcgcttagaattgcaggtctatggatctatgcatggttgctatgtatctatctagtgtgcaagacaagattatcttaatttgtccttgatgctatggaatacaagggcaaaggtactac

SEQ ID NO: 27043 - DNA, 1227 bp, Zea mays
  Clone ID: LIB4719-004-C11_FLI
tgatctctctctctctctctctctcttagtgccgctctttggaaccctggctactgctgttaaatggctcaaccttcagtcattctagcaactgcaagttatgatcacacaatcagattttgggaagccaagagcggtcgctgttaccgcactattcagtatccagactctcaagttaatcgccttgagataacccctgacaagcggttcttagctgctgctggcaatcctcatatccgcctttttgacgtcaactcaaatagccctcagccggtaattagctatgattcacatactagcaatgcgatggctgtgggatttcattgtgatggtaactggatgtactcaggctctgaagatggtactgttagaatttgggatttacggactggcacttgccaacgagaatatgaaagtcgtgctgcagttaacactgtagttctgcacccaaatcagaaagagctaatatctggtgatcagaatggaaacatacgtgtatgggatttggctgctaactcatgcagctgtgagttggtgccagaagttgatactgctgtaagatctctgacagtcatgtgggatgggagtatggtggttgctgcaaataaccgtgggacatgttacgtttggcgcctgcttaagggtactcagacaattacctgcttcgaacctctgcacaaactgcaagcccatgatggctacattctgaagtgcctgctttcacccgaattttgcgatccaaacaggtatcttgccacagcatcatctgaccgcactgtaaagatttggaatgtcgatagcttcaagttggaaagaactttagtcggccatcagcgttgggtttgggactgtgtcttctccgtcgatggtgcttatctgataacagcatcttctgacactacagcgaggctatggacgatgtcgactggagaggccatcagggtgtaccagggtcatcacaaggccaccgtgtgctgtgctctccatgatggagcagaatcagcgccctcataagcatgttgtgactgcttttctgtacatacgttagattgcagaactctttcactcttgtaaacttgagacctagcaagttgttaacgcaagcctctggggttgcgtacaaataatttgcgtgctgttggtggatgtttaaacctgctatgttttatggtgtgaatgctataaaaagacaacatgttcgttcaatagttaaagggtggtttgagc

SEQ ID NO: 27044 - DNA, 677 bp, Zea mays
  Clone ID: LIB4719-004-C9_FLI
ccgggaacggtgcccgtatctcctttgtcctggctggatccgtataatctcctttgtcctccccctcccctcgttcccgtctccctcgcggtcctctcaaccgtacgccgccgccttgctcgcaccgtcgacagtgcctcagtccagatcgaccctccctctacccagatcgggttccagttggcctaccgcccccgccgccctactacaggtgccgaggccttcaccggcgaagagcgcccgccagacaaatggaactgggtgataaggcggtcggttttctgctgactctgacaagcttaaccttatttacatactacacattctgggtcatcattttgccatttgtcgacagcgaccactttgtgcacaagtacttcctgcctcaagagtatgcgattttgataccggtactggctggcgtggttctcctttcgttcttgagcgtgtttgtgggccttgtgatgctcaaatcgaagaagaagaagatggcttgatcgggtttgccatgtacactgctgtgccattcacttagtgatgaaatgcatgagttcgcggtatctaattgctagaagctcggttctgtaatcagttccgtcatactttaaaggtctttactttgtcatctggatgtgtgtttttttattctggtggtcaattaaaagcagtgttcatcc

SEQ ID NO: 27045 - DNA, 964 bp, Zea mays
  Clone ID: LIB4719-004-F1_FLI
ctcgaggccggccgggaagctgaaccataaacgcaggcccctcgacgcagattccgcgctcaggactcaggagcattcgagaagccgaagaaaattcgaagacgaggagcagctacactgcggacggacttcgggcatggagggccagttccagtttggcaaggaggaggtcatccaagcatggtacatggatgacagtgaagaggaccagaggcttcctcatcatcgcgagcccaaagaattcattcctctcgacaaactttccgaactaggaatattaagctggcgcctaaatgctgatgattgggagaatgatgagaacctcaagaaaattcgtgaagccaggggttactcttacatggacatttgtgatgtgtgcccagagaagttgccaaattacgaggctaagataaagaatttctttgaagaacacttgcatactgatgaagagatacgatattgccttgagggtagcggctactttgatgtgagggaccaagatgatcagtggatccgtgtagcggtaaagaaaggaggcatgatcgttttgcctgcaggaatgtatcaccgctttacgttggatagtgacaactacatcaaggcaatgcgtctattcgtgggcgagcctgtctggacaccatacaatcgtccgcatgaccatctcccggctaggaaggagtacgtcgagaaaatcatcaaccgaggtggaaaccaagccgtcgaagctcgttgagcgtgtccactctacatgtcctcctgccgtctcagcctcttgtgttttacaccctacaactcctagtaccgccgaataagatttgctatctgcaatgtgctcatgccaccaccgtgtgtgccagttaacagtttgcacggaacccgcttaaaatctttcctagatattttgttatacgaatgaatgacatgtggtgtttgataaatgatgaaacgatgatggttcaaatcc

SEQ ID NO: 27046 - DNA, 762 bp, Zea mays
  Clone ID: LIB4719-006-B2_FLI
tccggttttccggcctcccattcctcgcgcggcgaccacccgattcgaagcgtgcggagagaccgaagaagcgggagagatggctcgtaccaagcagactgctcgcaagtccacgggagggaaggctcccaggaagcagcttgccaccaaggctgcccgtaagtttgcccccaccactggttgagtgaagaagcctcaccgctaccgccctggaactgttgccctccgtgagatccgcaagtatcagaagagcactgagctgctgatcaggaagctgcccttccagaggctcgtcagggaaattgcacaggacttcaaaactgatttgcgtttccagagccatgcggtgcttgccctccaggaggctgctgaggcataccttgttggcctgtttgaggacaccaacctgtgcgccatccatgctaagcgtgtgaccatcatgccaaaggacattcagctggcaaggaggatccgcggcgagagggcctaatcgccacctcaaacatcgtgacaaaaacatgaagtcctggggttattgttaatctggtgccattgtaaggacatatgagtagggtttgttttgtggatcgcaagtttctcttctgctactgttgctgctacctttgctggtgttattgctagggtcgaatacttaagttaactatgcgctgacagtctggactagcagtgttatgtgcgctgctggaccttgcgcgcaatgctgtggccgatttgttcgttaatgtcaagaattgtgttacg

SEQ ID NO: 27047 - DNA, 1593 bp, Zea mays
  Clone ID: LIB4719-006-F12_FLI
ccgggacacagacacacaaacacaagtcgtcgtaggcagcgagcgtctctcctctcccacgcatcgcgccaaggaagagagagagatcgccgctccccttctcggcgtcggtggtgcgggtgccctccctcctcgagcgagatctgtctggtcacagatctatctgacaaaatggtgaagatctgctgcatcggtgctggctatgtcggtggcccaaccatggccgtcattgccctcaagtgcccagacattgaggtcgtcgtcgttgacatctccaagccccgcattgaggcctggaacagtgacaccctgccaatctacgagcctggtctcgatgatgttgtgaagcagtgcaggggcaggaacctcttcttcagcactgatgttgagaagcacgtcgctgaggctgacattatctttgtctcggtgaacacccccaccaagacccgtgggcttggagctggcaaggctgccgacctcacctactgggagagcgctgcccgcatgattgcggatgtctccaagtctgacaagattgttgttgagaagtccactgtccctgtcaagaccgctgaggctattgagaagatcttgacccacaacagcaaggacacgaggattggccccaagttcctgaacgccagtgttgggttcggtgggtcttgcttccagaaggacatcctgaacctggtgtacatctgcgagtgcaatggcctgcccgaggtggccaactactggaagcaggtgatcaagatcaacgactaccagaagagccggttcgtgaaccgcgtcgtgtcgtccatgttcaacaccgttgccggcaagaagatcgccgtcctcggcttcgccttcaagaaggacaccggcgacaccagggagaccccggccatcgatgtctgcaagggcctgctgggtgacaaggcccagatcagcatctacgacccccaggtgacggaggaccagatccagcgggacctagccatgaacaagttcgactgggaccacccgatgcacctgcagccgacgagcccggcggccgtgaagcaggtgagctgcgtgtgggacgcgtacgaggccaccaagggcgcccacgggctgtgcatcctgaccgagtgggacgagttcaagaccctggactaccagaagatcttcgacaacatgcagaagcccgccttcgtcttcgacggccgcaacatcgtcgactccgagaagctgagggagatcggcttcatcgtctactccatcggcaagccgctcgacgcctggctcaaggacatgcccgcggtcgcctaatcccacccccctcacccatggattggattccgggaaggaagaggagagaagctggttgaccgttctttattacagtttgtttttgcaggctacgctaccgattttctcttgtgtcaggcataaaaaaaggttggacgggctgctagtattccctgctgtttggtgttttcgtatcggaggacgtctgtagatgtacaattcctcaggccccttgtgttcggcttgaggaagtttccgttgtaccctggacctgctatagccggttgattcttcaattgtattcctaaaagttactacacg

SEQ ID NO: 27048 - DNA, 856 bp, Zea mays
  Clone ID: LIB4719-007-A4_FLI
atttcgaagcccaccgaattccctgcgattcctctcccctcgcctcctcgtctccccctaggggatcgtcggagaggaatcgcaaagagggccgtctcatccgagttaaggaagccatggagcacaaggaggctgggtgccaggcccccgagggacccatcctctgcatcaataactgtggcttcttcggcagcgcggcgaccatgaacatgtgctctaagtgccacaaggagatgataacgaagcaggatcaggccaagctggctgcctcctctatcgacagcatcgtgaacggcagcgacgccgtcatggagccggttgttgctggcagcaacacggtagtagctgttgcccaagtcgagttgcagacaatgaacgtgcagcagcccgctgatgttgccggacccagcgagggggtggcggcgatctccaaaggggggaagatagggccgaaccggtgcagcgcctgcaggaagagggttgggctcacgggattcaactgccggtgtgggaacttgtactgcgcgctccaccgctactccgacaagcacggctgcaagttcgactaccggactgctgccagggacgccattgccaaggctaatccggtggtgaaggcagacaagctcgacaagatctagggggggttcctacggttggtgtcaggaagattgtaaaccgcggtaactcgtcatgcggaactgctgccttgccccccgcgcctttctcttccatgtttgctgctacaatcttgttgttgggcattgcagtgcacggtgcacacttgtgtagcccgcctccgagaattctcctgcctctgcatctggtcagttcaaaaatgatttgcatgttggcg

SEQ ID NO: 27049 - DNA, 803 bp, Zea mays
  Clone ID: LIB4719-008-E5_FLI
aattccttccaactccctcgtcccaccaagccaccacgcacctactcagtacttcctcccgacttcactaccctcccactcccaacctccgccctccacacccaccaacgatcgacccacctcgcgatctccgccacccgcctcctccaccccgacgaatcgacgatgatgcggggcgacgagtaccggtaccaacagcagcagcagcacggccccggcggcggcgcgccgcacggcctgatcatggcggtggtggcggggctggtggtggcgggcccgctgttcctgggcgacggcggcgaggcggtcacctccgccgtggcggacctgctcggccccacgggcctgctcctgctccccgtcggccccgtcctcgtcatccgcgtcctctcctccgaccgcggcgccgccgcgctcgccggcgccctctccctcggcggctccccggactccgtgcaccgcgtcggcggctcgcccgtcggggtcgcgctcgcgctcgccctcatcgccgccctcctctactacaggtcggcgctattcggcggcggcggcggcgacgacgagtagacagcggctggctgtggcttctgcgctgtgcggtgcgttgcggtgcggctggtcggtccacacgacgccggctcgctaaactgtgcgcgcggcatcctgctgctgctgccgtcgtctcgtctggatttggaaacgccaacctcctgcgctacctaccttccttgcttgaatgtttcggtagtttagccaagattttctatttaattttgttaattaataccaacaacgctgaacag

SEQ ID NO: 27050 - DNA, 1176 bp, Zea mays
  Clone ID: LIB4719-009-E11_FLI
ctcgaggccggccgggcctgccggcatgtgcagtccgcgccctcccctcggccggatcctccgcctcgccgtcgccgtcgcggcctgcgcctgctttcctagccccgtctccggcatccggaagggcattggctttattcaaccaattgtgtgcagaagcactgttcaggggcggcatctgatctctgatgataatggttatgtatgttctgcactttcaatcaatccatggtctcactgctgcccaacaacaggggaccgcttttcctgccagggctgcgaacttgatttacagtgctgcaattcatatgaatattgtgtttctttctgtttgaatccttctaagatcaagaaagaagacgtgctgaagctgaaggtagctaagccagttactgctggaacatacacaaatgttttcgatttctgcatgggacgatgccgccatagctctgcaagtgtggttcatgaaaatgcctatgccagtgatttccatcactgtttttcagtgcaacaaaattcatcaggatcaactgagtctagttctgtatcaaagttgttgggcattaacgttgtagtaggaaggcccagggaatcttgcagcttggtgtgcaaagtaagaggacagtcctgtgttccaagcaggctctctgtgttgaacaaatgtgagataatccaggagcatgcttatacatgcagatggatgagcggctcacatgtgatggttcgcaccatcatacccggcggctctgtccatgcgcctgagaaggggaaatgaatgtgacactcataagacagcagaggggaaacaagtggaggcgataagctgataaccgatggttctccatcacacccccatgacgaacaacctctccgcgcatcggttgcgggtttcctcaacaagaacgccctactctcctgtttctgggaaggattatggatgcaaaatgaaatggagtgcctgcaaagatctgctccagttcttgagaggcgtcgtggatgcagaaggagatgcaatgcaatacctttcaaatccttgcatggtatctggtaggattttgcatgctgaatgaaaatgcacgcaggcgattccatgagcctttcgtgcatgttttgaaacacctgaaccaattatatatattcgtaatatattgcacaagcttccatgcatgttttaag

SEQ ID NO: 27051 - DNA, 991 bp, Zea mays
  Clone ID: LIB4719-010-D1_FLI
ctcgaggccggccgaaccccttcgcgaaaagaagaaaagaacggtggtcgcctacccgatcggatcccaaaattctccacaaccccatggcggcgagtttgtggcgggcggtgatgggcaccggcgcggcgtccacgaacaccaccgactcctcgggcggcggcgttgagttctggcgcgccccggagcgcgtgggttggctgaccaagcaaggcgagtatatcaagacatggcggcggcggtggttcgtgctcaagcaggggcggctcttccggttcaaggaatcgaccgtcacgcgcgcttccgtgccccgcggtgtcatccctgtcgcctcctgcctcaccgtcaagggcgccgaggacgtcctcaaccgaccctacgccttcgagctctccacgccgcgcgagaccatgtacttcattgctgacaccgagaaggagaaggaggagtggatcaactccatcgggcgctccatcgtccagcactcccgctccgtcaccgacgccgaggtcgtcgactacgacagccgccctggcgacaaatgattgatttgtgagccggtcacacctgttactctgcagcgtctctatgctactttatctctgcagcgtctctatgataattagtgcctgtttggtttgtgctaattatgtcacgctttgcctaatgttagtcgtttcgattgaatagtcaaagtgtggtaagttaggacatgtttggtttgatgactaaattatcacactttgtctaacttttatgtttaagattagttcttcaattcgaacgactaagcttagacaaagtgtggcgcagttagccacaaaccaaacaggtctttagtcaccgaaccaaacaagcccttagttaaacaggtttttagtcaccgaaccaaacaagcccttagtttcacacttgttattgttgttttgtggatgtatgatctgtgtatttgtataatattttggtcattggggaataagttcggcatcgg

SEQ ID NO: 27052 - DNA, 1425 bp, Zea mays
  Clone ID: LIB4719-010-G4_FLI
ggccggccgggattttcgttttatagtatactacagtatagagcccattagacacagtcccgcaaatgttgcgagcggcggcgtcgagttgcgcccgcggcgccgtccggcggctgtcgtcgtctgcggtgatggaggcttcaccagtcgccgtggggtcgcggtgtcagtctctcctcgacgagggtgactggtcgtaccatcgggagtggtggggcaaggaggacggccccggcgagggcgtgcagaccgtcttccgccgccactccgagtgcggcaacggcgtcgtctccgtctccgcctaccctgcttcccttccggctagtgagcattggccagccatggagagatggcttcaagagagtaattcaagactatacccagaatcagccagctctgaccagtttaaggtactaggctaccagtggcgagtgatgcgttttaatgaccatacacggcaaagcactgcaaaagtgatgacatgttataggacttcgggtcagagatcattattcttgatgcagcaaccacatgttttagctgttccttatgtcaagagtatggtatcagcaggattgacagcgctctcatgttcttcgtatgatctaccacaagcagcatctggacagaacactatgaaaattctgtgcatcggccatggtggcggcagcttaccattgtttttggctagcaagttcagaggtgctaccatccacattgtggaaatcgatccggtggttgtttcggcatcagttgaatccatgggtttccccacgtcacccgttaataaaggcttatcccccgagtccatgctaccttccgacgccgatgacctattatggggaggcatacacgaccgcatcttcctgcacacagcagacgccgaggattttattggcagcgacggcaacgagtatgacatcgtcttcatcgacgcttacgacggagacgacgtgtttcctcgcaagctctgggacgtggacggggcgttcatgaagaacctagagaagagagtgcaccccgtccacggcaccgtggtcgtgaacctgcactccgactcagactccggggcagaaggcaacgccgacttccagagcgcgcttcccatgggcaggcacgtctcccaggtctgcagggcttacatgcagcacttcggggtggccttcacggccgcggtcccgtggctctgcaacatcacgctcgtcgcctgccgcgccggcgggatggcgggcggcgcgcgccgggggctgagccgcagggatctcgtccttggcaagcttctgtcgacgtccgacacggtggagcgcgcgctgggcctgccgttcccgtgtctgccctacatcaagaacggcttcacgatggttcactgacttgcatgggttttctgtggaatttggttattttgaacggtatattttggacttt

SEQ ID NO: 27053 - DNA, 1337 bp, Zea mays
  Clone ID: LIB4719-011-A1_FLI
tcgaggccggccgggacacttccagatgggccccatccacctcgatgaaacaaaagtatgttctgtctgccaggtaggtcccgccggaacggatcccctgcttcttctaccgaaatcgttgcttccgacgcaccagggccgcgcgccgccggcgaccttgccgtggcccttctacaaaaccgacccgcgccggagctccgccgtcggatgtggcggagacggcgtcaatggcgtcctcctctgctgccgagtccagctcccgcctctctgatcgagcgaggaggtcggcgctgggactcagattcatggtgctcctgatgcacgtgctgttcgttggcgctgtcttcatcctcgatccgaccctcgactggcgaatccacggggagccgtggtatatagggttgtatggagtgcttgttctgctcacgctagtgcaatacttctatacagctggctcatgtccagggtatgttattgatgtaatgagagctggttccatgatgcatgcaaccttcgtcaacactgctgctctttcaaagcagtcaaattcaagaaatggaaacataaattctccgacgagtcgtgctcaactacagaaacttagcacgatgactcctacatcttcatgggcacagatggttatggatctttatcctccagggtcaagcagcagggattggacttgcacttactgcaggattgttcaggtggtacatatttgaagaaacaatcttgtgtatctggactgctgctctctgcatcgagtcattgtgtttagatgtggacaaggcctggtggaaggactttgttggtgttatcctgttggcagcgcttatccttatcctgatattcctactactattgtggttatttcattcgtacattgctctaacaaatcaaacaacctacgaaattgccagaaggaagcgaatattctacctaaggggagtccctgaaagagttcttccattcagcaaaggcatatgcagaaatctctacgatttctgctgttctagccagaagggatatattctggaagctgtgcccccaagtgaagagctggaagctagagctgcccgttacacgtgccgagatgtcatttgctgtcgttgctgctgataggttgtaccatagcattctgcccgtatagcccagttgcgctgttctctgttcaaggttaagttaatggaagcaaattttagtgacctgcgaccgttagatgcccccagagttcattatttgtgcatagtcatttgtacatttcactcagaaaaatgtgcgctctgagatccagttgttcacattctgtatggctttgaattcaaataggttttcag

SEQ ID NO: 27054 - DNA, 1872 bp, Zea mays
  Clone ID: LIB4719-011-D3_FLI
aatcgaggccggccgggacaacagtaccacgcgacgtcaaatacgggcacaactcgtgaacgacggcggcgcctagcggcgacatcgtccccctcgactcctcctccatccccgacgcggcggcgccagcctgcagattagcttattaccaccatgggtaaaagaaagcggtcgccttgtcaacgagataaccataatgattctctagccagcaaaataatgagaactagaatcccagatcttcctgaggacatttggtctcatgtacattccctaatgccaatgcgtgatgctggccgtgctgcttgcctatctcgtgcctttttacgttcctggagacatcatcctaatcttatctttaataaggatacgattggcatgaagaaaaattcatatggagagaatttccaccacaaaattagccgcattctcaggaatcactgtggcattagtttgaaaacattcaagcttgactacagtggcatgtgtgggttcgatggaactagttatcttgacagttggcttcaggctgctcttaatccagggattgaagaagtcaccctctggttgttccatacaaggagaatatatgaattcccatgctcacttttatctgatggggttcgaaattcacttcggtaccttaaacttcgttgttgtgctctccgtcccacagttgaacttgcccccatgagaagcctaacaagtttacatttgtcctttgtgagcattaaatggaatgggttaaagcgcctcctttccaactcccttgctctggaggaattagagctagtatgttgtgacaagatcgtttgcctcaagataccttctgccctgcagcgtctcaacagccttaatatttttggatgctcggccctcaaagtgctagagagcaaagctccaaatctctctagtctttctctttcagattttggaggcgggctagtcttctcacttgtgaaaacattgcaaatgaagaaactaatcactgaaagtactgtctatgatgctcgtaccaggctgccatccattatgcccaatcttgaaactcttgtcataaactcatatcaacaggttgttgatgcaccaatgctgcctaccaaattcctctgtcttaagcacctgaccgttcgcttgtcatcaggaacaaccattacccaggcatttgactatttctctttggtttctttccttgatgcgtctccttccttggagacttttatattaaatgtgagtgggaaaggcatgatccatgaatcgatttctgcgcatccacaattgaggcacacacctgagcaccaccatggccacctcaggagtgtgaagatatgtggtttcagctctgagaaaagcttatttgaactaacacgttatattcttgagaatgcggtgtcactgaaatttcttacactggacaccttttatggggatcggtgtggtcagggtaagtgtacaagttgtttacccacgcctgatgtttttatggatgtttccaaagcgatctcaggtatcaagacatacatcgagaacaaagttccatccacagttaaactaactgttctggagccttgcagccggtgccatgttagaagagtaatttagacaccatcctagtcatgctacgtcacttccatttaatttaatttgagaagaatcatgcttgtttcctggattatttatagttgtgtcccgatgcacgcaaatttaatctctgatgatggaccgtgcttgtgtttcctgaattaatacatgccaactgtttagttttgtagtatggcatgtggatttatttaagacaagttgtcaaatcttgtgtattcggtccgatgctgatatgttaattgtagtgtggctgtgctgtggacttgagag

SEQ ID NO: 27055 - DNA, 497 bp, Zea mays
  Clone ID: LIB4719-011-F9_FLI
ggatttaggtgacactacaggtgccgtgccgaggccttcaccggcgaagagcgcccgccagacaaatggaactgggtgataaggcggtcggttttctgctgactctgacaagcttaaccttatttacatactacacattctgggtcatcattttgccatttgtcgacagcgaccactttgtgcacaagtacttcctgcctcaagagtatgcgcttttgataccagtactggccggcgtggttctcctttcgttcttgagcatgtttgtgggccttgtgatgctcaaatcgaagaagaagaagaagacggcttgatcgggtttgccatgtacactgctgtgtcattcacttagtgtgatgaaatgcatgagttcgcagtatctaattgctagaagctcggttctgtaatcagttccgtcatactttaaaggtctttactttgtcatctggatgtgtgtgtttttttattctggtggtcaattaaaagcagtgttcaac

SEQ ID NO: 27056 - DNA, 1399 bp, Zea mays
  Clone ID: LIB4719-012-H4_FLI
ctcgaggccggccgggttttcactctagaccgaaatcggagcgcccgataccataccaatagcagcagagcagtagcagcacagctccctcccccgtcctctccaaatctcgccggattccgtccaccgccaagccctcgcatctgccgcaggttcgcgtctgtgcccgagcgtgttgcactgccggtggtgttggtggtggttggcggagttgccgccgagggtcggtcatggactacgggccctctgacagcagcggaactgatgatgatcttccacaacttccacataggagtatcagaggcagcggacgtgttagtggtaatgggagaactattgttcctgccggttcatatgctagagcaccaactgacatggaagcacaaattcaacaacttgagcaagaagcatattgttcagtccttcgtgcattcaaagcccagtctgatgccattacatgggagaaggaaggtctcatgactgaacttaggaaggaactaagagtatctgacaaagcacacagggagctgttaaataaagtcaacaacgataatattatatgtagcataagggaatggagatcaacaggagggcttcaagcaagcatgtccaataacccacaaccgattcatgaccctgttccaagtcctaccacctctggccgtaagaggcaaaagacatctcaatctgttcctgctttacctgcacctcctgcaatgcattcacaacagctggctacaccaacacagccatcgtcttcaactgctaggaaagcagtacccccagtccctaaaggcaaaaagacgaaaccaggtcagaaggtaccaggtggctctgcagccaagcctatgccatcttcagcaggtcctagtggaagaggaccacacatgaataggaattttccaggtggttctgctcctgaagctcaagctcagaatgtcgatccattggttggtcgtaaagtgatgagccggtggcctgaagataatagtttttatgaagcagtcatatctgattataatgctgaaacgggcctttatgtgctggtttatgacattaatacggcaaatgaaacctgggagtgggttgatcttaaagagatgggacctgaagacataagatggaaagaggatgactctgggatagaccctgtggtgtatctgcgcagccgaggtgccccaagtagtggggtcaggaagccaacaggtcgcggtgggcccatgccaggttctggaagaggaagaggattaccgaagaacatgtctaggaaagattttccacctccacaaaatggtgttggcaagagaagttccgatgacattggtatccttcatactgagagcctaataaaagaggtggagaaagtttttagcgttagcaatcctgatccacaggaagt

SEQ ID NO: 27057 - DNA, 887 bp, Zea mays
  Clone ID: LIB4719-013-B10_FLI
ctcgaggccggccgggaagctgagcacaagtgatcgaacaagtacagtacatacactctatcgatctctgtgaattaatttagttattaactcgatcatggcgcggccccagaacaaccagaaccccagggtgttcctggtcctcaacatcggcggcgtgacggttggccgcgtcgtcatcgagctgttcgccgacaaggtgcccaagacggcggagaacttccggctgctgtgcaccggagagcgcggcgtgggaaagtggtccggcaagcgcctgcactacaagggcgcggcgttccaccgcgtggtgcccgggttcatgtgccagggcggcgacatcacggcgggcaacggcacgggcggcgagtccgcgatcggtgacgcccggtacttcgccgacgaggcgttcggagccgtccggcacgatggcgccggcgtggtgtccatggccaacgccgggcccaacaccaacggatctcagttcttcatcaccttcgccgacgcgtcgtggctggacggccgccacgtcgcgttcggccgcgtcgtggatggcatggacgctctgcgtgctatcgaaaaggccgggtccatcagtggcaggactatgaggcatgtcgtcatcgccgactgcggcgagctcaagcactaagctgccatgtcctaattattcacgatcatacttactctctaccaaatctgacactatctagtacgtatacgtatacttatatattattatgattgttgtttgttgctgctgctgttacaagatgcgtttgagactaggtagatgatgagcatatacgcgtgattattttcgggtcttgatataaattctcaagtgtgagacaggttaattctgtgtaattgtaataccatggttaacg

SEQ ID NO: 27058 - DNA, 1050 bp, Zea mays
  Clone ID: LIB4719-013-H10_FLI
tcgaggccggccggggggggcgccagcgtctcgcctcgccgtcagcagcagcagctgcacctccattccacggcttccgtcgtgcgcttcgtctgcacccacaaaggcgacggcgacggcagggggaggagatgaagctgaagcagctggagggcctcttgggtggcctgacccagttctccgaccccaagctggagctggagcagtatgcgacgggccctcacatcgcgtcgcggatgctctacatggcagagaatagtttcaatgacataactggcaaagtggtagctgacttcggctgtggctgtggcactctggctgtggcgagtgctttactggatgctgaacatgttcttggtattgatattgacccacagtcacttgaacttgctcaagaaaatgctgctgatctggagctggacatcgatttagtttggtctgacataaagaacttaaatctgaaaggcgtccatgttgatactgttgtcatgaatcctccctttggtacacgaaggaatggagcagacatggagttcctctctatggccttgcaggttgcttctcaagctgtctattctctacacaagacttccactagagaacatatcaagaaggcagccttgcgtggcttcaatgccatcagtgcggaggttctatgcgagctgcgttacaatctaccgcggacgtacaagttgcacaagaaaaaagagattgacattgcagtcgatctgtggcgctttgttcctaacgcccaacgccgcagctagcgcgctcgctatgggccgaggggcacaggtgatggagtggaactgaacatgaatggaaaatgatcaaatggatgtgtctcaaaaggctggacttgatcgaagagatcccaggcgtcacgcttggtgtgcttatcgtcttcttggtgcccgtaaggatagctcagaatttggcgaactgtgtagagttttgtcattttgtgggcacagatgatgctcccagtagtgtgcacaatgaatgctttgtatgtattgtgctctattgcctgtgctaacgctacagaac

SEQ ID NO: 27059 - DNA, 1512 bp, Zea mays
  Clone ID: LIB4719-014-A6_FLI
ctcgaggccggccgggacctgtcatttatattcatgttactgatagaaccatgatatatactgggtagatccctggctaaccaaacaaatggtggagacatggattagtgcttatgggaaaatcatccccaacagggattgaagtgacagccagggatccactcatcccctgggtggaaaaattcaggttgtggattggattgctagctaccgaacaagccctcagcgtgctaatttcaatggaatcttggtagacaccactgaacttcttggtttccaattaagttcgagcatagagatcgtcttctctcacactgagttgccagtttattccgaaggtccttcaagctaagttctgatgatggctaaggccaatggagcagtccatgcatccacgaaggaacccttgttttcttttggtgtcatagctgatgttcagtatgctgatatcccagatggtcgctcattcctcggtgtcccaagatactaccgccatagcatcactgtcctccaaagggccgtcaacaggtggaacgaacaaggcaacatcaagttctcaatcaattttggtgacattattgatggctactgcccaaaggacaaatcattgtgggcggtgcagaaggtccttgatgaatttgacaagtttgatggcccgacatatcacatgattggcaaccactgcctgtataaccttccgcgcagccagctggtgtctctgcttaagattgcaacagattctgatcgtgcctattatgacttctcgccatgccctgggttcagaatcgttgttctggatgcttatgacttcagttgccttggctggccccatgatcaccctgtgactatagcagcaatgaagctcctggatgagaagaatccaaacactgataagaacagccctgatggtctggttggtgttgataggcggttcgtgaagttcaatggtgcagttggcaaggagcaggtgtcctggctcaatgatgtcctccaggacgcatcgacgcaacatcaaaatgtcatcatatgcagccatctcccaatggatcccggggcgtcttccccagcagctctgatgtggaactacgatgaggtgatggctattgttcaccagtacaactgtgtcaaggcctgctttgccggtcatgaccacaagggtggccactctgtggactcacacggtgtgcaccaccgcacccttgaggctgccttggagtgtcctcctggtaccagcgcttttggtcacgtcgaagtgtatcctaacaggctgctgcttgtaggttttgacagaatggctgatacagaggtccgtttttgagccattaagcggctttaattcgtaccgacttctactacttctataatgtttttgtctatatagattacagctgcagcagtccaaacgctggctttaatccgatgcttacacaaattcatgtgacttcattgcctgccgcataattccattgaaactggattattgcaataatgaaatgaattccttacggtaag

SEQ ID NO: 27060 - DNA, 1347 bp, Zea mays
  Clone ID: LIB4719-016-A7_FLI
ccgggaggtgcagagcgcagcagctgagcattccccgtcttccttgtttaccattcctccccaaaacacatcctgcgatcctcgaagcctccgccgagcatcgatcatgtcggcctactgcggcaagtacgcggatgagctcatcaagaatgctgcctacatcggcacccctggcaagggtatccttgctgctgatgagtcaactggcaccattggcaagcgcctttccagcatcaatgtcgagaacgtggaggagaaccggcgggctctccgtgagctcctgttctgctgccctggtgccctccagtacatcagcggtgtgatcctcttcgaggagaccctctaccagaagaccaaggatggcaagccttttgtcgatgtcctcaaggagggaggcgtcctccctggcatcaaggtcgacaagggcaccattgaggttgttggcaccgacaaggagaccaccacccagggccacgatgacctcggcaagcgctgcgctaagtactacgaggccggtgcccgctttgccaagtggcgtgctgttctcaagattggccccaacgagccgtcacagcttgccattgacctgaatgctcagggtctggctcgctacgccatcatctgccaggagaacggtctggtgccaattgttgagcctgagatccttgttgatggccctcatgacattgatcgctgcgcttacgtcactgagacagtccttgctgcctgctacaaggctctcaacgagcaccatgtcctcctggagggtaccctcctgaagcccaacatggtgactcctggctccgactctaagaaggtgacacctgaggtgatcgcccagtacaccgtccgtaccctccagaggaccgtccctgctgctgtgcctgctgttgtcttcctctctggtggacagagcgaggaggaggccaccctgaatctcaatgccatgaacaagctcagcaccaagaagccatgggccctgtccttctccttcggccgtgccctccaggcgagtaccctcaaagcctgggctggcaaggtggagaacgtggagaaggctagagcggccttcctcgccaggtgcaaggccaactccgaggctaccctcggcacctacaagggtgatgctgccgccgacaccgagagccttcacgtcaaggactacaagtattgagttgcttctctttgcgatcccgttgttttgaaactcctgcctgcgagtaggttgctgagtgttgtttgcttgttagagcttttatattcgaacataaaaaaaacatgcttcctatgtggatgatggttatctttatattcgtatattaactactagtctctgttgttagtttc

SEQ ID NO: 27061 - DNA, 1372 bp, Zea mays
  Clone ID: LIB4719-018-E3_FLI
ggccggccgggacctaagctatagccttctagagcagtagagattgacaccacgggcacgcacgtcagcgcctccaccttcctccccagccgcaagcagagcaagaaccggagctggggatcgattccgcgccgcctgatctgcgatcgggactcgatcgtgcataatccgaggttcttcctctctgtcgtctccgatccagacgggtgtgcctggtctgcatcttcatcctctgcaagaaatcacacatctcgtggcgcaccttgcatcagccgcggccggcacctctactctcgcccgccccctatgtcgtaagcgcgcaatcagaactcccgatcacccgcacgctggtgcgccagtgtcgtcttcgccaccatgaactccatcgagcccttcaacaggctggtgaagctggcggcccgcgccttctacgatgacgtctcaatgaagggcgacaaccagcccaagacctcccgcggggacaaccgcggcatggccgtcgtcgtcctggacgcgctcaccagacgaccgtgggtccgagaggaagatttggctaaagcattgaagctccactcgaaacagctgcgtcgcattctccgtttctttgaagaggagaaactagtcacaagggatcatcggaaggagtcagcaaaaaatgccaaagcacataatgctgcagctgctaatgacggtcaaacagttgctaaggagggagaagagaaagtaaagatgcacacacattcatactgttgcttggattatgctcagatatgtgatgttgtcaggtatcggattcaccgcatgaaaaaaaaattgaaggatgaattggacagcagaaatacaattcaacactatatatgtcctagctgtaataaaagatactcagcctttgatgcactacaactggtaagctacacggatgagtacttccattgtgaaacttgcaatggtgaactggttgctgaggatgacaagcttgcttctgaggaaatgggagatggcgatgacaatgttagaaagcgcaggcgtgagaaattaaaggacatgcagcaaagaattgaagagcaattgaagccattggttgcacaacttgatagagtgaagaatctgcctgcgcctgagtttggtagtcttcaaacatgggaaagagcacatattggtgcctttgcaattggtgaccctgctgcagctgattcttctaggaattcacaagggcagtatggtacaccaatgccataccttggacagacaaaggttgaagttgatatattgagtgatggtgaaaaagaaggtgctgaatcaggtaaagatggttctgaactcaaagtcatacctccatggatgatcaaagatggcatgaatcttacaaagg

SEQ ID NO: 27062 - DNA, 240 bp, Zea mays
  Clone ID: LIB4719-020-E10_FLI
taccctcgaggccggccggggtcatgacctcgagctttgcacggacctgcggctctgaataggcgaccggatccacggacggatcgggacgaagggagagaaggcggttttttttgctttggtcttcttttcttgatcagattctgccttgctttgacttgtcgtgctcgagggagcttgtaccagtgctgcactgtactactcgatacgaatggcaatagaattggatgacgattcctg

SEQ ID NO: 27063 - DNA, 1296 bp, Zea mays
  Clone ID: LIB4719-020-G7_FLI
ccgggaggcaactaagacaaagtggcgtactcttctctgtactagctttcttcttcctcctcctcttcctcctcccaaacagactggatttcatcaagataatcctgaaactggagccaacaagcagacagagaaagaagagcaagaagaccggctcccagccgatacaaggtaggagtgagcagcgttagatcagttttcatcacaggatcgatatggtgacagtgagagaggagactcgcaaggggccatggacagagcaggaggacctgcaactggtatgcactgtccgtctgttcggtgaacgtcgttgggatttcattgccaaagtatcaggtttgaggggtggggatccacaaattaggtagctaaattgaagtcacccgcgctaagtcgcaaaagcagctatcagcctctctgaccgactctattcttgcttcccctctccccttctgtatcttcatgcagggctcaaccggacaggcaagagctgccggctgcgctgggtcaactacctccaccctggcctcaagcgtgggcgcatgtctccccatgaagagcgactcatcctagagctgcacgctcggtggggaaacaggtggtccaggatagcacgccgcttgccagggcgcactgacaatgagatcaagaactactggaggacacacatgagaaagaaggcacaggagaggaagaggaacatgtctccatcgtcgtcctcgtcttcgctgacttaccagtcaggctacccagatactccatcaaccattggagttgagggacaggagcttcatggtggcagtggctgcatcacaagcatcctgaagggcacccctccggacatggatggctatcccatggaccagatatggatggaaattgaggcgccacagatgccctcggaggagagctttgttggggggaaccataatgtgtgcagcagccttgccaccccgctgccaccaccaactgtctgggaatactacccagatgcctgctggaaggttgacgatgagatcaagatggcaacacaatttcaatttggttatagtgaaggagttgggccctgcttctgatgccataaatattgggtcagattactaagttatacacctacctagcagaagtgaagtgcttttgtagaaacaagctttagcatggatctgaatatttatctccgcgcttagaattgcaggtctatggatctatgcatggttgctatgtatctatctagtgtgcaagacaagattatcttaatttgtccttgatgctatggaatacaagggcaaaggtact

SEQ ID NO: 27064 - DNA, 896 bp, Zea mays
  Clone ID: LIB4719-021-D9_FLI
ctcgaggccggccgggatcgctttcagagtttcagttcagttggtcagcatcgaacaaccgcgagcagaggtgtgtatccctccaccagtctacgacctagcgtcgccaggcataacagtattagaccttgacctcgatctcctttccgatgagcaagcaaagatggcgccggtgagggtgttcgggacggcggacttcgtgaacgctgcgagggttatggcttgcctggaggaagttggcgtggagtacgaggtcgtcgaggtcgactacgcggccatggagcacaagggcgcccagcacctcgcaagaaacccgttcggccaaatcccagcgtttcaggacggggacacgatgctctttgaatcccgagcaatcgccaagtacgtgctccgcaaatactccaagtcagctcaagtcgacctgctccgtgagggcaacccggaggaagccgccatggtagacgtgtggacggaggtcgaggcgcacacctacctacccgccatcgcgcccatcttctacgagtacgtggtgtaccccgccgagcatggcaccacgcccaaccaggaggtggtggacgagagtgtggagaggctcaggaaggtcctcgacgtctacgaggcgcacctgtacaagaccaagcagctctatctcgccggggactacttcagcctcgccgatctcaaccacgtcccgtacaccttccacctcatgaggacaccgcacgcgtcgctcttcgaggcgtatcctcacgttaaggcctggtgggagagagttatagcacgcccgtcgctgcagaagctcgccccggatatggtgatcaaagcctgattgcacgtacctttgtatcatcagattcttccttggggtgtatatatgcaaggggtacctttcttgc

SEQ ID NO: 27065 - DNA, 1084 bp, Zea mays
  Clone ID: LIB4719-021-E4_FLI
ccgggctgcttctcgccccttccaaaatcccgagcttttccccggtttcgacccttcgttttcctccgcttcctcctctgctccactgcttcaggaataggtgcctcaggaatataggtagacggagaaaaaaaaacacagagagagagagagacggaggggaggcatcgaaattccgaatccccacctcgccgctcccaccaccaccgcggattgcgtcccgttcgattgcgcaggagtttctgttccaggatgagcaccgagtcaggagagctgctcgggatcgaccccgtcgacctccggttcccattcgagttaaataagcagatctcctgcacgctgcagctgacgaacaagacagacaagcaggtcgcgttcaaggtcaagacaacgagccccaaaaagtactgtgttcggccaaacaacggcatggtggcgccccggtccaaagctgacgttgctgtcacaatgcaagcgcagcgggacgcgccaccggacatgcattgcaaggacaaattccttgtgcagagcgccatcgtggccaaggagaccatgccgaaggaagtcactggagacatgtttaccaaagattcaggcaatatagtggatgaagtgaagttgaaggtagtttatacagcgccatcgtcctctcaaagcgagggatttgaggatggtaatctcggcagtttgagttatcaagaggaaacaaaagaacccaaagaatcagaaaaaataatctctgagccatttgctttgatttcgaaactgatggaggagaagaattctgctgttgagctgaacaacaagcttcgacaagaattggaccttctgaggcgagacatcagcaggcagcatggtggtttctcattagttttagtactggtggttgctattctgggaatactgctagggttcctcatgaagagatgagcgcatgtaatgacttatcttgtctggcttttctgaactaaacaaaattgtatgtgctctgtgtgcgcttgttgttgtacaagtcagtggtctgtttatcataggatctgatgcctattgtaattttctgattcatattataaactttagccgt

SEQ ID NO: 27066 - DNA, 869 bp, Zea mays
  Clone ID: LIB4719-022-B10_FLI
ccgggaccgcacccgttctcccctctgtaccgcagatcagatcacactcgtagagagaaggaaaaatatccccaaaccctagctcccgatctcgatggcgaaccctcgcgtcttcttcgacatgaccgtcggcggcgccccagcgggccggatcgtgatggagctgtacgccaacgaggtgcccaagaccgcggagaacttccgcgcgctgtgcacgggcgagaagggcgtgggcaagtccgggaagccgctccactacaagggctccaccttccaccgcgtcatccccgagttcatgtgccagggcggcgacttcacccgcggcaacggcaccggcggcgagtctatctacggcgagaagttccccgacgagaagttcgtgcgcaagcacaccgcccccggtgtgctctccatggccaacgccgggcccaacaccaacggctcccagttcttcatctgcaccgtcgcgaccccttggctcgacggcaagcacgtcgtcttcggccaggtcgtcgagggcatggacgtcgtcaaggccatcgagaaggtgggcacccgcaacggctccacctccaaggtggtcaaggtcgctgactgcggacagctctcctagatctctctgatctggtctgttcggccgccctccctccgtcatcgtcgactccccctgcgtccgttcctttggatctgaataagatggtggtgatctgagtggtggtcttagtttatcatgtatcgctcgcagtttaatttagcggtttaggtgtggatctgtgaaccccatggcgcctctgcttgattcgtgtttcacctgttatgttctgagattcatgataatgctatgagaactgaaattcccgtttcatgcg

SEQ ID NO: 27067 - DNA, 1373 bp, Zea mays
  Clone ID: LIB4719-022-B7_FLI
actccattcccatcctcgcctcgcctttttagagagagagaaaccacggctgcgcacagcgggttagatagagagagagagagagagagagagagaccaagaccaagaccaagaccaaggccaaggagcaccgctccccgtacatccccagcaggagagggagagagacagagaaggttgtgcgaagggaggaagacgcggcgggagagaagggcgacatggagaggccggcgcccgtgaggaagtcccacacgtcgacggcggacctgctggtctggccggaaggtgcgccgcaggagttgcccgccgggtccacgccgccatccaaccgccggccgcaccagccgtcggaggctctcaggaaggtggtgttcggcgggcaggtgacggaggcggaggccgagagcctcaacaagaggaaaccatgctctgctcccaagtggaaggagatgacaggaagcggtatatttgcagctgggggcgagggtgaagaagatgaatccgccaatgtctctgcaacttccgtccggacggctccaaagaattatcaggcaatcagtactataagccacatctcatttgccgaggaagaaagcatctctccaaagaagccaacttcgatagccgaggtcgcaaagcagcgcgagctaagcggcacgcttctgagcgaggacgacagcaagatgaagaggcagatatcggacctgaaatccaaggagctgagcggccacgacatctttgcccctccggaggatccgaggccacgcaactcggagaacggctcgacctcgcagactccgggcaaaaatgcacacgtaagcaacttcaagttcggcgaggccgacgaggacagcgcggtgaagaccgcgaagaagatccccaccaagaagttcactgacctcgcgggcaatatcttcaagggcgacgacgaggcacccgggacggcggagaagcaccacctgagcacggcgaagctgaaggagatgaccggcagcgacatcttcgcggacggggaggccccctcccgggactacctgggcgggatccgcaagccgcccggcggggagagcagcatcgcgctggtttaacagcaggggacaaacaaccagatggacatagcagcccctcccctacatcattcgtttcttcctcatcgcccgtcgccgtcgccatcttaggagtgatcttttattagggagttcttttttttttttcgttcattggaggactgatcgattggaacccccggcttgcattcctgtttcccgtgactttcgtcaggttttcgttgttaatcccctccgatggtggtgttgtgtgggtatgacaacaacgatggttatctctaatttaacattgatttggcttgggct

SEQ ID NO: 27068 - DNA, 1701 bp, Zea mays
  Clone ID: LIB4719-024-D1_FLI
gaccggatctagccgccgcgtggtttttgaattgagctcccctcgcgtcgcatggcgctggcgcgggccgcgcgggttcctctctgggctgctgccggatcgacggcgatgctagggtttaggtgtggttcgtgtctagttagctgagtggcgcgtacgcgtttcgttttgtcttggggagccaagcgtggcccgaaatttatctggagcaggttttgctttatgctggttcatttgtctacggacaatggactagttgctgcactgtttctgtgattcaccatgggaagcagtggagcagatacaccgtctaaggagcagcagccacctgctacctcaggtgctgcaataccacctgtttatccagattggtctagcttccaggcatatcccccaatcccaccacatggattcttcccctcacctgtggcatcaagtccacagggtcatcctttcatgtagggagctcaagctatgattccaccttatggaacaccgccaccatatgtcatgtacccccctggagtatatgcccacccatctatgcccccgggtgcacatccatttactccttatgccattacttctccaaatggcaatgctgatgctactggaactactgttgcagctggtaatactgatggcaagccctctgaaggcaaagataaaagtccaacaaagcgatccaaaggaagtttgggcagcttgaacatgcttactggaaagaatcccagtgaacatggtaagtcctcaggtgcatcgggtaatggagtcacttctcaaagtggcgaaagtggcagtgacagttcaagcgaagggagtgaaggaaattctcacaatgattcacatcacaaggaaagtggacaggaacacgatggggatgttcgaagttcccggaatggtgtatcacgtttgcaatctgagggaaaattgaaccaagctatggcaatcttgcccataccatcaagtggcccagcaactgatccaactacaaacctaaatattgggatggactattgggccaacacagcaagctctgctcctgcaattcatggcaaagcgacgtcaacaacagttccaggggctgtggtcccagcagagcagtggacacaggatgaacatgaactcaaaaagcaaagaagaaagcagtccaatagggagtctgcacgtagatctaggttacgtaaacaggctgaatgtgaggaattggctcaacgtgctgatgttttaaagcaggaaaatgcttcacttagagatgaagtaaaccgtatcagaaaagagtacgaggaacttctatcaaggaataactcactaaaggaaaaacttgaaggcaaacaacacaaaactgatgaggcaggacttaacaacaagctgcaacattctggtgatgacagccagaaaaaaggaaactaatgctatcatgcaatgcttgcctacattggtcctaactagattattgggaggtgcaattgtagtatgcacattaactccttactttattgcagttaattgttaccaggttgtgataatgttgatgccaaccttttgtgtgggtgtttcctgtttcagatctatcttggcttatcttttagaagccaagatgtgactgaagctataggctgtgacccaattcactatatctgttggaaatagtggataaagtcaaactttcaaatttgaagtgctgactaatattgttgt

SEQ ID NO: 27069 - DNA, 1069 bp, Zea mays
  Clone ID: LIB4720-001-C2_FLI
ggctctgccgtcaaccacgcccacgtccccgcggagcactgacatgcgcgcgtcgtggtaccctggtctgtggcctctgcgctccccttcctccgcggccctcgcctcgccagaacagcgggagatctcgggatcgggcggccctcctccggcgtccggatcgagaggattggacccgaatccgatcgcctagcagggggcgcggcgcgcgcgcgatggcgccggcggtggtgtcggcgctggccaagtacaaactggtgttcctcggcgaccagtccgtgggcaagaccagcatcatcaccagattcatgtacgacaagttcgacaccacctaccaggcaacgattggcattgactttctgtcaaaagcaatgtatctagaagaccgaactgtacgtttacaactctgggatactgcaggacaggagaggtttaggagtcttattccaagctacatcagggactcttctgttgcggtggttgtttatgatgtatccaatagacagtccttcctgaacacctcaaagtggatcgatgaagtgcgcaccgagagaggtggcgatgtgataatcgtgctcgttggcaacaaaactgatcttgtcgacaaaagacaagtgtccacagaagaaggagagagcaaggcaaaagaattgaatgtcatgttcatcgagaccagcgcgaaagccggcttcaacatcaagccgttgttccgcaagatcgctgcagccctgccaggaatggagacattgtcagcaaagcaggaggacatggtggatgtcaacctgaagtcgacttctagccagtccaactcgcaacaacaggagggaagtggatgcgcctgctagaagtgtgttagcttcaggcatactttcacttgaagagcgtgtgtcggtaactgttgtataagcagttacatatttcactagtgttactacttactatccttaattctctgatgcttctgtagtgaggctcacatcgttttctcattttccatcttgattttgtatgttgcggcaaaagaccagaaataacaacattttgaatcacaccgggtcttttgttacac

SEQ ID NO: 27070 - DNA, 868 bp, Zea mays
  Clone ID: LIB4720-003-G12_FLI
ctcgaggccggccggtaggtgaccatcacaacaaaaataaaatcaataatagagagagaagagatcaacaccggctgcttaatctcttcttttccctcctctttatctccagcgcatcgtaaagggaggagcggagcggcgaattcttgtggtttcccaagatgtcttctccaagcaagcgccgggagatggacctcatgaagctgatgatgagcgactacaaggtggatatggtgaacgatgggatgcaggagttctttgttgaatttcgtgggcctaacgaaagcatttatcaaggaggtatatggagggttagagtagaactgccagatgcgtatccttacaaatccccatcgattggtttcatcaataagatatatcacccaaatgtcgatgaaatgtctggttcagtctgtttggatgtcatcaaccagacatggagcccaatgtttgatcttgttaatgtgttcgaggtcttccttccacaacttctgttatatcctaatccttctgatccattaaatggagatgcagctgcgttgatgatgcgtgatcgccctgcttatgaacaaaaggtgaaagagtactgtgaaaaatacgccaaaccagaggatgctggtgtcagcccagaagacgagtccagtgacgaagagctgagtgaagaggaaaatgactcgggtgatgaggagataatgggcaaaccagacacatagtcgagttggaacctagatctgtaatctgcacacgatgtttattgcagcaagtgcaattaaatagtccatggatgttcccgtgcagtctgaatgccatgtaaataaactgcaatttcatgttcgctaatcttatttccatctccagttgatcaatt

SEQ ID NO: 27071 - DNA, 1292 bp, Zea mays
  Clone ID: LIB4720-004-B9_FLI
ccgggaattccccgtttgccttgtttaccattcctccccaaaacacatcctgcgatcctcgaagcctccgccgagcatcgatcatgtcggcctactgcggcaagtacgcggatgagctcatcaagaatgctgcctacatcggcacccctggcaagggtatccttgctgctgatgagtcaactggcaccattggcaagcgcctttccagcatcaatgtcgagaacgtggaggagaaccggcgggctctccgtgagctcctgttctgctgccctggtgccctccagtacatcagcggtgtgatcctcttcgaggagaccctctaccagaagaccaaggatggcaagccttttgtcgatgtcctcaaggagggaggcgtcctcccttgcatcaaggtcgacaagggcaccattgaggttgttggcaccgacaaggagaccaccacccagggccacgatgacctcggcaagcgctgcgctaagtactacgaggccggtgcccgctttgccaagtggcgtgctgttctcaagattggccccaacgagccgtcacagcttgccattgacctgaatgctcagggtctggctcgctacgccatcatctgccaggagaacggtctggtgccaattgttgagcctgagatccttgttgatggccctcatgacattgatcgctgcgcttacgtcactgagacagtccttgctgcctgctacaaggctctcaacgagcaccatgtcctcctggagggtaccctcctgaagcccaacatggtgactcctggctccgactctaagaaggtgacacctgaggtgatcgcccagtacaccgtccgtaccctccagaggaccgtccctgccgctgtgcctgctgttgtcttcctctccggtggacagagcgaggaggaggccaccctgaatctcaatgccatgaacaagctcagcaccaagaagccatgggccctgtccttctccttcggccgtgccctccaggcgagcaccctcaaggcctgggctggcaaggtggagaacgtggagaaggctagagcggccttcctcgccaggtgcaaggccaactccgaggctaccctcggcacctacaagggtgatgctgccgccgacaccgagagccttcacgtcaaggactacaagtactgagttgcttctctttgcgatcccgttgttttggaactcctgcctgcgagtaggttgctgagtgttgtttgcttgttagagcttttatattcggacatgaaaaaaacatgcttcctatgtggatgatggttatctttatattct

SEQ ID NO: 27072 - DNA, 622 bp, Zea mays
  Clone ID: LIB4720-005-B10_FLI
ccgggaccgcaatcttcaatctccccagcattccctagcagaagccttccatcctcactcgctcgatggcccgcacgaagcagacggcgaggaagtccaccggcggcaaggcgccgaggaagcagttggcgactaaggcggcccgcaagtctgcccctgcgaccggcggagttaagaagccccaccgcttccgccccggtaccgtcgcgctccgggagatccgcaagtaccagaagagcacagagctgctgatccgcaagctgccgttccagcgcctggtgcgggagatcgcgcaggacttcaagaccgacctacgcttccagagctccgctgtctccgcgctgcaggaggcggctgaggcctaccttgtcggtctcttcgaggacaccaacctctgcgccatccacgccaagcgcgtcaccatcatgcccaaggacatccagcttgcccgccgcatccgtggggagagggcctaagcatcgtatattctgtcatcagtgcccgatcagaagatgtagagatgtgctgggttctgtagtttgggttactgtcgaatcatcgagtagttggttgttcactgctgtaacttattatcatgatgcatatgaaatggcaatgaact

SEQ ID NO: 27073 - DNA, 973 bp, Zea mays
  Clone ID: LIB4720-005-D4_FLI
aaccctagccgcactgcgctcatttctgcatccccctcccgccgcgccgcctcaccgccgccggggaagatgggtcgcgtgatccgcgcgcagcgtaagggtgcggggtccgtgttcaagtcccacacccaccaccgcaagggccccgcccgcttccgctccctcgacttcggcgagcgcaacgggtacctcaagggcgtcgtcaccgacgtcatccacgaccccggccgtggcgcgccgctcgccaaggtcactttccgccacccattcaggtacgagcaccagaaggagctctttgtcgcagccgagggcatgtacacgggccagttcgtctactgcggtcgccgcgccaccctctccatcggcaacgtgctgcccctccgcgggatccctgagggtgccgtcgtctgcaacgtcgagcaccacgtcggtgaccgcggtgtcttcgccagggcctctggggactacgccattgtgatcagccacaaccctgacaacggcacatcgaggattaagctgccctctggcgccaagaagattgtccccagcagctgccgtgccttgattgggcaggttgctggtggaggcaggactgagaagccgatgctcaaggctggtaacgcgtaccacaagtaccgtgtgaagaggaacagctggcccaaggtgcgtggtgtggccatgaaccctgtggagcatccccacggaggaggtaaccaccaacacatcggtcacgcctccacggtccgccgagacgctccccctggccagaaggttggtctcattgctgctaggaggactggaaggctcaggggtcaagctgctgccacagcctccaaggctgacaaggccacctagagttattgtcgttgtttatctgtctactgtgctttagattgctaaaggacatgtgtttcagaacggatgtgttgttgcctcgtactatggtgaaacattgtctcagtttttgtgattg

SEQ ID NO: 27074 - DNA, 1085 bp, Zea mays
  Clone ID: LIB4720-006-A7_FLI
ctcgaggccggccgggtcctttctcccgtgcgcttcccagcctcgctccctctggcgctgtgggcccgacatgcaggcgtggttctcctccggctccgggccctcctcctcgtctgcggcgtcctcatcgcagccgtcgctgctcgcagagtggaactcctacgctgccgcccgctccgctgaggacgcgggcgatggcttcgggatcgacatcgaggcggccgtccgctccgccaacgaccgcgtcgccggcaccttcggcgtggtctcaaaaggtgttaaagggtttccaggcagctttaagtccacaacaagcagtgttccatctggcagatctctcatgtatttcggtctgtttcttggtagtggtgtattcctagttttcatcgcattcacgatatttctgccagtcatggtgataatgccacaaaagtttgcaatatgtttcacggtgggatgtgctttcataattggatcattctttgcgctgaaagggcctaagaatcagctctatcatatgatttccaaagagagattacctttcaccatgggatttgtcgggagcatggttgctacgatctacgtgtcaatggtgcttcatagctacatactttctgttttcttctctgtgcttcaggtccttgccctagcatattatgccatctcatacttccctggtggatctgctggaatgaagtttatatcttctgccgttgtgtcctcagtgttgagatgctttgggcgatgagttcacctgactgctgctttcctgtgctgattgcagtatttctagtggatgatctagcacctttgtggcttgtcgtttagcctgtgcggcttcattaatttcagaagtttgatgccagttgaagcaccgaggtgaactgtgaggaaaggatgttgtggacccagccaacgcttgttaggggcaaaaaaattgtaatgtagtacattgggaacaacagcttagtctaaaaagtacattgtacaaaacatctcactgaacactgggccacaatctaacgcccatggcgctcatttctttcatcttttctgtcgtaaaagggaaaaagaaattgcgagcg

SEQ ID NO: 27075 - DNA, 1403 bp, Zea mays
  Clone ID: LIB4720-007-A6_FLI
ggtcgcggtcgccgaagaaccctcgctcgagaccgaagaagacaaaatcgcatctcctcgcctcctcccctcctcccgagatccgggcaaagcgcgccgcgcgagaaccaggatatcaatttaggtatatggacaaggtgtctgaaggtactaagtgagatggataagaagaaagcgaccgatggcaccgaaccaggaccagctccttctcgtgccgtcgacagatttggttttataaagccagaacaaggcaattcacctgatggaattccaaaaggcaagtctatacatgagcgtgaaagggaggaaagaaggataagaaaatggaggaagatgataggtgttggtggtaatgactggaagcattatgttagaaggaaccctcatgtggttaaaaggcgaataaggaaaggaattcctgattgtctcagaggacttgtttggcagttgatttcaggcagtcgggacctcttactaatgaacccaggggtttacgagacactggtgatatatgagacatcggcctctgaattggaaattattcgtgacatatcacgcacatttccatctcatatattcttccaacaaaggcatggtccaggccaaagatcattgtataacattttgaaagcatattctgtctatgacagggatgttggatatgtgcagggaatgggatttttagctgggttgctgcttctttatatgagtgaggaggatgcattctggttattagtcgcattgctaaagggagctgtccatgcaccaatggaaggcttgtatcaggctggtttgccgcttgtgcagcaatatttgtctcagtttgagaaattagttattgagctcatgccaaaattgggacaacactttgttgaagaaatgataaacccaagcatgtatgcaagtcaatggtttatcacagttttctcatattccttcccatttcatctaactcttagagtttgggatgtgtttctttatgagggtattaaggttgtattccaagttggattggctctattgagactctgtcatgatgatttagtcaaattaccttttgagaaactgctctatgccttgagaaatttccctgaggaagcgacagatccagatgtattattgccgcttgccttttcatttaaggtatcgagtcgtctagaggagcttcagaaggagtatcagaagcgacaggagggcaccagtgaaacttcaagcggcgagcggcttcagcccctcgcatcgaagacgatgagcagggtcggtagccgtgtggtgtcgaacttaacgaccgctgacagaaaatgacagacacgttctcttgcttgtttgtaactcgcatgtacactgtacagaaagaacggccttataatccatccatctaacagtatttgttttgcgtttcg

SEQ ID NO: 27076 - DNA, 766 bp, Zea mays
  Clone ID: LIB4720-008-D5_FLI
taccctcgaggccggccggcttcatccctctttcttcttcttcttcttcttcacacaagcgtgctccttctgctcttgtgctaagtagctagctcacaacagaagaggacgagaggaagcaaggcggcggcggcggcggcagcaacaacatacaccgctggccgtggcgccatgggcatcctggaccacatgtcgcatgtgtgcagcatcacggagacgaaggaggcgctcaagctcaggaagaagcgaccgctgcagacggtgaacatcaaggtgaagatggactgcgaaggttgcgagcgtcgcgtgaagagcgcggtgaagtcgatgcgcggcgtgacgagcgtgacggtgaacgcgaagcagagcaagtgcacggtgaccgggtacgtggagcccgccaaggtgctggagcgcgtcaaggccaccggcaagaacgccgagatgtggccctacgtgccctacacgctcaccacctacccctacgtcggcggcgcctacgacaagaaggctcccgcgggcttcgtccgcagcgcgccgcaggccatggcagaccccagcgctccggaggtcaagtacatgtccatgttcagcgacgagaacgtcaacgcctgcaccatcatgtgatgcatgcatatgtatagtctctcgatcgtatcatgtgtagtagtacgagctagctagtgcatatcgatcttcgtactgtatcatatcgatcgaaagaaccttaatagccaatacaagaggaatgtgaattaagcaatcc

SEQ ID NO: 27077 - DNA, 1165 bp, Zea mays
  Clone ID: LIB4720-008-E9_FLI
acttttgggggaccctcgaggctggccgggaaaaaagagaagacccgcctctcccgtgaggccgtgacgcgacgccggatcgtcctcgtctcttagctcgtggaatgaagggaggtgccgtcatcagggccgccggcggaggtgccggcggtgcgggtctgttgcgaacgcgactgcggcttcccgtggtgctcctctcctgctccctcttcttcctcgccggcttcttcggctcgctcctcttcacccaggatccggaggaggcggatatgccggtaccgagagagcggctgttggaggcggcgtggccggagatgccttacggcgagtccggcgaggctgcgccgtccttgatcccataccagattttgagctggcagcctcgtgctttgtactttccacaatttgcgacatcagaacagtgtgaaaatatagtaaaaacggcaaaggagagacttaagccatcaacattagccctgaggaaaggagaaaccgcagagagtacaaaaggaatcaggacaagttcgggaacattcctcagtgctaatgaagacccaactgaaacccttgcggaaatcgagaagaagattgcaagggctaccatgttacccagaaatcatggggagccatttaatgtcctgcggtataatattggacaaagatatgcttcacattatgacgcatttgacccagctcattatggtccacaaaaaaatcaaagggtggcatctttcttgctttatcttacggatgtcgaagaagggggagaaactatgttcccatacgagaacagtgagaatatggatataggctatgactatgagaagtgcattggcctaaaggtaaaaccaaggaagggtgacggactcttgttttactcccttatggtaaatgggaccattgaccggacttcacttcatggtagctgccccgtcatcaaaggcgagaaatgggtcgccaccaaatggatcagagacaatatagtgtagaaatcgaaaggctcaggtgtcatgtgccctccaaaaaaatagatcatgcgcacatatactgaccatatacttcagtgtttgttcaattgccatggacagttggaccaacggaaggaaagtgtaaccaatctatttgcatcgtatcaatatatagcctacaacttacatgtggccat

SEQ ID NO: 27078 - DNA, 704 bp, Zea mays
  Clone ID: LIB4720-009-D2_FLI
ctcgaggccggccgggacttggcttctcagtgttaaaaaaaaaaatgttctcctgcctccgctccgccgccgcaacaaccatttccttctctagccgccgcctccgatcccctcccgaggctacagaaccagttcatccaggcgcgaatggcggcggcgaggagcctgcttctgaggcacctccgcttggcggcggccccgtcagcggcgtccgtgaggccgacggcgtcgttgcatgaggccctgtgggggcagcggtggatgtcttcggaggatgccaagggctctttcctggacaagagcgaggtcactgaacgcatcatcaaggtcgtcaagagcttcccgaagatcgatgacccctccaaggtgacaccagatgcccatttcaagaatgatcttggcctagacagtttggatgcagtggaggttgtcatggccctggaagaggaattcagattcgagatacctgacaatgaagctgacaagattgactccgtcaaagttgcagttgacttcattgcctcacacccgcaagcgaaatgataaagatgcgttgcctggtatagcaaagctatatcgtcattaatctctgtttatgaagaaagttcagtttgaagatgtacactaccgtgcccatttggatacttctgctgatgctactgtcctttttggaacgaattttgctactgtggattgtctgcacg

SEQ ID NO: 27079 - DNA, 1577 bp, Zea mays
  Clone ID: LIB4720-012-A3_FLI
cgtccgcctccctctccgcctcccgtccccaaggccaatagttttcaagtgccaatggcggaccaggctaaccaacccactgtccttcataagctcggtggccagttccacctgcgctcgatcatctctgaaggtgtacgggcccgtaacatatgcccatctgtctcatcttatgaaaggagatttgccacaaggaactacatgacccagagccttttgggcccttcgatgtctgttagcggtggcatcaatgtcccagtgatgcggaccccgctctgtgctaatgctcctgctgagaaaggaggcaagaacttcatgatcgatttcatgatgggcggtgtttcagctgctgtttcgaagactgctgctgctcccatcgagcgtgtgaagctgcttattcagaaccaagatgagatgattaagtctggtaggctatcagagccgtacaagggtattgttgactgcttcaaacgtaccattaaggatgagggtttctcttccttgtggaggggtaacactgctaatgttattcgttacttccctactcaggctttgaactttgcatttaaggactacttcaagaggttgtttaacttcaagaaggatagggatggttattggaagtggtttgctggcaacctggcctctggtggtgctgctggtgcttcctctttgttttttgtgtactccttggactacgcgagaacaaggttggccaatgatgcgaaggctgccaagggaggaggtgaaaggcagttcaatgggcttgtggatgtctaccgcaagacactcaagtctgatggtattgctgggctttaccgtggatttaacatctcctgtgttggaatcattgtttatcgtggtctgtactttgggctctatgattccatcaagccagttgtccttactggcaacctccaggacaatttctttgccagtttcgctctgggttggctgatcactaatggtgctggtcttgcatcttaccccattgataccgtccgcagaaggatgatgatgacatctggtgaggctgtcaagtacaagagctccttggatgcgttccagcagattcttaagaaggaagggcccaagtccctgttcaagggtgctggtgctaacattcttcgtgccattgctggtgctggtgtgctttctggctatgaccagctccagatcctcttcttcggaaagaagtacggttcccgcggtgcttaaatggagaaatacgatgacgaacaagagcagtgtgtgttcccggtcctttccaatcaggatctggtgaagtttttgcctttcatatcgaagaaattaataattcatgtagagggaggattcttccaacaatttgttttggatggagacttagatctccaaacactcgtaactatcctactaggtggtgacatcagtccccaaaaacgtttatggtcatagagtctgcccttcgtttgtcagtcgggcaatttttcttgcatacaatgccttcgtttaagtatcggatgagttgctgcgactaattatttgtttgtctttaccttttgcaatgcttgatcgttgatagcattgtttttgac

SEQ ID NO: 27080 - DNA, 1776 bp, Zea mays
  Clone ID: LIB4720-012-D11_FLI
tcgaggccggccgggacccaatggatccgtccgccgtcggctcctcgcggcggaaggcggagcagtggttgagcgtggctgagaagctcatggtggcgcgggacattgaagggtgcaagcagttcgcctcgcaggccctggccgccgatccccacaccccgggcgccgacgacctccacgccgccgccatctccctcctggcagcccagcagcgccgcctccctaacggtcagcctgatccctacggcgtccttggtctggaccccgcaaaccccgcatcacgccgaccggatgccatccactcacaatatcaccgcctctctttcctcctcaatcgttcccaccaggaccgcccctgctcgctcgccttcgccgaagccgcccggctcgtcgctgatgcctgggcttttctctctgatcccgttcttaaatcctcccttgacgtggacctcgatgccgccgccgcagctcgcgcgtaccactctcctccaaatctaccgcagccgcactcgcagccacatctgcctgcacggctaactccgccggtggctgctccctccccgcggtcgactccgccgctggtttctccccttccgcgggcaacatcaccgccggctgcttcccctccacggcaaactcagcggccggctgtcccccaaacaaggtcaacaccgccgccggctgcttctgctccacgatctactccaccaccaccggtttctcctcaaacactgtcaacaccgctgcctgccgctcccgctcccgctccacggtctacaccaccacctgttgttccccaaacaccgtcaagtacgctgcggccgactactccccaaacgccggtggctgcaactgtcccagcagcgaagtccggtgcggcaccttcatcaacgttctggacagtgtgctcggcctgctgccacattcaccagttcgactgccaatatgggacgtgcaagttactgtgccctagttgccgccagccatttgtggccaaggcaatggctgagccaccgcctattgtgccaggcaccgacatgtattactgcacttgggggttcttccccgttgggttccctgggtgtcctggctttgaaagaatggtcaatgcacagccatcgggagtagatcagctgaatgcgccatggcttggaagcgcaggtggtgtgcatggtaatgctcagaatggggtgccaccagttagtgccccagtggtagaagtgccagtcaaggatcccatagaggtgcctgcagtgacaccgccagcgaagccgatgcgagtgaaggtgggtgcgaagaagcgtggtcgccccaagggtagcaagaacaagaagaaattatgaatgccaatgatgaacatgatggttatcatcatagatcacatgaattaactgagatatgcattcaatcacactgccattgtagttaaccgaagcactcgtctgctggttgaattctcacttgctgttgccaggatctctaatgtggagcaagcaattttattgctgaaagacttctttttcaatggtagaattcttccttttcgagattatgatgttaatctctggttcgtccccactgccgtatttgacattatgctttagctgtaactattgtatttgcatattcgtctaatttctgcttccctgaggacagttgtattgatctaaatcgataggtgtctagttactgtttattgtacgtttgagtttggtgctactctgctctagtgctctgtgtcgtaatgctgcaataaatggaatggtttaaagctct

SEQ ID NO: 27081 - DNA, 683 bp, Zea mays
  Clone ID: LIB4720-012-D8_FLI
ccgggctgattttttgttcccttcaccgacggcgaggagtgagggttgacaacgggatggcgcggagcgtatcgtacgtttcggcggcgaagctggtatccatggcgcgaggcaatccccgcctcgccatcatcgacgtcagggatgaggagaggagctaccaggctcacatcgcgggttcgcaccacttcgccagcggcagcttcgaggcgcggatgccggagctggtgcgggccgccagcggcaaggacaccctcgttttccactgcgcgctgagccaggtacgaggtccaacttgtgctcggatgttctcagactatctatcggagaccaaggaggattcagggataaagaacatcatggtactggagcgcgggtttaacggatgggaggtttcagggcagcctgtctgcagctgcaccgacgctcattgcaaagggacgtgttcttaagcacacgagtttatatctctcttaggccttgaacaaccaaggatcggcatggtctccgtttctcttgtcggtggttacttcacctcattaaaactcattaaaatgattgacacgcgacagattattgggttggcaactcctttgtgggaactgcatgcataactaccaccagaccactgtcggacataagacacttcacggtgtactgccaggtggcagtattcgtttcag

SEQ ID NO: 27082 - DNA, 901 bp, Zea mays
  Clone ID: LIB4720-013-G5_FLI
atcgaggccggccgggccagcaatacccgacgcgcaagccggtgccgcgcccagatctccgcgacagatcagtcgttcgtccagctaactgcactgcacgcaatggccaccacggcgaccgaggcgaccaagacgactgcaccggcgcaggagtagcaggccaacggcaacggcaacggcaacggcgagcagaagacgcgccactccgaggtcggccacaagagcctgctcaagagcgacgacctctaccagtacatcctggacacgagcgtgtacccgcgggagccggagagcatgaaggagctgcgcgagatcaccgccaagcacccatggaacctgatgaccacctccgccgacgagggccagttcctcaacatgctcatcaagctcatcggcgccaagaagaccatggagatcggcgtctacaccggctactcgctcctcgccaccgcgctcgcactcccggaggacggcacgatcttggccatggacatcaaccgcgagaactacgagctaggccttccctgtatcaacaaggccggcatgggccacaagatcgacttccgcgagggccccgcgctccccgtcctggacgacctcgtggcggacaaggagcagcacgggtcgttcgacttcgccttcgtggacgccgacaaggacaactacctcaactaccacgagcggctcctgaagctggtgaggcccggcggcctcatcggctacgacaacacgctgtggaacggctccgtcgtgctccccgacgacgcgcccatgcgcaagtacatccgcttctaccgcgacttcgtgctcgccctcaacagcgcgctcgccgccgacgaccgcgtcgagatctgccagctccccgtcggcgacggcgtcacgctctgccgccgcgtcaagc

SEQ ID NO: 27083 - DNA, 1416 bp, Zea mays
  Clone ID: LIB4720-014-E4_FLI
aaccaagcaacccaatccaaaccagacaagcaaggaatcccccgatggctcatcgcgttctcctcctcctctctctcgcgtcggccgccgcggttgccgccgccgtcgacgcggaggacccgctgatccggcaggtggttcccggtggagatgacaacgatctggagctgaacgcggagtcccacttcctgagcttcgtgcagcggttcggcaagtcctacaaggacgccgacgagcacgcgtaccggctgtccgttttcaaggccaacctgcgccgcgcgcgccggcaccagctgctggacccgtcggcggagcacggcgtcactaagttctccgacctcacgccggcagagttccgccggacctacctcggcctccgcaagtcccggcgcgctctcctcagagaactcggggagtcggcgcacgaggcgcccgtgctccccaccgatggtctccccgacgatttcgactggagggaccacggcgccgtcggccccgtcaagaaccagggttcgtgcgggtcgtgctggtcgttcagcgcgtctggagcgctggagggtgcgcactacctcgcaactggcaagctggaggtgctttcggagcagcagttcgtcgactgtgaccacgagtgtgattcatcggagcctgattcatgtgattcgggttgcaatggtgggctaatgacgacggcattcagttatctccagaaggccggtggccttgagagtgagaaggattacccttacactgggagtgatggcaaatgcaagtttgacaagtccaagattgttgcttcagttcagaacttcagtgttgtgtctgtggacgaggctcaaatttctgctaacctcatcaaacatgggccattggcaatcggcatcaatgctgcctacatgcagacatacatcggaggcgtgtcatgcccatacatctgtggcaggcaccttgaccatggtgttctccttgttggatatggtgcttctggtttcgcccccattcgcctgaaggacaagccttactggatcatcaagaactcgtggggcgagaactggggggagaacggatactacaagatatgcaggggttccaacgttcgcaacaagtgcggcgtcgattccatggtctctaccgtgtccgcagtccacgcctcgaaggagtagactctggtcagcggtgataatcgtgattccatatattgtagaactataatccctgctagtaatccatttgtgctgtttatgtatcgaaggcagcaaagatgtgtgaagcggcaatgggatgcttgctgtaaggtaatatgtttggcttgctaggcatgctacacgctatttggatgtagcaacgttatcaccagctgtatacgctttttaatcgacaacatttgaataatatgtacataacattatgttgtgctcg

SEQ ID NO: 27084 - DNA, 1268 bp, Zea mays
  Clone ID: LIB4720-015-C10_FLI
ggtcggccggggtgtgtgagtaggttctacgtacgtgcctatatatgtcttaatgtctatgtggtgggtctgggcgtatccaactccgatgcacatggatggtctcttgttcgcccgaaaaaaaaaaaaaatcacagcaggtgtgttgcgcttcgtcagggcgttcgccctctgcgtggctacggcatgcctcctcctggcggccggcgtgccctcgcctgtggcggcgcaggacccgtcgaagctgagcctgcagtactactccaagacgtgccccaacgtggagcacgtcgtccggacggagatggagtgcgcggtgcgcgccgacacgcgcaacgccgcgctcatgctccgcctccatttccatgactgcttcgtgcagggctgcgacgggtcggtgctgctcgacgacacggcaaccatgatcggagagaagcaggcggagcagaacgtcaactcgctgaaagggttcgatctggttgacaagatcaaggagaagctggaagccgagtgccctggaaccgtctcctgcgcagacctgctggcgattgcagctagggatgcggttgtgctggttggtgggccttactgggatgtcccagtaggaagactggactccaagaaggcgagcctggaccaagcaaacagcgacatccctacggcccagcaaggcctcctcacgctcattgccaagttctgggagaagggccttgatgccactgacatggtggccctcgtcggatcccacacgatcggattcgcccggtgcgagaatttccgggacagaatctacggcgacttcgagatgacgtccaagtacaacccgtcgtccgaggcctacctgagcaagctgaaggaggtgtgcccgcgggacggcggcgacgacaacatcagcgccatggacagccacacctccgacgtgttcgacaacgcctacttcgagaccctcatcaagggcgagggcctgctcaactccgaccaggcgatgtggtccagcatcgcgggctactccacctccgacacagtcaacaagtactgggccgaccccgaggccttcttcaagcagttctccgactccatggtgaagatgggcaacatcaccaaccctgccggcggcgaggtcaggaagacctgcagatttgtcaacacataggacatgataatatatataggatgctcgagactgcaggagaaactcggtggttgtgattgtactttacgcctgcaccttcttttgatggcttggaaaataaaaaacccctttgctg

SEQ ID NO: 27085 - DNA, 1418 bp, Zea mays
  Clone ID: LIB4720-019-C7_FLI
tcgaggccggccggagagtccttttcgtttgccgatcccccgcacccgcacccaaccgcagcggagccgggggtattcttccttcgccgctaagcacgcctcctccacaggcagccgacccagggaagcgtcgccgtctgcccccaccccgaatctgatgcttcatcgattggttctaatcctcactacctccatattcatgcacgagattgcgcgtgattaggagcagggaccaatcatattgaactcagatctggagcggagcaggaggggagccattgccggtgttctgattgctgctggaggtcgagggatggtaggggtgctgtcgaatcgcgtggatcgggacgacctcaaggccggggatcacatctacacttggcgggccgcctacatctacgcccaccacggaatatatgctggagatggcatggttatccattttacaagggcagctggacatgagattggaacaggaacattcttggactggttcctttatagctcctctccggcagcaactgagggtcctccctgccagaaatgtgggcacctagtcaagtccgatggggtcatcacctcttgcctcgattgcttcttagatgggggcagcctgtacctctttgactatgctgtgtcgcctgctttcttcctcgccaaagcacggggaggaacgtgcaccctggctgcctctgaccccagtgacgttgtgatccaccgtgcacggtacctcctggacaatgggtttggcatgtactccttgttcaagaacaactgcgaggacttcgccatataccgcaagactgggctgcttgtggagaccgctttcagtgttggccgtagcgggcaacttgcgtctctgactgctgccttcagcgccgtggcctcgtcgcccttgcgtttcctgacaaccagtgctagtggcctggcaattgtgaccagcggcatgtactgtgtcgggcggtatgtgtcggatattggtgtccggcgtgatgttgtcaaggtccctgtcgaaaggcttgtggagcagaatgttacttggattcctcagtgtgtggctacagagacagatatcgcggcaggagcaccgcagcagcagttggaggttccttgtgcggttgccgaggaagcatccgttatacagcccgcggcaccgtgatccattgctgaaatgtcatcatgtaccaggtgttggcatgagacaggacaactggaactacgtacttgtgtggaagtacatgtaacgatgtatctggtggtgttatgcaatccattgctgctgctgctgctaatggtgcaagcaatgatgatgatgatggatgtggttccatgaccactattaattattacagaattgagaagacctgtatttgcccttgatgattaatgatttctgttataccgttgcttatggatgc

SEQ ID NO: 27086 - DNA, 1237 bp, Zea mays
  Clone ID: LIB4720-022-A11_FLI
tcgaggccggccggggttcccgcaaacagttctcctctagggacggatcccctttcccccaactcccccaagcagccgcgaagagagatcccgcgctcaaccaccgcttctcggccgcggcccccttcggccctccttccctcctttcctccggtggccgccggggacggggaacgaagaagcctccatcactcctttcctccgttggtcgccggggacggggagcgaataagcctccctccctccttccctccggtggttgccggggacggggagcgaatcctccattcctccttccatccggtggtcgccggggaccgggatcgaagatgttctatggggccatggtttgggatccgtggctgatcgtgtcgcagatcgtgtgcctgcagtgcctctactacctgtcgctgggcgtcgccatggcgctcctcgtcggcacccgcgtcccgcgactcacccttctctacttcttcgacttcgccacgctcaccccgcgcacccccacgggttggtgcgccatcgcatcattcattcttgccgctgtcgcaggtgctgggttcatgctttatgtgattgagagagccaagaagtgcctggactttgcagcaacactctacataatccatctcttcatttgcattgtttatggtggatggccagcttccattacatggtgggttgttaatatcactggtttggcaatcatggctctcctaggtgaatacctatgcatccggcgggagttgaaagaaattccaatatcacggcttcgtgcaagtgtttaatctcacatggtaaaagagtacaggtgtttcaaattgtgttgccccaggaggtgtttgttaatatgttacttaaggaatacaatgaatgccttgttccgtggtttgcaatttgatacttagcaaacttcccatagagcgttcatctgatacccaatctcccagtaggccatgataaactgattggtctcagagttcccaccaacggaaatggcacctcagtttctaaatcattcattcaagtcctctttatgaaaaaaagcctgccctgcctcttatgaaaagaagtgttcctcccttgcctatgttctagtgacagctcgctgcttgacaacgtatgactagatatcaacatgtgcattctttagtgatatattgttcttacttcttaatgcactcatggactcttgtctagatgtatcttgcaaataatatatctagtgttatatgcc

SEQ ID NO: 27087 - DNA, 831 bp, Zea mays
  Clone ID: LIB4720-022-C3_FLI
cccccacaagacccccccacctgaatccacaccacaccgagaaaccacccaccccatacaatataaaccagaacagccctcaaaaacactccttctaatacaccccacactcattacccccaagagccaccccaccgggcgaactccccccacaacgaaccaacccacatacccccccaacccgcctctttttttttatccaccaaaacacccccacaacccacacaaataaacccccaaactataaccccccccacaacaaaatcacaacaccaaaaaccaaccaaacaccatcacacaaccacaaacaacaacaaataaaaaaaaaagtcacacatagaccatacatctcacttcgccaaaaaaaattccgtcaacagttgaagttatacccatggcaaaactactcttgggtttgctccttgcccttgctattctagggacaacatcggctgctggttgtgtacaagacgcggaagacatgaaacgagagtgcaagcagtttgagctattcccagcgaacccaaagttgccaccgtcggcagcatgttgtgctgtgtggaagagggcagatgttccatgcctatgcaaatatgctaacaaggaagtagagaaggtatggtgcatggagaaggttgtgtacgtcgccaactattgtaagaggccgtttcaacctggctacaagtgcgggagttatacagttcctcttagtatgtaaaaggagtggttgggacatgtggtactctctcctagaactttaatttgagatttgtaacatgtgagagactattgagaataatatgtatggagtaatatgcttccttcttttag

SEQ ID NO: 27088 - DNA, 1630 bp, Zea mays
  Clone ID: LIB4720-022-F10_FLI
aaaaaaaaaaaaaaaaaaatccccaatcccatcggtcagcctcatccatccgcagggcgccggcggcgggagtcttgccggccacatcgtcgccgatttcaccgatccgagctccggcctcttagccatggaatctccacgaactctggaagccctcaccaacgacctcgtggtggagatattcctccggatcggctcccctgccgacctcgttcgcgcctccgccgcctgcgtcgccttctgccgtctcatcgccaacccctccttcttgcgccggtaccgctccgtccacccgccgctacttctcggcctcctcgacccttatggcgatatcgaacccaccgagacaccccatccctccgctgctctcgctggcgccgtcgctcgcgccgctgacctccgcttcggcgagtattttcctagcagcaagttatccggctattgtgtctctgacgtccgagacggtcatgtcctcctcaccatcacgccctaccttgaggacgacgaggatgagaagttggtgccagacctcgcggtgtgcgaccccctggcccgtgtatgcctacgactgccccccataccagacgaccttctcgcctccgtccaggttcagcagcaagatctcgtacattatagttgcgatacattccttgtcccttcaggagatgaagaagatgtcacttcttttagagtgatcgtcatgatgagatctacacagatgctagtcgcttttatcttctcttcaaccactggtgattggagtgctggttcacctttcagcctgggttctctgagaataccatacgacaacattccgagttatgcttatggctgcttctactggaaagtcgagtctgagaacaggttgctcacgctcaacatgagcagtatggagttctcagtcgttgacctcccacctgggcccgataggagtttcgtcatcatggtggaggcaggcgaaagcaggcttgggatgtttagtctaattaaccatggtaccactctctgttatgccattaggcaaattgggagcgagaagtccaatcagttggagatggacagtgtgatccctttacctgagggttatatttactttcgcattcacggttcatatgaaggacacattctcatatttggatacgcgtttagtgaagacgcatgcttcgcacttgagatcaagactatgaagattgagagagtctgtcggaagtggcgtggtttctgtccttattttgtgttcctgccatccatgtcacaaaggaggatataatgtggactgaattcacatccaggtttggggcttcttccaatccattctgctggtgtggagttgagctaggtgatggcacaggccctcatgtagatgtagcacatctgcaacactgtcccatgttatcctcctagtctgtcgtattgtctagcttacattagtagctactgaaactttagttatatctatatttttaagttctcccgactgtaatttaagatgtgacaaaggcgtctttagtgtatcaagagccaacttttataagccggctctgtgtgctgcgaaatcacgtgtttgctagtcttgtgtagaattatcatgccagcatcatcagacatggtacggtcagcatgtttctcg

SEQ ID NO: 27089 - DNA, 1728 bp, Zea mays
  Clone ID: LIB4721-003-E1_FLI
actgtagattagttcaatgtttggagtttgaaacagaagatgacgtcgagaatttatcggagacattctatttcactttccaaacaccgctgtcccttcccctcccagcgctacccaccatctccgctcttccctctccggctcatccccgccgggcttccgccttcctgcacacctcgccccgtttcttcctcgaacagattctctgccccaccccgattctacctataaatcacaactgcacacccccgaatcccggcaaaacccaacggccgaagctaagctcgagccgccgccgcgatgatcctccgtatccgcagccgcgacggcacggaccgcatcacggtcccagactcggcctcagtcaccgtcgccgacctgcagcgcctcatcgagtcgcacctcaccgtgcccgtcccgctccagcgcctctccctcgacccggccctcctgctccctaacccctccgccgctgtcccactcctcaccgactcggcggcgccgcttgcctcgctccgcctcgccaacggcgccttcgtctacctcgcatacccgcccgacgcgcgctcggcccgcccgccgccgcccaaggcactttccgccgctggctctttcggcaaaaagatgaccatggatgaccttatcgcgcgccagatccgcgtcacacgccaggagaacgcgctctgcgccgccgcctcttttgaccgcgatgccgccaacgcgttccagctctacgtcgccgagttcctcggcttcggcgtcaagcgggcgggtttcctctacggccgcgtcgacgcagagaccaaggatgtcttcgtcgactttatctatgagccgccgcagcagggctccgaggacgtggtccacctcttgagggaccccgacgaggaggcccgcgtcgataccatcgccgaggggctcgggatgcgccgggtcggcctcgtgttcacgcaggccgttgggagaaaggccagcgagactggtgagtacaccatgtccaaccgggaggtcgtgcaggcggcccagctgcaggctgagggcgggatcccggagtgggtcaccgccatagtcaaactggaggtgggggatgacggcaccggggatgtgcacttcgaggccttccagatgagtgagatttgtgtcaagctcttcaaggatggggtactggaaactgaggttcaggatgctgatgatccccgtctgtcaaagatgcggaaagaggtggtggctggggggaaggatactatggaggtggataatgacttcttcctcgtgcccgtcaagatctctgatcaccagggtccactctcagtaggctttcctatagagaaccgtggaaatcctgtgagcattagcgcgttgagaagtcacctggagcggatgtagcatttggcatttgtgaagcggatctcggacttccatttgctcctcaagctcgctactttcctagatgtaaaggcagacatgcctactatagctgcatgtgtgaaaactcagagcagggtgcccgaggggtaccagcttctgatcgagtcctttgctagccagggataatatcgcatctgaaagcatggcatgtcgatgcataatttgtttacttgatcacatcatgcatgtgtaacttatggatgtctcttggtgtataagtattgagtgaattccttctttgccatcaaaatatatgtttattccttctcatgtcatgaaataaaagttgccttcagtgcc

SEQ ID NO: 27090 - DNA, 1104 bp, Zea mays
  Clone ID: LIB4721-004-C6_FLI
attcaaaaagcactgacgggagaagcttgagctagctacgccaatggctatagggcacaagaacaccaccaaagtggcgctcctagttctgctgctgtcattgatgctctctttgacagcgtcagtggcgcgcaatctccaatggcgactgtccgtcgctacggctgtggaggtgtgcgtgaaggctgctgtcggggctcctgacaagcttggcgactgtcccttctcacaaagggtgctgctcactctggaggagaagaaggtcccttaccggatgaggctcattgacctcagtaacaagcctggatggtttctgaagatcagcccagagggcaaggtgcccgtgtacaacagcggcgatggcaaatggattgctaattctgatgtgatcacccgagtcatcgaggagaagtacccagccccgtctctggcgacgcctccagaatacgcatcagtgggatcgaagattttcccatccttcgtcaagttcttgatgagcaaggatgccagcgacgacggttcggaagaggcacttgtgcgtgagctgcaggcgctggaggagcatctcaaagcccacgggcgtccctacatcagcggggagagagtaacagccgccgacctcagcctggcgccgaagctcttccacctggtggtggcgctggagcatttcaagggctggaaggtgccagaaagcatgtccagcgtccacgcctacacccaggctatgttcagccgcgaatctttcatcgagactaagcccaccaaggagcacttgatcgcgggatgggcggcgaaggtgcccaagccgcccaacctcgtcgtgccttgctggctcatctgatcagtcgcagtcggtggtgcgttgctggttcattatgattgggttgggatacaacaataatgcagcgtgccatgttccgatcacttcccagttgtggtggccatgtttctatatcacctaacgctgccggttaggttcgggaccgtgggcatctgcatcgatctttttcttttcttttcttttaagattacacaccataacatggccttgtgcatctgcactcgtgatgggcatatttgtgacgtggaaatatcttctttctg

SEQ ID NO: 27091 - DNA, 1785 bp, Zea mays
  Clone ID: LIB4721-004-F12_FLI
aaaaaaatagaggcagaagtactcaatcccgagactaacgccgagccgtgttgtggtctgcggagcgtgcttgccacactcacagtcgcgcactccctgtgcagctgtgctcctgtcggttgtcgccccgcttcatctgtcgtctcctccagtgccgtccgcccgtccctcctccccctgtctccgccccaactctctccagtctcctcgcgtcggcagtcggcctggcagggctgaatcaatggcggtcgacccgcggcaggtcgtggcgggcttcctcaccctctccatgttcgtcatgctgggcaacatgatcaagcacgaccacttctctcccgtcaccgaggggatgggcttgaaggcaacaggtgcgcgatcgaacacaatgaagcttgataacaatgctgaaatgaacagtgtcgatatggctggagtggaggacctgatggacactatcgaggaagttaaaccttgctggaccaaaccaagtccaaaaaatcagccatctaatggttttgttacattctccttgactatgggccctgaatatcacatctcacagatcacagatgctgtggttgttgcgaggtatctaggtgcaacatttgtactcccagacatcagaggaaatgaattaggaaataagcgaaaattccaagacatgtacaatgtggataaattcgtgaggagcctagatggtgttgtcgaagtaatagatgaaatacctgatgaagtgagtgctaagaagccagcagttatcagagtaccaaaccgtgtgactgaaagcttcatcatggacaccatccagcccatctttaaaaaaaacaagtacttaagacttgcggtcattttctcttcagtaagtttaaggccaaaggagacgagtaacaaggacttggatgcgactgcttgccttgcaatgttcagtggcctcgaactgaagcatgaatattctgaagtcgccagaaaaatgttggataggcttcaagaattaagcaagaaatcagatgggaaggtcttggcaatcgatttgcggaccgacttgctggaaaagaagagttgcaagacaaccagtggtgctcgaagaaaaggctgctataaccctgatgaggtcctggctttcctgaggagtgttggcttctctgctaatactaccatctacttgacagagacgtggtggcacaaaggcctgaatgatctgaaggaggaatttccaaatacttataccaaggatgacattatgccagctgagaacaaaggtgaattcctgaaatccagcaatgcagacctagcaagcgctttggaccttgagatctgctcgcagagtgacgcgttcatccctgctgtcgctggcctgttctacgggcatgtcacaggtaagaggattgcatctggtcgtacccagatcattgtgccttctcagtccagcacctcgactcatgcttcagatttcacctccacctacatctccaacaagaaccacctagcctacacatgctgctgttagcatgcttttgtactgccattaataagatcagctgaagtgagccgcagggtagtgctctgggtgcatatacaagtacctctcgttagtcgttaacatgctgttgtacactggttgatgttatgttatgaggaataaatattagcatatgttgtgtgttgtttacttgtttggatattaaactttggaacgacagcaaggatcataatgactgcttgtatgctgtaaaatgaacgcgaggttaggcgtgtgaaaagagtttgcttcatgtaccttgattg

SEQ ID NO: 27092 - DNA, 1520 bp, Zea mays
  Clone ID: LIB4721-006-G10_FLI
cccgtccgcctccctctccgcctcccgtccccaaggccaatagttttcaagtggcaatgccggaccaggctaaccaacccactgtccttcataagctcggtggccagttccacctgcgctcgatcatctctgaaggtgtacgggcccgtaacatatgcccatctgtctcatcttatgaaaggagatttgccacaaggaactacatgacccagagccttttgggcccttcgatgtctgttagcggtggcatcaatgtcccagtgatgcggaccccgctctgtgctaatgctcctgctgagaaaggaggcaagaacttcatgatcgatttcatgatgggcggtgtttcagctgctgtttcgaagactgctgctgctcccatcgaacgtgtgaagctgcttattcagaaccaaggtgagatgattaagtctggtaggctatcagagccgtacaagggtattgttgactgcttcaaacgtaccattaaggatgagggtttctcttccttgtggaggggtaacactgctaatgttattcgttacttccctactcaggctttgaactttgcatttaaggactacttcaagaggttgtttaacttcaagaaggatagggatggttattggaagtggtttgctggcaacctggcctctggtggtgctgctggtgcttcctctttgttttttgtgtactccttggactacgcgagaacaaggttggccaatgatgcgaaggctgccaagggaggaggtgaaaggcagttcaatgggcttgtggatgtctaccgcaagacactcaagtctgatggtattgctgggctttaccgtggatttaacatctcctgtgttggaatcattgtttatcgtggtctgtactttgggctctatgattccatcaagccagttgtccttactggcaacctccaggacaatttctttgccagtttcgctctgggttggctgatcactaatggtgctggtcttgcatcttaccccattgataccgtccgcagaaggatgatgatgacatctggtgaggctgtcaagtacaagagctccttggatgcgttccagcagattcttaagaaggaagggcccaagtccctgttcaagggtgctggtgctaacattcttcgtgccattgctggtgctggtgtgctttctggctatgaccagctccagatcctcttcttcggaaagaagtacggttccggtggtgcttaaatggagaaatatgatgacgaacaagagcagtgtgtgttcccggtcctttccaatcaggatctggtgaagtttttgcctttcatatcgaagaaattaataattcatgtagagggaggattcttccaacaatttgttttggatggagacttagatctccaaacactcgtaactatcctactaggtggtgacatcagtccccaaaaacgtttatggtcatagagtctgcccttcgtttgtcagtcgggcaatttttcttgcatacaatgccttcgtttaagtatcggatgagttgctgcgact

SEQ ID NO: 27093 - DNA, 1280 bp, Zea mays
  Clone ID: LIB4721-006-G4_FLI
ccggaacaacccagcagccatcatgtcgcgcaggctataccaacacgcagcggtgatgtctgcttgggctccggctgcctatacgctcgtcttgctccttcatcttctagcaggtgctgtcgtcactgctaagaccaacaatggtgttgatcctggtcctaggcagcaggagccctctatgcccgtggactccagcggtgacgaagccctctctgcgttgacctggatggcaaccggtagtgaagcctcgaaggcagctgaggctgtggttgactggcataaacacgacagcaagaggatgctccatgcggtttaccgtgttggggatctggaccgcacaatcaagtactacacggaatgctttgggatgaaactgctgaggaaaagggatgttcctgatgagaagtacaccaatgccttccttggctttgggccagagaacaccaactttgcagttgaattgacatacaactatggcgttgacaagtatgacattggaacgggctttgggcatttcgcaattgctaatgatgatgtgtacaagttagctgagaatatcaaatccaagggtggtaagatcacccgcgaacctggtcctgtcaagggaggatccactgttattgccttcgcacaggatcctgatggctacatgtttgagcttatccagagggctgacacacctgagcctctttgccaggtcatgcttcgtgttggtgaccttgagcgttctatcaagttttatgagaaggccctagggatgaagctcctaaggaagaaggatgtacctgattacaagtataccattgccatgttgggctatgctgatgaggacaagacaactgttctggagctgacgtacaactacggagtcacagaatacagcaagggcaatgcatatgctcaggttgccattggcaccaatgatgtgtacaagagcgccgaggcggttgatctggcgaccaaagaactaggtggcaagattttgcggcagccagggcctctacctgggatcaacactaagatcgcctcttttgttgatccagatggctggaaagtggttctggttgacaacaccgacttcctcaaggaactccactgaaggctcgggatacccaggtgctgtgctaggatgtagtaatgcttgtctgtggtgtaataagatgtgggtggtttgtttctgccctgatgaacttataatactgaatgttgctacagaggttgtgcttctgccagtgaggtttgggatttgctatgtaactgtgcctgcgggctccgattcg

SEQ ID NO: 27094 - DNA, 1056 bp, Zea mays
  Clone ID: LIB4721-007-G3_FLI
tccgaggccggccgggacttttttttttcccctcactttccctttctccctcgagaaggccgtctccagttcatcaccctcgtcctattccttcgtacacaggccatcatcagacgagagggagaaccagcgaggactgccaagaagatgctgaagagactgctgacgaagactaagagcaagaagaagaaggaggctgcctcctctgccataccgacgttggatcggctccatgagactctagagatgctggagaagaaggagcgtttcctccagaagaaatgttccgcggaaatcgagaaggcgaaggattacacaaaagcgaagaacaagaacgccgcaatccagtgcctaaagaagaagaaactgtacgagacacagatcgagcagctatcgaatttccagctgcgagtccatgaccagatcataatgctcgaaagcgccaaggcgaccacggacactgtcgacgctctgcgctcggggtcatctgctgtcaaggcgatgcagcaatcagtgaacgtggacgacatcgagaaggcgatcgaggaggcgaacgagcagacggagagcatgcgggagatgcagcaggcacttgcgacgccgattggcgcttccgctgacttcgacgaggacgagctagaagcgggctggaagagctggaggaggaggaggaggaggaggagggggagatcgaggacgagctgcctgagccgccggcgaggcggtccgtggaaccatcggcgaaagcggcggcgtcttctagacagggcagtgatgtgagcgagctgaccaggcttcaggcagagatggccctctagctgtctagcagtgatgtgatgtgagcgagctcggcgttgcgcctgtattgtacacacgtgttttgctgtaaattcatcttgttctagaagacaagacacggcatagatgagagaatctggacggctgtctcgcgtcggtgtccggcggacgatgccagccggcagaagcagtttgactttgacggtctcggattgcggtccattgttccaacagatacgatgcgataacattattctt

SEQ ID NO: 27095 - DNA, 1269 bp, Zea mays
  Clone ID: LIB4721-009-C1_FLI
ctcgaggccggccgggatccgcttccgctccgtttggtttccaccctttccgcgtactccacgtcgccttctcccatctcctctttcctacccaccgccgccgctccagggccccgaaatgtcggacgaaggcggcaccggcgagccgctcagcgacagccagaagcgggagatcgccgcctggttcctctccaacgcacccgccggcgagatccactacgtcgccaaagatgtgcgcgcgctgctaggggacgacgcggtacgaggccgccgccgcggaggccttcccggagtacaacaaggcccgcctcgtgtccctcgagctccccgaccgcagtggcgacataatcatcacaacttatggggagattgacaagaacaattatctggaccccaggactgcgcaagttgctactatagatcatatgaaacagacttgtacgaaactgaggcccgctgaagatgaggagcttccatcggcttacattgaagagtttaggtgtgctttagatgttgaattgtcaaaatatgttgctgaagcttatcccaaagggacctgtgccgtttattgtactagtggaaaggatatagagggaccaggagcagatttcagtttcgcagcagttatttctgctactaagcgtagcccacagaacttttgcaatggcagttggcgttcaatttggactatggaattcaattatgagttgcagtttgttgatattaaaggaaatatacaggtagatgctcactattttgaagagggaaatgtccagctggatactaacattgatcgcaaggactccaccataatgcagtcacctgacgactgtgcagtttcaataactagcatcattcgacatcacgaatctgaatatttgtcatctctcgaggaatcatacttaaatttgtctgatgcaactttcaaggatcttcggagaaaacttccagtgacccgtactcttttcccatggcataacacactggcagtcagtcttacgagagaccttgccaaacaattagcgcttggaaaatgaagtctttgcaggccatgtcaccgggtggcttcaagtgtttttttaatatccatgtgctgttctgtagtaatcagcattcttctctgagcttcctaatcccattgtaaatcaagaacacacttttttttttgtggatttgtaaaagatttcgccttccctagggtttctttggatgccgtaggaaccaaacagcctcttactgacgtgtgttaatcatatgtttcttcagcag

SEQ ID NO: 27096 - DNA, 1170 bp, Zea mays
  Clone ID: LIB4721-011-D3_FLI
ctcgaggccggccgggactcacaaggcttttacacgactagttctgcgaggctaagagcagaaaaaactccacctgcctggctgatttcatcaactccggcggcttggagaagacgaagctgctccagaatccgataggaagtttggtgctcgcgtgttgacgggttgatttcggtgcgccgatggggcaggcgttccgcaagctgttcgatgccttcctcggcaccagcgagatgagggttgtgatgcttggtctggatgccgccggtaaaaccaccatcttgtacaagctgcaaatcggggaggttttgtcgactgttcccacgattggtttcaatgtcgagaaagttcaatacaagaatgtgatgtttactgtttgggatgttggtggccaagaaaagttgaggcccttgtggaggcactacttcaacaatactgatggcttgatctatgtagttgattcattggatcgggagaggattggaaaagctaaagctgaatttcaggcaataatcaatgatcctttcatgcttaacagtgtcatattggtatttgccaataaacaagatatgaaaggggcaatgacaccaatggaggtgtgtgagggccttggcctctacgatttgaagaatcgcacctggcacatccaaggctcctgtgcgcttaaaggtgatggcctttatgagggcttggactggatggcaagcactctgaaggaattgcaagcttcaggtcgcctaccctctggagggacatcattgctctaagaagcaaatctgcatgtaagatccttgggttgatactagtaataatggatcaagagatcatcaatgatgttaacatcttgatgagaatttcctttcaaattcatgctgcactgctcaggctccgtggggtgattctactaaagaaaaggtgaaacatgggcctgaccgcataaaaatatcggtcatgcgtttgtactcacccctggggatttcttgtcaatgatctaacctgtgatataggccttgtaacttccgttgtgagtaagtttcattcaaagctaaccggcggatgcatttgtcacatatgagaattgaggagtcaacttccacatcctgttgttgtaagaatttctgtaaatcgaagttggcaaacataatttatctcaacaagttggtccggtcg

SEQ ID NO: 27097 - DNA, 652 bp, Zea mays
  Clone ID: LIB4721-014-A5_FLI
ctcgaggccggccgggggcacggggactctagagtaaaccccggtgccaccgacggcggcggcgacgaatcgagcaggcgcggcggccatggcggcggcggttgagagcgtggtggtggtccataacgtggcgaagcggcacaacgtggggacgctggcgcggagcgcgacggcgttcggcgtcgcggaggtggtcgtcgtcggccgccgcgatgtcagcgcctttggcggccatggcgccacctcgcaccttcgcttccgtcacttcgtctctctcgcgctcgcccgcgcctacctcaaggatgagagaggatgtgacatttgcggcgtggaaatcaccgacgacgcgcagccggtgaccgcccacccgttccgtcggagcactgcgttcctcttcggcaatgagggtactggactttcacaaaaagagtgcgagatctgtgacttctttgtctacatccctcagtatggtggtggaactgcatctctcaacgttactgttgcagcttcaattgttctccaccactttgggggtaaaaatccactctactccagtcaccacagcactctttttttctgtaatatattgaagtgttaaatgttggaatgtgcaaagtagcaaaagtcaaatcatgttcttgcttttgaacgg

SEQ ID NO: 27098 - DNA, 1474 bp, Zea mays
  Clone ID: LIB4721-016-D6_FLI
tttactcgctcgaaccaaaattacccaacacgggcaacactccacgccaggagtgggcgagtggcacaccgcacaccagccttcgtcttcctcgcggtttcgtccactcccgtcgcccgttccacctgtgacctgccaaggcaccaagcctgaccgacttcgcttacggttcccggtgacccccgcccaccctcctcgcgatgtctgacgtcacctccgactcggcgcagagacgccgctcgccgccgccgccgtcgccgtcaccgtcgatgccgcgtttccagcagcagccgagcgggcgccagccgcccccgcccggagccgaccccttcgccttcggcatcgtggccttcattggcatctgcttcgtcctggtttcactctcagtcccatcaagtgttctacatcaagttcctgaaggacatgttggggtgtactggagaggaggtgctcttctgaagacaatcactcctccagggtttcatctgaagctccctttgatcacccagtacgagccaatacaggttacttcaaacagaccaggtcagagatattccttgtggaacaaaaggtggtgttatgatcagctttgacaagatagaggtcgtgaaccgccttcgcaaagagtttgtgcatgaaaccctactcaactatggtgtgcactatgacaagacatggatatatgataaaatccatcatgagattaaccagttctgcagtgctcacagtttgcagcaagtttacattgacatgttcgatcagattgatgaaacaatgaaagaagctattcaaagagactgtacacgctatgctcctggaattgaaatcatcagtgttcgtgttacgaagccaaatatacctggtagtatcagaagaaactttgaacttatggaggaggagcgtacaaaggcactgatcgccatggagaagcaaaaggtagcagagaaggaggcagaaacacagaagaagattgcgctatctgaagcagagaagaacgcacaggtgagcaagatcctgatggagcagaagctgatggaaaaggacagttccaagcgacaggagcagattgataatgacatgtacctcgcacgagagaaagcagtagcagatgcaaactactacaggatattgaaggaagcagaggccaataggctcaaactgacacctgagtatcttgagctgaggttcattgaatcaatcgccaataactcaaagattttcttcggtgaaaagattcctaacatgatcatggatcaaaggttgctcaagaactaccttgatgctgctcctaggaaggaccattatgagatgtagaagcgtgttccgtgagttggaagcaaaagacctttgtgtgtgtgatcccaccgtccacgcagtagataggattcccacgagccgttcagtacctcagtaagccagaaaagactcataaggaccctcttgaagatttagatgcaaaaattttcttcgccag

SEQ ID NO: 27099 - DNA, 849 bp, Zea mays
  Clone ID: LIB4721-017-G1_FLI
ccggccggttccgagatcgatccgtgtcgagttttccgggcccgagctggaaagattcggcaagtacatctgatcttgtagcatatactagtgttgtacactgtcctcccatgccccagtggcttgctttcctgcaacaagtgaacccacatcctcctcacctcagcagcctcaccgcccatcgcagactctgcgcggctgctgacaaagagtgcagaattgccaagactagtacgcggacgacgaccagcagcagctgtccgggttccatggagggcggcgacggcgagacgacgctgtccgggttcggcgtcggcggcgtggacaccaaggtgctgcacgcgttccagaccagcttcgtgcaggtgcagacgctgctggaccagaaccgcctcctgatcagcgagatcaaccacaaccacgagtccaaggtgcccggcgacctctcccgcaacgtcggcctcatcagggagctcaacaacaacatccgccgcgtcgtcgacctctacgccgacctctcctcgctcttcgccgcatccgacggcgcgtccgagggcgggtccgtcggcaccgtccgccaggcgggcgccgccggacacaagaggatcaggtccggcctcgactgacctgtttaattaggcagcttcaagatcatcccccttcgtcttgtcttagcttagtacctgtaccagtacagtagctatgtcatgccagtgccaccaccagccagggagggacctcccttttcatttttgacttgagctcatcttctcaattgcatctgtccacaacgtacgctatatctatatctatcgatattatctcctctgctacaattaattactccgg

SEQ ID NO: 27100 - DNA, 1346 bp, Zea mays
  Clone ID: LIB4721-018-A8_FLI
ccgggcagacccgtcccgcgaatctaaggtcaaaccaaccgcgatccgcgaatccgcgggagaggaggggaggggcgcgggggcatggagttcctgcagggccagaggctggagaccacgctggccgtcgcgggcgccgtcgttgccgtcgcagccggctccgcctacctcttcctccgcagtaggaagcccaggggatgcctagaccccgagaacttcaaggagtttaaacttgttgagaagaggcagctgagtcataatgttgccaagttcaagtttgcgctcccaacacctacttctgtattgggtcttccaatcggacagcatataagctgcagaggacaggatgcttctggcgaggaagtgatcaagccttatactccaactactctggactctgatgttggatcttttgagcttgttataaagatgtatccccaaggaagaatgtcgcatcatttccgtgagatgaaagttggtgattatatgtctgtgaagggacctaagggccgtttcaagtacctacctggacaagtgagagcatttggaatggtagctggaggatcaggcattactccaatgttccaagtcacaagggcaattcttgagaacccaaaggacaacacgaaagtacacttaatctatgcaaatgtcacgtatgaggatattcttctgaaggaagaacttgacggcatggccaaaaactatcctgatcgtttcaagatctactatgtcttgaatcagcctcctgaagtctgggacggtggcgtcgggttcgtgtcgaaggaaatgatccagactcattgcccagcgcctgccgccgacattcaggtattgcgatgtggacctcctcccatgaacaaagccatggccgcgcacctggacgaccttggctacacgaaggagatgcagttccagttctaagtgttacattctctctaccagtaccagaataaacgggggtggaacaagtttcgtcgcctctttgagcagacgaagcctgaccatatcgctatatagctccaaacagacgcggtttgccactgacagtcacagagcgtcgtacttaaggggtgtttggtttatagggactaaactttagtctctccactttattccattttagttcataaattattaaatagggaaacttaaatagagttttagtttctatatttagtaatttagggactaaaatggaataaaatagaggactaaaaattagtccctagaaaccaaacacccctttactctacctggatgaaagcagcagtacagtacccacctaatttgtatcggtgtcgggacattgtaccatgccgttcttttgtatcggtttgtcactc

SEQ ID NO: 27101 - DNA, 742 bp, Zea mays
  Clone ID: LIB4721-018-B4_FLI
gagggccgcgattcgctcccggttgtccccccgtccacgaggcgtttcggcgcttgatctcgctgcggtagtgcggttacgttcgacccaggttcttcttcccagttgctcggctgttacttttgtggtctctttctttctttctttttaccgtcctgtctgtctttttttttgtgtgtgcgtgtggttttccgccgcttcaacgcaccaattcttgatcttctttacgcgggtctcccgataacactaaactcgggtggttcttgtctgttgcttcaccactctgctgcggtgctgttttgcgcctgcgcaggagaacataccgatcgaggaggtgttcgagaacctccgatgcaacccgcagggtctcaccacggagcaggcggagcagcgcctcgccatcttcgggcccaacaagctggaggagaagcaggtgaaggaacccgccgccttggcttccatgcgtttctgttcctggtgctccgtctcgcaccaagcttacatgatggatgtgtgcgcgtgtctatgtgtctgcaggagagcaagttcctcaagttcttgggcttcatgtggaacccgctgtcctgggtcatggaggcggtcgccatcatggccatcgcgctcgcgaatgggggagtaagttctgccgcatcttttttcacaccgtgtggacatggccttcagccctcagagcgggcgttctggagactggcgtcagaggttttccccggccggcctcgag

SEQ ID NO: 27102 - DNA, 1117 bp, Zea mays
  Clone ID: LIB4721-020-A8_FLI
ccacgccacccagaccctgcagcagcagttaatcgtcacgcccccatccttccccagcaaacacaacacaagcagacggggagagattcagatccactcgtcacacatccgcgttaccccctctcccttggtttcctctcccaccaccaacccccatcccggttatctccgccgccgcccgctttgggaaggcgcgacgaaggcaggcgagaggctccagccggacgaggaggaaagaggagcagcagggccggaggagagatgttcctgtgggactggttctacggggtgctggcctccctcggcctgtggcagaaggaggcgaagatcctcttcctcggcctcgacaacgccggcaagaccacgctgctccacatgctcaaggacgagcggttggtgcagcaccagccgacgcagcacccgacgtcggaggagctcagcatcggcaagatcaagttcaaggccttcgacctcggcggccaccagatcgcgcgccgcgtctggaaggattactacgcaaaggttgatgctgtagtatacctggtagatgcgtatgataaggagcgatttgctgaatcaaaaaaggagctggacgctctcctgtcagatgattccttggcaaatgttccatttctcatccttggcaacaagattgatatcccgtatgctgcctctgaagaggagctgcggtatcacctaggccttagcaacttcacaaccgggaagggcaaggtcaaccttggcgactccaatgtccggccacttgaggttttcatgtgcagtgttgttcgcaagatgggctacggcgatggtttcaagtgggtctcccaatacatcaagtagggcccttgccggggcgcttgctcagcccagcgatttttttgccttgttatttgttctggttggtatttcgtcacgtgaacgatgatcatcatatcatgacagtatcatggaggggtatgaagaggaaaaaacagtgcttaacattggggaacatgttgaatctttagcgtgaaaacattttgttatgtcagtcaaactcctggaattcttttgcttttccgtaggacctttactaaggacttgcctgcgatgcattataagattattgattgct

SEQ ID NO: 27103 - DNA, 1664 bp, Zea mays
  Clone ID: LIB4721-021-A4_FLI
tagcgaagtccagtagtgcaactcaccccttcctggtcctgctgctccgccctctccacctagctaccactcccttagagcgccactgccaagccatggcgggaggaggggcggcctaccagagctcgtcggcgtcgccggactggctgaacaagggcgacaatgcgtggcagatgacgtccgcgacgctggtgggcctgcagagcatgcccgggctggtgatcctgtacggcagcatcgtgaagaagaagtgggccatcaactcggcgttcatggcgctgtacgccttcgccgccgtctggctctgctgggtggtgtgggcctacaacatgtcgttcggcgaccggctgctgcccttctggggcaaggcgaggccggcgctcgggcagcgcttcctggtggcgcagtcccagctcacggccaccgccgtgcggtaccgcgacgggtcgctcgaggcggagatgctccaccccttctacccggccgccaccatggtgtacttccagtgcgtgttcgccagcatcaccgtcatcatcctcgccggctcgctgctgggacgcatggacatcaaggcctggatggccttcgtcccgctctggatcaccttctcctacaccgtctccgccttctcgctctggggcggcggcttcctcttccagtggggcgtcatcgactactccggcggctacgtcatccacctctcctcgggaatcgccggcctcaccgccgcttactgggtagggccaaggtcggcgtcggacagggagcggttccctcccaacaacatactgctggtgctggcgggggcaggcctgctgtggctcggatggactggcttcaacggcggcgacccgtactcggccaacatcgactcgtccatggcggtgctcaacacgcacatctgcgcctccaccagcctcctcatgtggaccctccttgacgtcttcttcttcgggaagccgtcggtgatcggtgctgtgcagggcatgatcaccggccttgtgtgcatcacgcctggcgcaggcctggtgcaagggtgggcagccattgtcatgggaattctctcaggtagcatcccctggtacactatgatggtactgcacaagaaatggtccttcatgcagaggatcgacgacaccctcggcgtattccacacccatgcggtcgctgggctcctcggcggcgccactactggactctttgctgagcctgtcctctgcaacctcttcctcgccatcccggactccagaggtgcattttatggtggtgatggtggatcacagtttgggaagcagatcgctggcgcactcttcgtcattggctggaacattgttatcacttccataatctgtgttcttattggcctagtcctgcccctccgaattcctgatgcacagctgcttatcggggatgatgctgtacatggtgaggaggcgtatgctatatgggcagaaggcgagctcaacgatgtaacccgccaagatgaaagcaggcatggcagcgtcgctgtaggagtctcacagaatgtttgagcatagttcttgtaaggttgaaagaaagaaaaatacaagtgcatttgtttgctaattgctattaactgatggcacaattgtatgcaacaaaacacctgttcacggaggaatgtagagtgtcaggatttgatt

SEQ ID NO: 27104 - DNA, 1151 bp, Zea mays
  Clone ID: LIB4721-021-E4_FLI
ctcgaggccggccgggtccgcgatcctcccccagcgcgtctacagctgtctgcccgcgccccccctctcctccgcgatcctcccccagcgcgtagatcccggctccgcgacgagcgcctccgccccacgccatccgcgccgccatcaagggatctcctaccaccagcgcgtagatcccgtcaaccaagcgagtcccgccgtgaatgtcgcccacctccctccgactccgaacgcggggcttcaccagacaagaacgcgccaagcccgatgctcccaggaccacaccgcccaagccgtcgagcaaatccgcattgtgcaagtggtggcgcagcctcgcgcccgccctgctcgctgccgccgctgtggttcgggccaggaggagtgttcaaagtggccctgtttgcggacctgcattatggcgaggacgcgtggacggactggggctccgcgcaggacgccgcgtccgaccgcgtcatggccgccgtcctcgacgtcgagaacccagacttggtggtgtacctcggcgacctggtgacggccaacaacctcccggtcccaaacgcgagcctgtactgggaccgtgctgtctccgccgtctgaggccggggcgtgctgtgggcgacggtgttcggaaaccacgacgacatggcctttgagtggccgcccgagtgtttctcccccaacggcgtcccgccgctgcgctggccgccgggtccaggatcagggtgcggcttccgggggactccctagatggacctcatggcgacggagatcggcgcgaaccggctgctgtcctactcgtccagcgggccctgggagctgtggcccgacgtctccaactacgtcctgcaggtgctctcgcggggacggcgggcccgcggcgacggtcacgaccacgacccggcgctgctcatgtacttcctcgactccgacggcgggtcgtacaccgaggtggtgtccagcgctcaggtcaggtggttccacacccagtctcagttcctgaatccagatggaaggatcctcgagctcatcttctggcacataccgagcacggcgtacgccaaggtagctccaaaggccaattctgagataaggaagccctgcgtcagctccatcaatggatttcactttgtcttgctatcacgcattgc

SEQ ID NO: 27105 - DNA, 2101 bp, Zea mays
  Clone ID: LIB4721-021-E5_FLI
tggtgggtgcgcctcgcgctttctctcctcctcgccctcgcatgcgtcctcctcctcgccgttctcctcggctcccccgaccccggcgcctcgccgtccacctccgccgcgtcctccggatctgagaccacctcctcacctctcctccgtcagagaacttacctggagggaatcacggatgcgctcaacatgactgacgaaatgctgagcgcccgctcgttctcgaggcagctcatggaccagatttatctagccaaaacatatgtcgtcgttgccaaggaggccaacaacctgcagtttgtggcggagcttagtgcccaggtacggcgggcgcagagcatccttgcgcatgctgcagcctatgggggcacggtgatggagcaggaagcagagaaggcgatcagggatatgtcggtgctgctcttccaggcgcagcagcttcggtacgacagcagtatcacaattatgaagttgaaaggccagattcagtccctagaggagaagtcgaaagttgaggtggagaaaagcacaaaatatggccagattgctgctgaggagctcccaaagggactttattgccttggtgtccggttaaccatggaatggttcaagagtcccgagcttcagaggaagttttcggataggagcccagcagtgcagagcaatctgagggataacagcctctatcatttttgtgtcttctcagacaacatccttgctgtttcagttgttgttaattctacggctataaactcgaggcaccctgacaaggttgtttttcacttagtgactgatgagttgaactatgctccgatgaaggcatggtttggcatgaatgactacagaggggtcactgtggagatacaaaaggtggaggactttacctggctcaatgcatcgtatgttcccgttcttaaacagctacagaatgctgctacacagaagttctacttctctggcagtggtagtcgtggaacaccaattaaattcaggaacccaaagtacttatcaatgcttaaccacttgaggttttatattccagaaatatatcctgaattgcagaaggtggtatttcttgatgatgatatcgttgttcagagggacctatcagaattgtttactatcaacctcaatggcaatgtgatgggtgctgtagagacttgcatggagacattccacagatttcataagtatcttaaccattcccatcctctaatccgtgctcattttgaccctgatgcttgcggctgggcatttggtatgaacgtgcttgatctggttgaatggaggaacaagaatgtgacaggcatatatcattattggcaggagcgcaatgctgatcatactctatggaagcttgggtctttaccacctggacttcttgctttctatggcttggttgaagcattggatcccaaatggcatgtcttgggacttggctacacaaatgtggattttgctactatcaaggaaggtgcagtactgcactacaatggaaatatgaagccatggctcaaaatcggaatggagaagtacaagagcttttgggataactatgtggactattcacaccctttgattcagcagtgcttcatgcgttgattgatgtgtatcaacattagaatttttgtaagcttcatggtagatatgttccgagcacatgctccaactgccacacggaaacattgtagttaaatcagttggcttttctctcaagttacaatctctgacaaaacatcagtggatgtctatagcatctgtagttgatggaacacaacaattgcgtatctctagccacaggtaaacagcacacgagctgagactgctatgcagtaggctgctacttgaactacatccactacacagatcataacttgcgaccatcgatgtaattttcccattttttattttttgggtgagacatagccacagaatggagatggtgtagaattgattttaaattattgatgtgttacaacaagttttgtgttacctatccatatttattgggtgttaaagacttatggcagctaagcccttttctgtttatttatttatacatgttgagaagtaaagtctgatctcatttgcggctctaaag

SEQ ID NO: 27106 - DNA, 990 bp, Zea mays
  Clone ID: LIB4721-021-F2_FLI
ctcgaggccggccgggataatcccatggccggattcatcctgtggggccgtggcccgtgggctggccaagcaaacggacaaaagccccgccgccccgcgctttctccggttccttctctcccctgagaccaccaacgccggggccggaaaaaagggaagccagagcacagagccagacctggcggcgctggacatccaaaaacgccgccaaggatccttctctctctctctctctctcttcgcgtccatcgacctgaccgcggaggcgcgtgcttcttcttcccgctctccactgcagtgtcatgaagattgagggaaacttgcatgtttgatatacccagctgctttctgtaacgaaaaactcgtgatcattttgttgaattggtcactgtcagggagggatctacttgtcagtttttggtattaaggctgctggccttcccttgcagggtatctgtagaataaatgggagaagcacactcggatgaattttgccattgccaggggtgtgctggcaagtatgcactactcagagacgaagaaaacccacgattggcaatctttgagaggcggctgccttgctgtggttgtgggataggatggtctacttttcttttaggtttcttgtgtcctttgatttggtactttgcagccatactttactgctgcaagtactacaacaaggatcctcgagagcgccctggtctagctgcatctgctgttgcggctctcatcttcacagttctggcaattatcgctctctctgtggcactgataatctgtgtatacaagtagtacccaaagcgaggaaaacgcggtcgctggacctggaattcagaagaaacttgtaatttgagtgatagtagcatgcctttgcagtcatcctacatgcatcagtatcactatagcaagttgttgaattaaatgctgctaccgtcccggttgaccagtcggctgccgttgtttatcaacgaggatgttcattgctcg

SEQ ID NO: 27107 - DNA, 1640 bp, Zea mays
  Clone ID: LIB4721-022-A12_FLI
taccctcgaggccggccgggaaaaaaaaaaaaacagacagacacgagcaagtgtgagtgagcaggttcgcctgcccatctccatcgaccatcggccatcgctgcctccccagtccccacatccgcacacatttttacccctcgcggcagacccacgaccgccggggcgcagcggcgtcgccgcgggcaacgccgtcacgtcacgtgcatcacgataatctcctcctccgcctcgtcttcctgccagcccgcgctatataaagcgggccgcgggagcaccagcccagcggcagatcagtcgaggcgggcgattccagggtttagagaggagcggagatggtgaaggtcatccaggggcgcccggccgagatggggttccggatgccggcggagtgggagccgcacgagcagtgctggatgggatggcctgagcgtccagataactggagggagaatgctggtccagctcaagaggtatttgctagaactgcaattgccatttcaaagtttgaacccgtcacgttatgtgcaagtgccaagcagtacccgaaagtccacgagctgatggaacatcaaaccaacatcagggtcgttgagatgagcatgaacgattcctggttccgcgacatggggccacttttgtcactcataaaggggattcaggaattgcagaacaaacaatagcaggaattgattggcaattcaatgcctggggaggaatctatgacgactggagtcttgacagcgatgttgccaagaaaatagtcgagatcgagaggatccctaggtttccccaaaaaattatccttgagggtggaagcattcatgtagatggagaaggtacatgcattacaacggaagaatgcttgctgaatcctaataggaaccccaacatgaccaaactagagatagagaatgagctgaaggattttcttggagtctcaaaggtcatctggatacctcgtggactttatggtgatgaggatacaaacggccacattgacaacatgtgctgcttcatcaagcccggtgtgatcctgctgtcgtggaccgacgacgagaaggaccatcagtacgaacggtcggtcgaggcgctgtctgttctctcccagtccgttgacgcgaaagggcggcagctccaagtggtgaagatccacgtccccgggcctctgtacatgacagaggaagaggcacagggcgttgtttcatcgggacattctgtgccgaggccagcgggcacgaggttggccgcctcgtacgtcaacttctacatcgccaatggtgggatcatagcgccttctttcggcgacaggtgggacgaggaggcgtacgcggttctccagaaggcgtttcctgatcacgaggtggtgatggtcgaaggcggacgggagatcgcgctgggaggtgggaacattcactgcatcacgcagcagcagcccgtgcgcctgtcctaggtgaaacccgcgtcgacgcgaagcgatgaagagcgtgcgagtagtattagaccttgttcgtttctaccggattgatgggtcggaacgatttctgaccagattgcttctctaatttatataaactttgattagctgtaacgattccgggtgtaatccgacggaaacgaacaaggccttattgttttgg

SEQ ID NO: 27108 - DNA, 1139 bp, Zea mays
  Clone ID: LIB4721-024-H12_FLI
agcagttcgaagccttgggctcctggggcatcgccttcacccctcacatcctcaccgtcaaggccggcgaggatgttgcttcaaaaataatgacattctcacagcaaggccctcgcacagtctgcatcctttccgcgaatggtgcaattagtaatgttacacttcggcagccagccacatctggtggactagttacttatgaggggcgctttgagataatctcgctatctggttctttcctgcttgcggaggatggtgatactcgcagcaggactggtggcttgagtgtcgcacttgcaggatctgatggccgagttcttggagggtgtgttgctggaatgcttatggctgcaactcctgttcaggttgtggtggctagctttatcgcagagggaaagaaatcaaagccagcggaagcacggaaggttgaaccgatggctgctcctccaccgcagatggctacctttgttccacctccgctggccaccagccctccatcggagggaacatccagcgcatcatctgatgactctggcagcccaatccaccacagtgcgatgccgttcagcaactccagccagcatcaacaccctcaccagcaccagcaccagcacatgccgcctgcctacgcatccgggggttggtccctctcagtgcaccagcagaataggcatgattctgacatgaagatgatgtcgaactaacagtgctcaacctaggcgtcccatttgttggttgggctggagaggaaggaagctgctgatggttggtactgccgctatgaaatggtcttcttgcgccgtctgtcctgatcagtgaccccgtgttgctctggtcaatgacggtgtgtctgctatagctaagatagctaggaaggattagagtttatgggctcacttgctgttgttcccctgggtaagattaatttaatttgaattagccgctgttgtaatgctgtagccagtgtcctgaagtcgcttatcagtcagtccctgacgcgagctgtgatggttgcctgatgagatcttcacctcctagtcctaggctagttaaaatatcatttctctagtactatgaatcatgaatttacttggatgcttcggtttgattcaggaatttgatcgtattatgtttcgtcc

SEQ ID NO: 27109 - DNA, 1859 bp, Zea mays
  Clone ID: LIB4722-001-F5_FLI
gccggagaactgagaaagcccactcgttagtcgttactcccaacaccgggaatccatggagccggcctatgtcgtcaccctctccttcctcttcctcttcttgctccaccatctcctcggccgccaccgccgcaggaccaacggcaagaacaagagaacgcagctgccaccgagccctcccgccatcccggtcttgggtcacctccacctcttacggaagcctatccacgcggcgctcgctcgcctcgcggagcgctacgggccggtgttcttcctccggctcggctcgcggcaagccgtggtggtgtcgtccgcggcttgcgccacggagtgcttcaccgagaatgacgtctgcttcgcgaaccgcccgcggttccccacgctcctgctggtttccttcggcggcgccacgctcccaatgtgccgctacggctcgtactggcgcaacctccgccgcgtcgccacggtgcagctcctgtccgcgcaccgcgtcagctgcatgctccccgtcatatccgccgaggtgcgggcaatggcgcggaggatgtaccaatccgccgccgccgcccccgccggcgccgcgagggtcgagctgaagcggaggctgttcgagctctcccacagcgccctgatggagaccatcgcgcgaaccaagacgtcccgtgccgtggcggacgacgacacggacatgtctccggaggcccaggaattcatgaaggcgctggacgtgttccttccgcttctcagcggggccaacgcgtgggactacctgccggtgctacggtggctcgacgtgttcggcgtgaggaacaagatcctgcgcgcggtgagcgcaagggacgcgttcctacggcggctcatcgacgcggagcggcggaggctggaggaaggcggcgagaacaacgataagaagagcatgattggtgttctgctctcactgcagaagtcagaaccggaggtgtacacggataccatgatcatggctctgtgctcgagcatgttcgctgggggttctgaaacaacggcgacgacggcggaatgggcgatgtcgctgctgctaagccaccccgatgttctgaagaaagcgcaggcggagattgacgcgtccgtggggcactcccggctgctcggcgccgacgacctgccgcgcctcggctacctccactgcatcatcagcgagaccctgcggctgtacccggtcgtgccgacgctggtcccgcacgagtccaccgccgactgcacggtcggcggccaccgtgtgccgagcgggacgatgctcctcgtcaacgtgtacgccatccacagggaccccgcgatatgggcggacccagccgcgttcaggccggagcggttcgaggacggccgtgccgacgggctgttcgtgatgccgttcgggatgggaaggcggaagtgccccggagaggccctcgcgctgcggacgctggggctggtcctggggacgttgatccagtgcttcgactgggacacggtcggcggcgccgaggtcgatatggccgaagggggcggaatcacgctcccgagggctgtccctctggaggccatctgcaagccgcgccatgctatgcttggcgtcctcaagggactgtgagcgccatgctatgctatgccttaatacataagtaagcttattttcttcagtaaagcaatcatcttgcgtctcaagcagttgcttgctttattgattgacactcagtttcttcctggagtgtagccgccgcagtgtaagcgcgcggggttcaaatgttatttcattcacagccatcagccatgtatatgttgaactagcaatgtgaatgtgacccacgtaaaatcgcatggtactagtttttttttcagtt

SEQ ID NO: 27110 - DNA, 1859 bp, Zea mays
  Clone ID: LIB4722-002-E4_FLI
aaaaacgcgtgacaacctggggtgcctctcagcaaaactaccaccacgatcggaagcttctccgccatcttctgtttccttcccgacgaagcagcagctgcaacgactcctcacccaaatctgccctgccgctctctccgccgtcatctccaacctccggggatcttagccgccaaatctgggccgtgctcgcgcttgggcatctgcggcctacgatggggagcgagtcggagcccgccaaggggctgctgccctacctgcagcgcgcggacgaactgcagaagcacgagcccctcgtggcgtactactgtcggctctacgcgatggagaaggggttgaggataccccagaaggagcgcaccaagaccacaaactccattctcatctcccttatgaaccagctcgagaaggacaagaagtcgttgactttggggcctgacgacaatcttcatttggaggggtttgcattaaatgtctttgctaaagcagataaacaggaccgtgctggacgagctgacataaacactgctaaaaccttctatgctgcaagcatcttctttgagattcttaaccagtttggtgagcttcatcctgatattgagcaaaaacagaaatatgccatctggaaagctgctgaaataagaaaagctctcaaagaaggccgacagcctgaagctggaccacctggtgggggtaaagatgaagcgcctgtcaataccaccaccatttctcaggatatggcgcgaagccattccttcagcagtgcgaaccagggcagtgaagcatcacctcgacctgtcaacatggattttagtaggcggggtagcttttctgctgtgcagccaggaaataatttgcctccccaaagtacagaattcaatgatcatccctctacccagtcaccctattcttccccaccaccctcacagtcccagcacccttctccatcacaatcttattcctctccctcataccaggcaacagattacccttcttctgatattcacaaaccatcccccaattattcatcttccccctacacaagcacagactaccctaccaatgagctccacaaaccaccttccaattattccccacctccttacaccaggacagatcacccttctaatgatggctacaatcctcacagcaatgataaaccggatgtttcggcttaccctcaggcataccaacccccaccctacacaattgaccctcagcacatctctcaaaactactactccaccaaagccccagctgctccatacaactaccctaattttcagtcatatccaagttttcaggacagcacgtcaccttctgtcccgactgagccgacgtatcaatcttcattctatcctgcaactgatggtcctgcagctacttcgtacactcctgcttcaaattcctctgccccaacacattaccactcaactgctgactattcacctcaagttactcctccagctgcgccaccagctagccaatataaatatgatagcagttaccagcctgaagttgagaagattgctgaggctcacaaggcagccaggtttgcggtcggtgctcttgcatttgacgacgtatctgttgccgtggatcacctgaaacgtgcactggatcttctgacaaacccttctgctgaacctcgctagctcttttgcattcccttgctcttgtcagaagcatcatctgtacatatacaagattggcgtaccacccatggataaattgccaggctgcatacttacaagacaggggtaaccacacaaatctaggagataataagcgagcctttccgtgtgagcttttgaagtgacacttacaggaaaccttaatgtctaaaatctagttatttt

SEQ ID NO: 27111 - DNA, 1233 bp, Zea mays
  Clone ID: LIB4722-002-F9_FLI
atcgaggccggccgagttctccgtcctcccggaacgcccgtcccgtccgtcctccccccatccacatccatcccgtgtgcttctactgctcctcgatttgatcaccgattaggggaggcggtttaccagtgagcacgcgcgagagataggataggaggaaagggaagctagcggcttcgctctcgcggggagatggcgcaggcggtggaggagtggtaccggcagatgcccatcatcacgcgctcctacctcaccgccgctgtcgtcaccaccgtcggctgcaccctcgaaatcatttcgccgtatcacctgtaccttaacccgaagctcgtggtgcagcactacgagatttggcgcctcgtcactaacttcctctacttccgcaagatggatttggattttctattccacatgttctttcttgcacggtactgcaagcttctggaggaaaactcatttagaggaagaactgctgacttttttacatgctcttgtttggtgctactgtcctaactggcattgttctgatcggagggatgataccttacatttctgagacatttgccagaattctgttcttgagcaattcattgacatttatgatggtttatgtctggagcaagcacaacccttttatccacatgagctttctgggcctgtttacctttacggctgcgtacttaccatgggttcttttgggcttctctatcctcgttggaagcagcacatgggtggacctcttgggtatgattgctggacatgtgtactacttcctggaagatgtatacccacgtatgactgggcgtcgccccctaaagacaccgtccttcattaaggcgctatttgctgatgacaatgttgtggtggcacagccacccaatgctgggattggtgctggtgcaaggttcggtgctattggtgtagatccccaggctcaatgatgaattactttcagtgacctgagggccgaggctgtgactgatctgggatgcggcagtttgtattctctgcgcaaattgcggaactgtacaagccattgttcttgtgtatttatacaggctagatgagagttattgtgcataacaaaaagattagtagtatcggaggcggctaagtttgtcacctgttggcagggcccggaggaaaatggatcgtgatgggcaaacaggccaacccctgttgcagaaacttgttcatgtgacggtttaacatctgacctgctaccctttcagg

SEQ ID NO: 27112 - DNA, 1218 bp, Zea mays
  Clone ID: LIB4726-017-E7_FLI
tcgagggccggccgggacctcactgctgccgggccccagccgccgcgcacgcccaaaacacacactgacgcgtgggcccaccttttcccttgttgcctctctcctttgtgcgtcttcttcctccctcgcgcaccgcaggcaaggcacacaagagaaaagcagagggggccagatgaggagggacctcgcatcctccttcgctaccgccgcatcctcttcctcggcagccgacgcgctccggggctggtgggatgacgtcaacgagtcgccccagtggcaggacgcggccttcttctccctcgccgccgcctacgccctcgtctccgccgtcgcactgattcagctcgtcaggatccagcgccgggtgcccgagttcggatggaccacgcagaaggtcttccacctcatgaacttccttgtcaacggggtccgtgctctggtattcggcttccatgtccacgtcttcctcctccgcgcaaaagtatacaagttggtgttgctagatctccctggtctgttgtttttctccacctacaccttgctcgtgctcttctgggcagaaatataccatcaggctaggagtcccccaacagacaagctgagacctgcatacattgccgttaacaccatcatatacgttgttcaggtttgcatatggatataccttgggataaatgacaatgctgtggtcgagctagccagcaaaatattcatcgtagctgtctccttcgttgcgcttcttggcttttcagtatatggtggaaggttatttgtcttgctgagacgtttccctattgaatctaaggggcggcaaaagaagctttatgaggttgggactgtgacagcaatttgtgttacctgcttcctgataagatgtgttgtggttgcattatctgcgtttgatgccgatgtatctctcgaggttttggaccatccagtcctagatttcttctattatatgcttgcggagatactgccttctgcgctagttctcttcgtccttcggaagcttcctcccaagcgggtttcggcacaataccaccctattaactagagagttttgttttgttttttatgatgttacatgctaagaactccggataatctgaaactactggaaacctacagccggctgtagttggatgcttttgcttttgcttgtgctgttatgtttatggaagcatcagtgttggcgatgaatataatgacgatcattct

SEQ ID NO: 27113 - DNA, 905 bp, Zea mays
  Clone ID: LIB4726-019-D8_FLI
atcgaggccggccgggaacacccatattattgataccaactagcaacatacatagtgaagtacactagcaacatcttagcaccaatggcagccaagatttttgccatccttgccctccttgctctttcagcaagcgttgctaccgcgactattattccacaatgctcacaacaatacctctctccggtgacagccgcgagatttgaatacccaactatacaatcctacaggctacaagaggccatcgcagcaagcatcttacggtcgttagcattgaccgtccaacaaccatatgccctattgcaacaaccatccttaatgaatctatatctccaaagaatcgcagcacaacaactacaacaacagttgcttccaacaatcaatcaagtagttgcagcgaaccttgctgcttacctccagcaacaacaatttcttccgttcaatcaactagctggggtgaaccctgctgcttacttgcaggcacaacagctactaccattcaaccaacttgtcaggagccctgctgccttcttactgcagcaacagttgcttccattccatctacaagttgtggcaaacattgctgctttcttgcaacaacaacaacaattgctgccattttacccacaggttgtgggaaacattaacgccttcttgcaacagcaacagttgctaccattctacccacaggatgtggcaaacaatgtcgccttcttacaacaacaacaattgctgccatttaaccaacttgctttgacgaatcctaccaccttattgcagcagcccaccattggtggtgccatcttctagatttttttatgctttatactgtaacaatgaggttctcatactgatatgtgcaacttctcagtaataaaagattagagatctatattttaagtacg

SEQ ID NO: 27114 - DNA, 1257 bp, Zea mays
  Clone ID: LIB4726-020-A11_FLI
ccggaaatccgtcccccagttccctccgtccacactcgcccttctccttcgttcccggctaagtggccaacggacgtgcgatccggcgcgcttcctcgccgtcgtcgatcggaggcagaggaatgtcaggggcggcatccgtggagcgcgtgaaggaccgggacatcggcctcgacaagttcgtgctccgcgaggcccgcggcagctccgtcgaggtatatttatacggaggccaagtgacattttggaaaaacaacttcggtcagcaactgctttttgtcagtaacaagctaggtaaccatggagtgcttgaacagcatggatttgcaaggaaccggttttggagtgtcgatgaaagcccacctccttttccagttgctacttccaattgtcatgttgacttgatactcaagtcatctcccgaggatttgaagatctggccacatagttacgaatttcgtctgagagttgctctgactccaaggggagatcttattcttacatctcgaataaaaaacatcagctcagacagcaagccattccagtttacatttgcataccacacctacttttcggtgtctgacatcagtgaagtgagggttgaaggtctggagaccttggactatcttgacaacctgcaatccaagaaacgttttactgaacaaggagatgcggttgtattcgagtccgaagtggacaaggtatatttgagtgctccgccaaaggttgtgatcatcgaccacgagaagaaaagaacgtttgtgctgaggaaagagggccttcctgacgttgtcgtttggaacccctgggacaagaaggacgaggagtacaagagcatgctgtgcgttggggctgcggctattgagaagccagtcactttaaagccaggcgaagagtggatagggaagcaggaaatttctgctgtgccgtccagttacagcagcgggcagttggaccctgaactgattcgtcgaatgcacaatataaagtttacccgcgattgcatcgatcctacgttccaaactagcctgtgttttttttttaattctgaagcagcgctgggattggaatcatcaccctgttaatcactagacaaattgggccggaggtgccattcagatccgtatacaatattctttttctctgtttttttttttgtattgtaccactagtccactacaaaaggaagccccaagtttgtactgcatgtggcaaacaaaactaccaagatatatatactaattgagttgtataagt

SEQ ID NO: 27115 - DNA, 1473 bp, Zea mays
  Clone ID: LIB4726-020-A3_FLI
cgggaaaaaaaaaaaaaaaagaacgctcctccctctaaggctccgacctccgtgcctcgcgcgccctcgcccttgccctcgccctcccccaccaacccaaaacccgatccgttgctcgctgctcagggtccactactgatccgctccacgcgagctcccttgtccccgcgtcacgctcgcgcccaagcaagcggttgctgcaaaggaagcctcccctgatggctctcgtgacctcgggctcgggtgccgaccaggtgatcgccgaggtggcgatgaacggcggcgccgacccaagtgcaaccaccgtgcgtgctactgtcgtgcaggcgtccaccatcttccacgacacgcccgccactcttgataaagcagagagattgatagcagaggctgctgggtatggttcacagttagttgtctttccagaagcttttattggaggctatcctcgtggatccacatttggtttcgggatcagtattagtattattaatccaaaagacaagggaaaggaagcattccggaggtatcatgcatctgctatagatgtgcctggtccagaagttacacgcttggctgctgtggctacaaaatataaggttttcttggtcatgggggtgattgaaagggaaggttacaccctttattgttccgtgcttttctttgaccctcttggccgttacctgggtaagcaccggaagctcatgcctacagcattagagagaattatatggggatttggggatggatcgactattccagtttatgatactccacttggaaagattggggcgctcatttgctgggaaaataaaatgccacttttgaggacagcgctgtatggtaaaggtattgagatatactgtgcccccactgctgactccaggcctgtttggcaagcctccatgacacacattgctttggaggggggatgctttgtcttgtcagcaaaccaattctgccgcagaaaggactatcctcccccaccggagtatgagtttgctggtttaggtgaagagccatccgcggacactgttgtttgccctggaggcagcgttatcatttctccatctggagaagtcttggcaggtcccaactatgaaggagaggcactgattacagccgaccttgacctgggagagattgttcgagccaagtttgatttcgacgtggtgggacactactctcgacctgaagtccttagattggtagtgaacgaccaaccgcagctccctgtgtctttcacgtctgccgctgagaggactccagctgccaagagtgatatcgatactaagtcttactgattgactggtcatgaaactgtgttgcgccgaacacttggtgatggtcgctcagctcctctagtttgctgttgtgtctcgtggatgggagttgggagttgtagccttgaactaaaaaaaaaaactcttgccttcccaacgtaaaaaaatggtggccgcagttatgttcctg

SEQ ID NO: 27116 - DNA, 912 bp, Zea mays
  Clone ID: LIB4726-020-F6_FLI
ctcgaggccggccgggtaaagttcacacgcacaacccgccgccgcacgccgggatctcgatagactctggctgccgcggaaagcggaaagaaggcagggatcgtggccaagatgcagatcttcgtgaagacgctgtcgtcgacaaggacgatcacgctggaggttgagccttcggacacggtggcggacgtgaaggccaaggtgtacgagtccgagggcgtcccgccggccgagcagcgcctcatcttcgcggggaagcagctgcgcgacggccacacgctggctgactacaacatccccaaggagacgatgctgtccttgtgctgccgcctcctcggaggcggccgtaagaagcgcaatagaaagacgttcaccactcccaagaagggcacgcacgagcacaagaaccccggtctcgacgccgtgcttgggcggtacaggatcgatgaggccacggggaaggtggagaggctgcgcatgcagtgccctaacccggagtgcggcccaggcgtgctcatggcggcgcacgccgaccggcacgtctgcggcaggtgcggcctcaccttcgtcatcgagaagtagagcgcggcagatagctaggtcgcttcgtaccccctccatttgcaatggcaaagcgtttttacctttctagatatgcacttatgtctagatatgcacttatgtctagatacatagattatcttatactcacttcgttcttttttatttttcgtgttttagtttaaaaataaactaatcgacaacaaatattcgaaagcgaagatagcattttaaattagagtatgttttaggagtccataatagttcgatcagatttttttttcctgtttttcaagcatattcttttttccgccttttgtctttccttataaaactaaagtgatttctgac

SEQ ID NO: 27117 - DNA, 1690 bp, Zea mays
  Clone ID: LIB4729-008-B10_FLI
ccgggaaagctgtgtaagcagcagaatccaatccaatccccagcgcgcgccgccccctctaatccctcctccgcaaggcagacagaggccggcgttcactcgggcatccgcgggacggacggggagcaaagcctcagcggcgagtgcgggcgatgaggtcttcggaggcgtcgtcgcggctcgtgcaggagctcgtgctgtacgccgccagcgccgcgctcagctgcctcgtcctcttcgctggcctccgccacctcgaccccaaccgcgccgcttcccagaaggcgcagcagcagaagaaggagatcgccaagcgcctcggccggcccctcgtctccaccacgccctatgaggacgtgattgcgtgcgacgtcatcaaccccgacagcatcgacgtcgaattcgactccatcggcggcctggaccagatcaagcaggcgctctacgagctcgtcatcctgcccctgcgccgccccgagctcttcaccttcggcaagctcctcagcccccagaagggcgtcctcctctatggcccgcccggcacaggcaagaccatgctcgccaaggccatcgccagggagtccggcgccgtcttcatcaatgtcaggatctccaatctcatgagcaagtggttcggggacgcacagaagcttgtggctgctgtctttagtctcgctcacaagctccagcctgctattatcttcattgacgaggtcgacagtttcttggggcagcgacggacaactgaccatgaagccatgactaatatgaagacagagttcatgtccctctgggatggcttcaccaccgaccagaatgctcgtgtaatggtcctggctgctacaaacaggccttctgagctagacgaggccatccttaggcgctttactcagatatttgaaattggaattcctgttgagagtgaaaggagcaagatacttcaggttgtgttgaagggagaaaatgtcgagcataatattgattatgatcacattgcaagtttgtgcgagggctttactggatcagacatcctagaactgtgcaagcaggccgcattctatcctatcagggagctgttggacgatgagaaaaaagggaggaaattagataaacctaggcccttgagacaatcagacttggagagagccttgtcaatgtctagaaagggcaagaaggctgcaagttcagcactgcagtcacctttgtgggtacggccgacaaattcagaagacgatcaggtacagaacgccatctttgagatatctaagctgatgtctcgaatagttcagaacagtgagtcggaaccgcaagagccttcttcaccttaacctaatccttttgctagatctcgtgaaaatctgcagcggagtaaatgcaggcattacgtcgataccgttaggtttccttatgcagtttgcagaggttcaacatatttatatatgtattaattcgttttgcgtttggaacctccaccggtttttttgaagcaaactgcagctggcgaagtggcaagcgtgccctcgtgtttaagttgatcatttcaaaatacgtgccccctgtgggccgtaaaactgagaactctatagttgtctggtcaacagtcggtcttggttgcctctgtattttatcttcggtttgactactctagggtggcgaattacaacatacagtataatgcagaaaggtccct

SEQ ID NO: 27118 - DNA, 1354 bp, Zea mays
  Clone ID: LIB4729-012-C5_FLI
ccgggacacacgtacatacagaacagagcgcacgcgcaggcacagcccatccagccagcagggagggacacaagcaggcggccatatggctgctggtggcgctggtgcagctgttgcggcggtgctcacgacggccgtcgctgcagtcctcgttgcggtgttgacgacgacggtgtccggacaggacgacccagcgccagcggcggcggcgtgcgcgcggcggcccgtggtgttcgcgttcggggactccaacacggacacgggcggcgtggcggctgggctcgggcactactacccgctccccgagggccgcgtcttcttccgccgatccaccggccgcctctgcgacggccgcctcgtcatcgactacctctgtgagagcctgaacatgagctacctgagcccgtacctggaggccgtgggctccgacttcacgggcggcgccaacttcgccatctccggctcctccacgctgccccgcaacgtccccttcgcgctccacgtccaggtccagcagttcctccacctgaagcagcgctcgctcgacctcgccgcccacggcgggacggctcccgtcgacgccgacggcttccggaacgcgctctacctcatcgacatcggccagaacgacctgtccgccgcattcggtagcggagcgccctacgacgacgtcgtccaccagaggatcccggctatcgtgtcagagataaaggacgctatcatgactctctactacaacggcgccaagaacttctgggtccacggcaccggccctctgggctgcctgccccagaagctcgccgcgccgaggcccgacgacagcgacctcgactacaacggctgcctcaagaccctcaacgacggcgcctacgagttcaacggccagctgtgcgctgcctgcgacggcctgaggtcgcagctgcgcggcgccaccatcgtctacaccgacgtcttgctcgtcaagtacgacctcatcgccaaccacaccgcctacgggttcgaggagccgctcatggcgtgctgcggctacggcgggccgccctacaactacaacgccaacgtgagctgcctcggcccgggattccgggtgtgcgaggacggcaccaagttcgtcagctgggacggcgtgcactacaccgacgccgcaaacgcccttgttgctgcgaagatcttctccggccaattctccacgccccaaatgcccttcgactacttctgccaggcatgatcatcgtacgagtacgacccagcatagctgagcaattcagctgttgcgagagaatcacattcgtgtaactaagaaatgtaacaagcaccgcagatcatatcatgctgaataattcgcgattgacac

SEQ ID NO: 27119 - DNA, 934 bp, Zea mays
  Clone ID: LIB4729-012-E2_FLI
ctcgaggccggccggggcctttcgaattctaagacttgggcccactgtcagcctcggtagatatcacactcactagtccactcccctcttcactctcgtcggtggattccatgtccaaccgcgtcgccggaggccggaaccatgaagcctgtcagtgtcgccgaacacaacaaccaccagcatcgcctgcactcccccacgccggcgtcggcgaccaagatctcgatccccatctcttcgagcgaggcggcgctgttcgggaagggtaggtacaaggtgtgggccctcgcggccatcgcgctcctagcgctctggtccatgttcgccgcctccgtcacgctgcgcttgtcctccgtcgatctcgccaccacgttcggggacgcgagcgatccgctcatcgacgaacttgatcccctggagatggagcaaagagaaaagctagtgcgccggatgtgggatgtgtacacacgcacagataatcatgtacggctaccacggttctggcaagaagcatttgaggctgcatatgaggagcttgctggtgatgatacgcttactactgatgcagctatatctgagattgctcgcatgtcaatccataggcctgaggttgagcaatcgtcgaataaggattaggtatgaactaactgacctatttgtgaacttagtggctgaatgctgtctccttttcttaggatgtgccatcaaatcttaatgcagcatcttttttaaaacatatatgtagtgcaaacctatatgtttgcaccttaggaatatgtagtataaacctatgcagcaaaatattttgtctatttatgcttggtttgccttgtgagcatctcgttctgataattgattatcagcaataaagtcgcatcatattgtaaacttcagaagttaatgaaaaaatataataaagttactgcttctgcag

SEQ ID NO: 27120 - DNA, 1331 bp, Zea mays
  Clone ID: LIB4729-013-B8_FLI
tcgaggccggccgggcccgccacaaccctttcccttctctgcttgcttgctgctgcagtgctgcctccccctcgccctacccctcgcccagcagcaggcagcagtcatgccaggggaccacggctccaagggcgacatctccttcgccggacgcttcacggccagcgccatcgcagcatgcttcgcagagatatgtaccatcccgctcgacacggccaaggtcaggctccagctgcagaagaacgtcgtcgccgccgccgcctccggggacgccgcgccagcgcttcccaagtaccgcggcctgctcggaactgccgccaccatcgctagggaggaaggggccgcagcgctctggaagggcatcgtcccgggcctccaccgacagtgcatctacggggggctccgcattggcctctacgagcctgtcaaatccttctacgtcggcaaagaccacgttggggatgtccctttgtccaagaagatagccgccggcttcacaactggtgccatcgctatcagcatcgccaaccctactgaccttgtcaaggtcaggctccaggccgagggcaagcttgcgcctggtgtgccacgccgctacactggcgcaatggatgcttattccaagattgctagacaggaaggggttgccgctctgtggactggccctggaccaaatgtagcgcggaatgctatcatcaatgctgctgagttggccagttatgatcaagtcaagcagtcaattttgaaactccctgggttcaaagatgatgtggtcacccacctttttgctggtcttggtgctggcttctttgctgtttgtgttggttccccagttgatgtggttaagtcgagaatgatgggtgactcagcctacaaaagcactctcgattgttttgtgaagacgctaaagaacgatggccctttggcattttacaaaggcttcctgccaaactttgcaagactgggatcttggaatgtgattatgttcttgacattggagcaggttcaaaagctgtttgtgaggaaagcgacaagctgaagatagagtttttgcagtcaggtggcgtacaattgacgcacagggtttttcttaggggagaaatgacacctcccccctcgagaattggggaacaaggacagatctgacacctcaattgcgagaaataaaaataacagccgacagttgcatgatccctgaacgaataaattcagaactagaaaacagatgtcagtaaacaacatgtggtgaatgttggaacttgaactgctctagttcagtgggcatctgttgttgcatgcttgggatggatttaatgtttcgtttttttttc

SEQ ID NO: 27121 - DNA, 614 bp, Zea mays
  Clone ID: LIB4729-035-A12_FLI
ccgggaacctagcgctggcgccgcagacccctccccttcgcttccttccctagcgccgacgcccaccagacgagatggccccgaagaaggacaaggccccgccgccgtcgtcgaagccggccaagtccggtggtggcaagcaaaagaagaagaagtggagcaagggaaagctaaaggagaaggtaaacaacgcggtgctgttcgaccaggctacctacgacaagctgctctcggaggtgcccaagtacaagcaaatcaccccttccatcctctccgagcgtctgaggatcaacggctcccttgctcggagggccatcaaggacttgatggcgcgtggcctcattcggatggtctcggtccactcaagccagcagatctacaccagggcaaccaatacataaggatggggaagaggtctaaaatgcattgtctgccctctctgcaggaggagctcgtctttagaacagttgccatctttgtcaagagttgccaatgttatgttactggtgatgagttccaggtgacggcaacattttagagattttgagtatttctattagttggtactatggtttgccaattataagttacttggcctaaatggtttttgtttt

SEQ ID NO: 27122 - DNA, 2389 bp, Zea mays
  Clone ID: LIB4729-035-B12_FLI
ccggggtctcctcagtaactgcacccacctccacacctacacccgagaggcggcggcggcagacacagacaccgtctctctcctccctttgtcgtcgtgtctctctgcatggaagcctccgccggctcgtcgccaccgcactcccaaaagaacccgccggagcacggtggcgacatgggaggggcccccgcggaggagatcgaaggggaggcggcggatgacttcatgttcgctgaagacacgttcccctccctcccggacttcccttgcctttcgtcgccgtccagctccaccttctcgtccaactcctcgtcaaactcctccagcgcctacaccaacacggcaggaagagccggcggcgagccctccgagcctgcttcggccggagaagggtttgatgcgctcgatgacatcgaccagctcctcgacttcgcgtcgctttccatgccgtgggactccgagccgttcccgggggttagcatgatgctagagaacgccatgtcggcgccgccgcagccggtgggcgacggcatgagtgaagagaaagccgtgccggaagggaccacagggggagaggaggcctgcatggatgcgtcggagggggaggagctgccgcggttcttcatggagtggctcacgagcaaccgcgaaaacatctcggccgaggatctccgcgggatccgcctccgccgctccaccatcgaggccgccgccgcccggctcggcggcgggcgccagggcaccatgcagctgctcaagctcatcctcacctgggtgcagaaccaccacctccagaggaagcgcccgcgcgacgtgatggaggaggaggcgggcctgcacggccagctccccagcccggtcgccaacccaccaggatacgagttccccgccggcggacaggacatggccgcgggcggcggcacatcctggatgccccaccagcaggcattcacgccgcctgctgcgtacggcggcgacgcggtgtacccgagcgcggcaggccaacagtactctttccaccagggccccagcacgagcagcgtggtcgtgaacagccaaccgttctccccgccgcctgtgggcgacatgcacggcgcgaacatggcctggccgcagcagtacgtgccgttcccaccgcctggggcttccacgggctcttaccctatgccgcagccgttctcccccggattcggcgggcagtacgccggcgccggcgctggccacctctcagtggccccccaacgcatggcaggcgtggaggcctcggcgaccaaggaggcccgcaagaagcgcatggcgagacagcggcgcctgtcctgcctgcagcagcagcgcagccagcagctgagcctgggccagatccaggcctccgtccacctgcaggagccgtcccctcggtccacgcactccggcccggtcacgccgtcagcaggcggctggggattctggtcgccgagcagccagcagcaggtccagaacccgctctccaagtccaattcatcaagggcgccgcctccctcactggaagcggcggcggtggcgccacagacaaagcccgcgcctgctggtgctcggcaggacgacattcaccaccgcctcgcagcggcttcagataagcggcagggcgccaaggcggacaagaacctgcggttcctgctgcagaaggtgctgaagcagagcgacgtcgggagcctcggccgcatcgtgctccccaaaaaggaagcggaggttcacctgccggagctgaagacgagggatggcatctccatccccatggaggacatcggaacgtcgcgcgtgtggaacatgcggtacaggttttggcccaacaacaagagcagaatgtatctgctggagaacacaggggaatttgttcgttccaacgagctccaggagggggatttcatagtgatctactccgatgtcaagtcgggcaaatatctgatacggggcgtgaaggtaaggcccccgccggcgcaagagcaaggcagtggttccagcgcgggaggcaagcacaggcccctctgtccagcaggtccagagagagccgcagccgccggtgctcctgaagacgccgtcgtcgacggggtcagcggcgcctgcaaggggaggtctccggaaggcgtgcggcgggtccggcagcagggagccggcgccatgagccagatggcggtgagcatctgaaagagcagcaggctccgccatatattgatcgatcgaccaatcgatcgttagttctccaagttactattagctagctatagctcgaaacagctgaactgatgatgacgatggtaacctccgtcgtgtgtgtgctaagcatgtagcgtgctaggagatgatatattaaatataatcgagtagtagagccacccgctgtgtgacgctg

SEQ ID NO: 27123 - DNA, 2513 bp, Zea mays
  Clone ID: LIB4729-036-A1_FLI
ccggggtgtagtgctagacactgaagggttcgtccggccatccgggcaagtcaccactcactagtcaccagttactttaccaatccgcgccggtggtaaccctgcctttggcggcggctagccggtacccagtgtgcgcactccctctatctccctcttggcgacgactgggcggccgtcgctgctgccctacgccgtcttcgggctcttcgttgtcgacgagcgccacaaggttcctaccatttttaagaaaaaaagatcaatggaggcagctttgtcattctccaaggacagcccaccaatttcgataatttgtgctgcaaagcttgtgggtctacccctaaccatcaatcatagcctcgctgctggctcggcacccaccctacagtttgcttctggagaatcactccatggtgtcaacccaatcatcctctgcattgctagaggtgcatcaattgcctccttatctggaaagaatgatattgagtttgggcatgttgttgaatggcttgaatatgcccccaccttcctttcaggctctgaatttgaaaatgcatgcttatttgttgatggattcttggcctcccggacctttctggttggtcatggcctgacaattgctgacattgcagtttggtcaaatcttgctggaattggtcagcggtgggagagtctaaggaaatcaaagaaataccaaaatcttgttcgctggttcaacagcatagattcagaatacaaagaggcactgaacgaagttgtggctgcatttgttgggaaacgaggtattggaaaatctcctgcacctagccttaaggagaaggtacatgactcaaaggacccatcagctccagaagttgatctccctggtgcaaaagttgggaaagtctgcgttcgttttgccccagagcctagtggttacctccatattgggcatgcaaaggctgcactattgaacaaatactttgctgaaagatatcaagggcgcttaatagttcgatttgatgacacaaacccttcaaaagaaagcaatgagtttgttgagaatcttttgaaagatattgagacgttggggatcaaatatgatgctgtcacatacacatctgattatttcccaaagctaatggaaatggctgagagtttgataaagcagggtaaagcatatattgatgacacaccaaaggagcaaatgaggaaagagaggatggacggtattgagtcaaggtgcagaaataataccgtggaggaaaatctctcattatggaaagagatggttaatggaactgaaaggggcatgcagtgctgtgtacggggtaaacttgacatgcaggatcctaacaagtcactcagggatcctgtttactaccgctgtaatactgatccacaccatcgtgttggttcgaagtacaaggtctatccaacatatgactttgcgtgcccatttgttgatgcattggagggggtaacacatgctcttcgttccagtgaatatcatgacagaaatgcacaatattatcgaattcttcaagacatggggttgaggagagtagaaatttatgagttcagccgattgaatatggtttacactcttctaagcaagcgaaagcttctttggtttgtacaaaacaagaaggtcgaagattggacagacccacgttttcccactgtccaaggcatagtacgtcggggcttgaaggttgaggcattgatacagtttatactccaacagggtgcttcaaaaaatctgaatctcatggagtgggataaactctggacaatcaacaagaagataattgatccagtgtgcgcaaggcatactgctgtgctaaaagaccagcgtgtcatcttcactcttacaaatggtccagaggagccatttgttcgaattttaccaagacataagaaatttgagggtgctggaaagaaggctacaacctttgccaacagaatttggctcgattatgctgatgcggcagctattaacaagggtgaggaagtaacccttatggattgggggaatgctattgttaaagagatcaaggtggagagtggagtaattactgaactagttggagaactgcatcttgaggggtctgtgaaaacaacaaaattgaagatcacatggctagcagatatagaggagctagttcccctttcattggttgaatttgattacctcatcagcaagaaaaagctagaggaagacgaggacttcctcgacaatctcaacccttgcactcgacgggaaatcccagcccttggagatgcgaacatgaggaacatcaagcgtggagagatcatacagctcgagaggaaaggctactataggtgtgatgccccttttatcagatcgtccaagccggtggtcctgtttgcgatcccagatggcaggcagcaggcctcgcttagctaggcatggtgaccaccttttgggcacatggaattcctgagttgacaatgagtattgttgcattgtacactttaatattgtactgtgattaggctttactcgcgac

SEQ ID NO: 27124 - DNA, 1452 bp, Zea mays
  Clone ID: LIB4729-083-H1_FLI
ccagggccccgtcccaaatccccctgtcccgctaggattcccccgaaaccctcccccaaaaccccagagcggagaagagcgcaagatgttcggcttcgggcaccacggccaccacggccagaacccgccggcgcacggcggcgtgcaccagcccaccttcaagatcttctgcaaggccgacgaggggtactgcctcaccgtccgcgacggcaacgtggtgctggcccccgccaacccgcgcgacgagcaccagcactggtacaaggacatgcgcttcagcacccaggtcaaggacgaggagggcaaccctgcgttcgccctcgtcaacaaggccactgggctcgccatcaagcactccctcggccagtcccacccggtgaagctggtgccgttcaacccggagtaccaggacgagtcggtgctgtggacggagagcggcgacgtgggcaagggcttccgctgcatccgcatggtgaacaacatccgcctcaacttcgacgccttccacggcgacaagggccacggcggcgtgcacgacggcaccaccgtggtgctgtgggagtgggccaagggcgacaaccagagctggaagatcctgccctggggcgacgaggcctacgccgggggcggcagcagcgccgccaacgcgccccgcttcggcggcggcgagcccaccgtccgcatctactgcaaggccgacgaagggttcagcgccacggtccgcaacggcgccgtgtgcctcgcgcccaccaacccgcgcgacgagtaccagcactggatcaaggacatgcgccacagcaacagcgtcaaggacgaggaagggtacccggccttcgcgctcgtcaacagggtcaccggcgaggccatcaagcactcccagggcgagggccacccggtcaagctggtgccctacaaccccggctaccaggacgagtcggtgctgtggacggagagccgcgacgtcggccacggcttccgctgcgtccgcatggtcaacaacatctacctcaacttcgacgccttccacggcgacaaggaccacggcggcgtgcgcgacggcaccaacatcgtgctctggaagtggtgcgagggcgacaaccagcgctggaagatcgtcccctggtaaatgtgctgttctgtggctgcactggtcatcaccatgatctggagctttgaaggcatagccacctgtggtcagcaactgctgccgtgttgctagaataaagttggtggcgatcgatcgatcgatctttggtgatgggtgtccctccctgtgtgtttgtgtttagttccagtcgtttgtgaggaagtcagttatgtttgagtgagaggggtacttcgctcttcggttaactctgtacttgtcatgaggagagttttcatacccggagtgtagaactctgtactgtactcggatccttcctttttcatccaagtgggttttattttatc

SEQ ID NO: 27125 - DNA, 1383 bp, Zea mays
  Clone ID: LIB4730-008-D4_FLI
ccggggctctgcctcaccatcgacgccgaatccacagctgccagcccgccacatctgccacgcccaaatctgcgtcgtgcgcgagtgagaagaccggatctgcggcgggatggcgacgatccagaacaagccgactccgacggcgccgtccacgacgacgggcggcggactgcgcgccatggatctgtacgagaagctggagaaggtgggggagggcacgtacgggaaggtgtacaaggcccgggagaaggcgacgggccggatcgtggcgctcaagaagacgcggctccccgaggacgacgggggcgtgccgcccaccgcgctgcgggaggtctcgctgctgcggatgctgtcgcaggacccgcacgtggtccgcctgctcgacctcaagcagggcgtcaacaaggaggggcagaccatcctgtacctcgtcttcgagtacatggacaccgacctgaagaagttcatccggggctatcgcgccaaccacgagaagatccccgcacaaaccgtcaagatcctgatgtaccagctgtgcaagggcgtgggttttgttcacggccgcggggtgctccaccgtgatctgaaaccgcacaacctgctcatggaccgcaagaccatggcgctcaagatcgctgacctcggactcagccgtgccatcaccgtccctgtaaagaagtacacgcacgagattctgacgctgtggtacagggcgcccgaggttcttcttggcgccacacactactccacgccggttgacatttggtccgtggggtgcatatttgctgagttggttactaatcagccacttttccctggcgactccgagttgcagcagctcctccacatcttcaagttgctgggcaccccaaatgaggagatgtggccaggagtaggcaagctgccgaactggcacgtgtacccccagtggaagcccactaagctgtccactcttgtccctggtcttgactccgatggctatgatttacttgagaaaatgcttgcatatgagccagggaagcgggtctcggcgaagaaggccctggagcacccgtacttcaatgatgttaacaaggaggtgtactgaagcgacccgagtagtagggttcatcgagagaggatcattgtcaccttattcttcgcttagtgtgttaatatggctaccctgaagcagtacttgaagtatctctgtgttcaagctgctacttttctatttgttgtgccattcactttggttgtgatggataaggcagggagagttttcagcatgagtgagcttatgttgacactgtttcttgcaaattgtagccggaaagcttgcgatcatcttccatttgatttataaagcttcactatatggctctgaagcacaaaattcctacc

SEQ ID NO: 27126 - DNA, 999 bp, Zea mays
  Clone ID: LIB4725-002-E10_FLI
agcaccagcaagcagcagtctaccaccatcccaccaatctcccaaattaagccatccgtcaccagccagccaaccagcactcactcactagctacgtccaactcgtacacaacccctctttctctctatcttctctccatccatccatcctctcgctcgcccttcgacagctagctaagcagtacgacgtagtatactagcatttagcagttcatcaacgcgctcaacctagcacgacgtacggcgatgaggcgccgcggcagcaactcctcgccgcttgcggctgctgccctgcccctcctactcctcctcgtcgccggctgcttccactgcatggcagcggcggctcgccacctgccttctcctggcgccccagtccaagcgctggatcaccaagccgagaacggtgtcaaggctgcatcagctggtgcagacggcgccggcggccttgtgctccaggaaggtggcacgggcaacaacggcgacgacctctcctccaaaaccctcctcgagacgacgacgacgacaatgggagcggaggcgtgcgaggaggggaacgacaaggacgagtgcgtgcagaggcggctgctcgtcgacgcgcacctcgactacatctacacgcagcacaagggcaagccgtgaccgtcagcgacgaggacggtgcatgccgcggctgcagaaaatgaggagcggaagaggagtgaaaaaatgatggaccatcctcaaaccaaatatcctataaattcacgcacaaggggaaggggatagtaatctcatctgctgctgctagctactagtacatgcatcgatccaccttctgcgtgtgctgtatatttctgccacgctgcctatatattagcatgcatcatcatctaggtctaggactgtctgatggtttcccgtatttgtaaacactgatgaacagttcctctccctctctgcttcctgtaaccaccaagcttacttggtccgagagaacgtaacaacgcacatttgttg

SEQ ID NO: 27127 - DNA, 1018 bp, Zea mays
  Clone ID: LIB4725-002-G5_FLI
ctcgaggccggccgggaagcccaccgaattccctgcgattcctctcccctcgcctcctcgtctccccctaggggatcgtcggagaggaatcgcaaagagggccgcctcatccgagttaaggaagccatggagcacaaggaggctgggtgccaggcccccgagggacccatcctctgcatcaataactgtggcttcttcggcagcgcggcgaccatgaacatgtgctctaagtgccacaaggagatgataacgaagcaggatcaggccaagctggctgcctcctctatcgacagcatcgtgaacggcagcgacgccgtcatggagccggttgttgctggcagcaacacggtagtagctgttgcccaagtcgagttgcaaacaatgaacgtgcagcagcccgctgatgttgccggacccagcgagggggtggcggcgatctccaaagggggaaggtagggccgaaccggtgcagcgcctgcaggaagagggttgggctcacgggattcaactgccggtgtgggaacttgtactgcgcgctccaccgctactccgacaagcacgactgcaagttcgactaccggactgctgccagggacgccattgccaaggctaatccggtggtgaaggcagacaagctcgacaagatctagggggggttccctacggttggtgtcaggaagattgtaaaccgcggtaactcgtcatgcggaactgctgccttgccccccgcgcctttctcttccatgtttgctgctacaatcttgttgttgggcattgcagtgcacggtgcacacttgtgtagcccgcctccgagaattctcctgcctctgcatctggtcagttcaaaaatgatttgcatgttggctatgttgtgtaagctctatttatggtggtctcgctgagacgggtatttggcttcgcagttatctagctatgtgatgtactgttgtcttgtccctgggtattatatggtacactgcagccagtaatagtaatctgcaactgtgcgttaaatggc

SEQ ID NO: 27128 - DNA, 944 bp, Zea mays
  Clone ID: LIB4725-003-F3_FLI
ctcgaggccggccgggaaaatcatttcatccttcccggtgcggctgcggccagatgcgtccaaattcctcatattttctctcctcccctggtcccttctcgttctcgcccgcgtaattcctctctggcgtctaccaaaagcggagcaaccgaggcaagaaaaaggggtgggcgaggaaaagcgattaggcttctcttccagttcctgattcagtctgagaaacaatggatatctgaagcatgaaaagtcaacccacctcactcttttaaacagttcggttaacacacttaatggctgcggtgtttgcatgacattctctttgagcttatatgggagcagtggctgtattggtaatttaagcagatctcagtcacttccagattctaaaccgaagcgatctttgagaaagaaatatcaggattcatcgactggaaacagaagacgatggcaatcgggtctagaagcaatggagaagaatgttagcatatctgtttctcttgaggggaatatctcttctattcccaattcaatagccaacgactctaaaacgtcaatggaaaacagggtagatacatcatttatcaaccatgcggctgaagcatgggctgagatgagaagacaatgggttggacgccaggcagaagttctgagaaagaccccccgagagccagtgataagttggtccacaacatatgatgacctcttgtcgacaagtgagcgttttccacaacgaatcccattatctgagatggttgattttttggttgacatatggcacgaagaagggctctatgattagctggcctctgcctttctttacgccttgcttttagaatgtggtcaacttcctccccacaaaatatgtgaccttcagaagaaatgaaaaaactacatactctatgaattagtcgcaacatttgaattagtcgcaacatttgaaattg

SEQ ID NO: 27129 - DNA, 2123 bp, Zea mays
  Clone ID: LIB4725-004-B1_FLI
tcgccgctcgccccaccgaaccgcttccaatcacggctgacggcccagcaaagatggcgagaacagcgcgttcgttttcaaaccctttcaaattcctctcttcgcaagccgcaataataccgttcattcgatagttccatcctcctccctcccccttcgccggcctcgcttcgtccctcccgctctcccccttttaaatcaaaccctctctcggctcctttataaatcctagtcgaagcaagggtgcgcgcacttcactacccaacctgaccccgaagatcgcgtccgcagagacagtagccgcgtcatggcgaccccgccgccgccgctcccgcccatgccgccgaggcacgtctcctgcggctcacttctacaggaactgcaggaactatggggagaaattggtcaggatgaaatgaaaagagataggatgatactgcaactggaggaggattgtctcaatgtttacaagcaaaaagtgaatcagactaggaaacagaaggcagacctgcttcaagagctgtcccttggcgaagctgatatagacaagatcctttctgctcttggagagagagaaacatttcctaggtcagagaagcttgggggcacattaatggaacaactcgctaagatagagccagtgctagaagatttgaggcgtaggagggatgagagagtaaatgagttcaaggctattcagccaaagattgtatgtctacaagcagaaatttcaggagccattgatcatggggatcctgctgctcctgtggtagatgagaatgatttatccttgaaaagatcaggggaattgaaggagcatcttaatgatcttcagacagaaaagaatggaaggctgcaaaaaattgacatccagactaacagtattcatgaaatgtgcaacataatgtctattgatctcaaaatggcactaaaggatgttcatcccagttacgctgagctggggagaagcaaacccatgagtattagcaacagttcgcttgatagactatctgaaaaagtacatgcgttaaatcatgaaaagaaacaaaggcttcggaagcttcaagatcttggcagcacactcattgagttatggaacctcatggatacaccaactgatgaacagagattttttgaccatgtgacttctcttattaaagtctcaccaactacagcgatgccccaagggtgccttgcacacgaaataattgaaaaggtagagactgaggttaagagactgactaagttgaaagctagcaaaatgaaagagctagtcttcaagaaattgactgatcttgaggaaatctacagaagtgttcacatggatattgatagtgattctgagcggcaaaccctcaatgatctcattgattctggtagagcagatctttcagagttgctggcaagaatggatattcgaattgcggaggcaaaagaacatgcattaagtagaaaggatattttagaaaaggtggagaagtggacattggcatcagaagaggagacttggcttgatgaatacgaaagggatcaaaaccgatataatgctgtccgaggagctcacataaatctcaagcgtgcggagaaagctaggatgttggtcagcaaacttccatctcttttggagaacttgactgctaaaattaaagcctgggaaaaggaaatgggtattccatttatatttaacaaggtgaggctgttggactgtttagatgaatacacctgtacaagacagcaaaaagaagaggaaaagcgccgatcaagggaattgaagaaactgcaagaacagtttgctacagagcaaggtgccaagttcggaacggaaccaagccctatccgtcctctttcttcaaggaagcctcttgggcagagctctaatgccaatattattggtggaactccgaccagccgccgtgtttctacccccatgtcacggaagggtaggccatcttctggaagggtgcaggaagctgtcaagactgctgtggcaccagcaaactatgttgcccttcccaaggactgctcagacatttctaccctttgaagtgtaatcacctactctgaccatcgattgacttctcacttgatcgacctacatactatatagtcttgactccagtggc

SEQ ID NO: 27130 - DNA, 1002 bp, Zea mays
  Clone ID: LIB4725-004-B6_FLI
ctcgaggccggccggggtctcggtgcctttctctatcgtcccgatccgtcgttcatcagagtcgtaaccgtacgccctcgttcccctcgtcgctctcccaagtcccaaccccggttcctttggtctgcgcgagcgagcatggcgtcgccgtcgcccgccgtctcgtctctggagacggaggcgccccaggctaccgtcacgagggagcgcaggctcaaccccgacctgcaggagcaccttcccaagccatatctcgcgagggctatggtggcggtggacccggaccatccgaccgggaccgaggggcgcgacccccgcggcatgagcgtgcttcagcagcacgtggctttcttcgaccgcaacggcgacggcgtcgtctacccctgggagactttcaaaggcatgcgagcaatagggtgtgggttctttacatcccttgtcctctcgttcctcatcaacctcgtcatgagttatcccactcagccgggatggctaccctcccttttgctctccgttcatgtaaagaacattcataaggctaaacacgggagtgactccgaaacgtatgacactgaagggaggtttgatccatcaaaattcgacgctatatttagcaagtatggtcgtactcatccagatgcgttgacaaaagatgagatgaactcgatgcttaaggcaaaccgcaatatatatgatttcctcggctggatcgctgctatcggtgaatggcatctactctacagtgtggcaaaggacaaagatggcctgttgcagcgagaaactgtccggggcctgttcgatgcgagtctatttgagcgactgcaggacagcaaaaaatcctcctgatgaatgggccagagaggagttcccaccttaagaagaccgacagtagaaaaatagcatgttataattattgtcctacgtaatttctttaaaaaatgtaatttgagtcgttttcgaataagaaatgtttccatgatgtagtcaatacatattattgtg

SEQ ID NO: 27131 - DNA, 540 bp, Zea mays
  Clone ID: LIB4725-005-C3_FLI
aacccagcgccggcagtcgccgtcatcgatcgatcgccggaaaactaacccctaacgatgtctggagccggcgaggaggacaagaagcccgcggagggcggcgcccacatcaaccttaaggtcaagggacaggatggcaatgaggtgttctttcgcataaagaggtccacccagctgaagaagctgatgaacgcttattgtgaccgccagtctgtggacatgaatgccattgcgttcctgtttgatggccgcaggcttcgcggcgagcagacccctgatgagctggagatggaggacggcgacgagatcgacgccatgcttcaccagaccggaggcagcgttcctagcaccacctaaaagcctcgttttgctctccgtcctgcgtagtactaaacaaaagggaaaaagtctttttaaggaacttgtgatgctctggctccttgtgccattgctgagggacatccttagcctttgtttagtagtatggtttggtactttgttctgtcatcactcgtttatctatccctaatacatgccgct

SEQ ID NO: 27132 - DNA, 1333 bp, Zea mays
  Clone ID: LIB4725-006-A7_FLI
acttaggtggtacactcgaggctcttccgggttctgggggctgtgttgtaagggtccgctctttctctccctttaatacaaagattaactctcctatgtgtttgaggaaaaaaaaaaacatgatgttccttccaaagttttgcattaatcggcaacctaactgcttttgttctctgtaactgttttagtgggttgcaatgaggcttatacatgggcagggacatcagagagctaataatgaaacagaagaggcaaggaagaagataagaaaattcaaggaatcagcttgggaatgtgtttatttcctgtctggagagcttttatctttgtctgtcacatataatgagccttggttcaccaataccagatatttttgggtaggaccaggagaacaggtctggcctgaccaaaagataaaattgaaacttaaggctgtatatatgtatgctgctggattctacacatattccatatttgcacttatgttttgggaaacaaggcgttcagactttggagtgtcaatgtctcatcatgttgctactgttgttctgattgttctatcttacgtgttcagatttgctagagttggctctatagtattggcaattcatgatgcaagtgacgttttcctggaagtagggaagatgtccaagtacagccattgtgattggcttgccaatgtttcgtttctgttttttgttatttcgtgggttcttctccgcctcacatattttccgttctggattctgagaagtacaagctatgaggtcttgttgactttggacaaaaagaagcacaattttgatggtcctatatactattatgtgttcaattcccttctattttcactacttgttctccacatatattggtgggttttaatatatcggatgcttgtgagacaaatcaagacaagaaatgttggagatgatgttcgatctgattctgaaggagaagacgaccatgaagattgattgggggcatcatcttactttctgtgttataacggtgcttatacattcttttacttgattccaacattgttcctcacgagattcaccgaagccgggctacgggttacctgtgtcttggctgccaatttctgtgcattagaaacaacgctgcaatgcattagaaaaaagctggatgtcgaatataacattcttttcggtgttcacacaaagtgcagcggtaaatgtagcgccaatttagtattccggaaacaaaaggactggttgtaaatcaaagcctttctgccgacataccatgtacattctgtttgccaggatgacaccgcttggagttttgtgaacggtagcgctggccgccggtt

SEQ ID NO: 27133 - DNA, 1949 bp, Zea mays
  Clone ID: LIB4725-006-F3_FLI
aaacaaagtggaaaagaaattgggccacgtcacttcatgaccaccctgcattcccatctagccgtcgccacttgccgcggctaacccagctcccagcccccgtctcgtcgccatgggaaccaggaatcttacgcggaaccgcgccgcttccatggcgacggcatccactacgctgctcctctcccttgccttcctcgccttcgcctgggcggcgtcgccgtcgccggatgcggaggcgatctcccggttccaggagtacctccgcatcgacacggcgcagccggcgccagattacgccgcggccgtggccttcctccggaaacaggccgccgaggctggactcgaggcgcgcacgcttgagctcgtcgccgggaagcccctgctgctgctgcggtggcccggtcggcggccgtcgctcccctccatactcctcaactcccacactgacgtggtgccgtcggagccgaacaagtgggaccacccgcccttttccgccgccctcgatgagccatccggtcgcatctacgcgcgaggctcccaggacatgaagtgtgtggggatgcagtaccttgaagccattcgccgtctccgttctgcaggatttgttccagatcgaaatatctatataacatttgttcctgacgaggagattggtgggcatggcggtgttgaaccatttgtttcatccaaggagttcaaagatatgaacgtggcattagtccttgatgaagggcttgcctctccaggggaggagtaccgtgtgttctatgcagagcgtagcccttggtggcttactataaaagcaacgggcgcaccagggcacggtgcgaagttgtatgatggtagtgcaatggagaatttgatgaagagcgtggaggctattaggagattcaggacatcacagtttgatctagtgaaatctggagagaaggctgaaggagatgttgtatcggtgaattttgcgtacctgaaggctggcacacctacaccaacgggttttgtcgtgaatcttcaaccatctgaagcagaggtaggtcttgacatccggatccctcctagtgcccatgtggaagcactggagaggcgccttgttgaagaatgggcaccaccttcacgcaacctgaccttcgagtttaaacagaagatgtctgtcctggacaactttgggaagccagccatgacagcggcagacagcacaaacccatggtggacgttgcttgaagaagctgtgaagagcgctgacggcaaactcggcaagccggagatattcccagcctctactgacgctcgctacttccggaaaatcggattaccagcatttggcttttcacctatggcgaacaccccgatactgctccatgaccataacgagtttctgagcaaagacgagtacctcaagggaatcgggatatacgagtccatcatcagggcactggccactcatgaagatggcggcaaagatgacgaatccagggcagagctgtgagcctgtgactgaggagaaccttgaaccttacctcgcttttgccgcagaccaaatggagcactggaagtcatgtttcggcattatgcagctgcttgtgcttctgctgcggcgtcggagcgatagaaccacaaacatcatctttgtacattctcgcaagagggcttatgcgcttaataattgatgaaattgagatatgtagttcgtctgcgcagttcagggctcaccctgttgctacttgatgctgctttggcattggttgttgtatcaaaacttatatttacgttgcttcgtgcttcattgcttttgtgcctttgttttcatttcatatggtagcatgacagtcgattatgcacaaaatcctcacaggggctcgtttagaaactcattctcttgggatgctctttcatttactagggtgagcaatcccaaagatatcatttgaatctatctatactactattac

SEQ ID NO: 27134 - DNA, 1324 bp, Zea mays
  Clone ID: LIB4725-011-C11_FLI
ctcgaggccggccggagctgtccattcagtgctaaccattgcttgttgcctttgccttctaggagatacccaagacaatgccatatgcaaaaggaatgcaaattgaagtttccaagttggaagacaattctgttgttgcttggtcacctgcagttgtcgcaaagattatctggaagaataacctattagtcgactacactctttcaaagtgttacggtactacattgtctgaggagattgttgatgtgaagcatgtgaggcctcgcccaccacaagcatcagagattagtttctgcatcaatgatgaggttgaagcattccaaggtgattgctggtggctaggggtgattactaatgttcttccagaattcaagtacacatttaagtcaacgcatttagggacggaagttgaggtgaaccagaaatttctgaggcttcgatatgactgggttggtgatcaatgggaacaagaatcaaagaatgtgcccaaggcaaaatttacacaaggtgtcaaggttgaagtctgcagcgacgatgaaggttttcgtggagcctggttcgaggcgactgttgttaaagctgtcggcagcaagttcctcgtggagtatgctacgctgaaggccgatgacgggaccaagcctctgaaagaatctgtagaagcacggcacatcagaccttgccctccagatatccctgccactgatggattcaaactacttgacgaggtcgatgccttctgcaacgacgcgtggtgggtcggtgtggtatccaaggtcctcggcgagaagaggtgcacggtctacttcaggccttggaaggaagagatggagttcgagcatgcgcagctgaggttgcactgtgactggatgggcgggaggtggatgcgggcttccccggcactggagatgtgaaggctgaagagccacgcgatggcgttagacagtagcttggtgattgtatggggtaatacccatagttaaaagtgtgtcgtcactaaggtaccatgttatgttgtcttcctgcatgaagttgccctgtgccatctgcagcaagttggatgatgatcattgtgcagttgctgcaagttgccacaccaccatcaggtctgaatctgaacgcttgccaatggttgatcccattgtgttgtactaggaactagtaagcgcattcagccagtgttaaggccttaagggtgaagaaccgggagctgtggtgctaaatgttaggggtgtcgagtgaacccttattgatcgccggcgacttgtttgttttgcactagactgcttgttttagcatccctatatgctatcttaaggttgtctct

SEQ ID NO: 27135 - DNA, 802 bp, Zea mays
  Clone ID: LIB4725-012-E7_FLI
ccgggattaacccgcatccccccttccgcggcatccatcgtcggctcgtgcgttgtctctctctctctctctgtctgtctctctctctctcgtccccctctcgctctcagacgaccggtgggccgccgccgccgacgccgccctaagccaggtgctgaggctcttgttggtctcttcaccagcgaggagcacccagcaggacaaggcaacaggctgttggaatatggaccaacaaggcatgcatgaccatgaaggggtccacgttgttggatttgaagtcccgccttcaccggattccagctacgacaaccctgttcctgggaatgaagacgaaggccgggagcccccactgatgccacctcatctgcagcacacgctgctgagcttcccaccaagccaagacgagtcgagcccgctgccccagccccagaccgtggttctgaaccacctttacatcgagaaagagaacacgaggtccatggttgctctggggatcacgcaccggttcaaggctaagttcgtgaccgtcgtgctttacaagccagtgctgaggcggtagggtgtggtcgtgtgcctgcgctcctgctccctcttctcgcgcaggatcggtaatggtaatgccgtaatggtaatggtaattgaacaccccttgggttgcagcccaccccttccagttgttgttattgttgttgtagtggtgcagaaacgggcgagaacgtcattttcgaatgattattagccttgttgtacctaatttggctgctggtggtggcagtgatggtttggttggagtagtttgcct

SEQ ID NO: 27136 - DNA, 856 bp, Zea mays
  Clone ID: LIB4725-013-C1_FLI
tcgaggccggcaccgtctctttcgttacctacaggctacagctcccgtctctccgccgcttgcttggaaaacgaagaaaccctcctccaccaacccaatccagctacatccgtctgggtgaactccagggccaggagcagttcgccgccttcgttcgcatcacctacgcggttcgatccaactggcaggaaggaacgtgatggccaagacgagctcgttcaagctggagcacccccttgagaagaggcagtctgaggctaatcggatcagagagaagtaccctgacagaattccagtgattgttgagaaggctgagaggagtgacattcctgacatcgacaagaaaaagtaccttgtccctgctgatcttacggttggacaattcgtgtatgttgttaggaagagaatcaagctcagtgctgagaaagctatcttcatctttgtgaagaacacccttccaccaacagctgctctgatgtcttcaatctatgaagagaacaaggatgaagatgggttcctctacatgacctacagtggtgagaacaccttcgggctgctctagatggcgcaacaccacggctcaccacaatcgggtctgccttgcccttgcttccctactgatgccctgcctcctgtaaataagacctgccaagcaattgtgtatattctggtttcctcgctcaactgctggaagtctaaaacctaccttatgagatgtcgtcgatgtaatggacaccgtttaaattaagtaattgattggacctgaatctcgggggtcctatgacctatgtcgtttacggttactggtccttgtaaatgctgtaacgaggtcaattggattcgcagtatgctatcg

SEQ ID NO: 27137 - DNA, 1284 bp, Zea mays
  Clone ID: LIB4725-014-G10_FLI
ccgggtccgtttcttcaaggtctatcaatcctagaaaagcttgctgcgcctttggctcctttaattgttgggcgcaccggtgctcaactcttcctcactgatggtgatcctagcaagccacctctcctgttacagatggcatccgactgtgatgacaaaaactacatgtaagtgaagaacagaaccatttagaggctaagttcatcatcttactgaagcataatgttcctttctcattgtttgacagatcagccttggcagcttttaagaaccgtgtcctgtatgccaacgtctcgtacgaccgtatccttccctgcaaaaatcgtttcttgaactactggttacctccccccaaactatctctgcttctgttcctgttctttgttttcttgatctttcttgtcccagacatggtcggctggcgaacgtcttcgctaaggagagagaagaatcttataaaggtagcagtacctccagagctgattccactgacagcttacttgtcacactaaactgaacggcatttgaatagatcatcttgttgcatttcctctgcctgcatgcagccctcacatcgttcactggatggctataagcacattgtgaatgtggaatactgttcgcccgtgtcatcggagggcccacatttcccttccaaggctgccagagctaaagaagctgcacagcgaacgccaaaccgagaaaataccgaggagtaccaccaaatgatggagggtaagtaccagttttgcagtccacaccggatttgcttcttttttttgaacgaattgtgtgacactgattcttgaaacagaggagatgctccatggcttgcagaaggttggctggaagaaggtggacgtcaacttccattcgtcattctggccttactctgctcacaacaacatacacgtatgtcttgttcttctggagtgatgtatttttctctctagtttgatccaaattcttctgtattaaagaagagccatccaaattcgtggcatctatgcaggtcaagaacgagtggcttcacaatgctggcgctggtgttatcgcgcacgttgcggacagcatcaagcagcaggagtcacggccatgtcttcctgccaatctatagcagtagcattcagcaatccatttgttcaaattatctgtcgctagcaaataaacccatgaccaaactctgttcgtcagcatccactgagcggcgaaatatttgggactgggacacacaataagctgtgtatcattatcggccgcctaggttttacattgtttgatgtc

SEQ ID NO: 27138 - DNA, 1240 bp, Zea mays
  Clone ID: LIB4725-015-H7_FLI
atcgaggccggcgggatttcattcccaacttggctgcccaacccttgcgtcggtagacggcggcggcggcgaggatagagggttccctgaggaggcagtgatggagaccatggctaagtacaaccgaagcaacccggcagtgaagcggatcctgcaggaggttaaggagatgcagtgcaacccctcacccgacttcatggccctccccctcgaggaagacatcttcgagtggcaatttgctatccttggcccgagagacagcgagtttgagggtggaatctatcatggcaggatccagcttccctcggattatccattcaagccgccgtccttcatgctactcacgccaagtggacgctttgagattcagaagaagatttgtttgagcatatccaattaccaccctgagcactggcagccatcatggagtgtgcgcacagcgttggtggccttgattgcattcatgccaaccaaccctggtggggcattgggctcattggattacaaaaaggaagatagacgggcacttggtataaaatcacgtgaagcaccgccaaaatttgggtccccagaacgacaaaaactaattgatgagatccatgagcaaatgctcagtaaggctcctcctgtcccccaaacgctaccaaatgtgccaaacgaggagtctaacgaattacccgcatctgacccttctggcgagcatgcagacaaggtagatgaaggcgacaacacatctggttctgtatcagactcgtctagtggccttcctgtgcctgaatctgaatcgggggttacagaaaacactggtgaaacctcagcagttgaggttgccaaccatcatgtgcctgaagcaagccacagagagaacattccaagagttagttcgtctcaccagaatcctgctgttgcgatccagaagccaaagcatgacaggctgttgaccttggccgcatttgggctgactcttgctattatggcacttgtgatcaagaaattcttaaaaatcaatggcttgggcggtttcattgagggcaagttctgagtagggattgtgcataagttggatgtaagagatgactcattcctcatactaatatgctataagctatataaccccgtaagatttgtaaatgactgtttagttattatagatgaaatcaaaatggtacggtactattaataccccattgtatctagtacacctgatggaaagtgcagagttttgaggcttctgatcccg

SEQ ID NO: 27139 - DNA, 1118 bp, Zea mays
  Clone ID: LIB4725-017-A9_FLI
ctcgaggccggccggaagccgaagacgcgaccgacccaggcaggcaccactccgctcaacgcaccgggcggcacccaaatcccaaaccctagcacacgcaccatggcggcgcagcagaagatccggtggggggagctggaggaggacgatggcggggacctcgatttcctcctcccgccccgcgtcgtggtcggacccgacgagaacggcctcaagaaggtcatcgagtaccgcttcgacgacgacggcaacaaggtccgggtcacgaccaccacccgcgtccgcaaactcgctcgggcgcgcctctcccgcagcgccatcgagcgccgccagtggcctaagtttggggacgccctcaaggaggacgcgggctccaggctcaccatggtctccaccgaggagatcctcctcgagcgcccccgcgccccagggagcaaagctgaggagtcagctgcatctggtgatccgctggctatggcgagcaagggaggtgctgttctcatggtttgcagaacctgtgggaagaggggcgatcactggacctcaaagtgtccgtacaaggacctggcaccaccgactgaaactttcacggacaggcctccaacgtcagatggccctcctgcaccaggtggtcctgctaagggagcatatgttcctccaaccatgagaggaggtgctgataggactggagactcgatgcgccgcaggaacgacgagaattccgtccgtgtgaccaacctctcggaggacacccgcgagcctgacctccttgagctcttccgtgcctttggccctgtcagccgtgtctacgtcgcggtggatcagaagactgggtcgagcagggggtttgggtttgtgaactttgttcacagagaggacgccgagaaggccatcaacaagctcaacgggtatggttatgacaaccttatcctccgagtcgagtgggcgacgccaaggcccaattagttttgccgctacctgctagaatcgcatatttctgttgaattatatcagtatgtttgtttgaattactggtacctgagtcatgaatttatcttgttggaaaaacctgttatgtgtggtttggttggacgagaataactatactcgcttctttg

SEQ ID NO: 27140 - DNA, 1013 bp, Zea mays
  Clone ID: LIB4725-017-C10_FLI
acttaggtggtaccctcgaggctttccgggaaaagagagagagactaaatcctccctcgaaaccctagcatagccactgccttcccgcacgctaggaaggggaagatatgggcgccgaggaggacgccgctgcacgccgcgagcgtctccgcgccctccgtgccgccaaggacctcctctccacccccgacggcgccccaaccccttccaccgacggagaacaccaaaatggcaaccatgagatggcagaagagccagaattaccaggtcatcaggatgcacctggtgaggctgctaaagaggatggtagccccactgaggaggccgaagaggttgaagatgatggtgagcttccagccatgaagttcagaaactaccttccccatgatgaacaacttcgaggaggcaagctggctccagtgtctcttcccaagtttgaagacccaattagtgccgaaactgcagagccaaaggaagtggagaacctttttggaaacatagcaccaaagaatccaaattgggatctgaaacgtgatgtgcagaagagaattgataaactggaaaggcgcacgcagaaagcgttggctgagattgcatgtgagtgttcgtatatgtttaatctgcagatgcttcatctgttttagttcgtttagggtttcaacgtatctactccgggttgcagtggaacagcagagggagaaggaagccttggaggaatctcaagattgaccgacctgtataagtgaccagtgactcatgctggttggtccctcgagcagacgtcattatcttatttagataatgtaatgtactttgggatgctctgtgtatctaccatcttgggatgtactgaattgagtttgggacgtgtatctacctaccatcttgtattgtcagctcaaggatgtagcaaactagtagcaacttcaaaaaatgagatgtagcagtcctgttctgttagacggacctggtcaaactaccgtactaaatacaaacaaagcacacctttatgg

SEQ ID NO: 27141 - DNA, 1624 bp, Zea mays
  Clone ID: LIB4725-019-E7_FLI
ccgggtctacggctttgttcatggatgcgggcacaacaaaggagatatcaaaagatgagacttgggttactttatccacccttgagagaaacaagtcccagtatgcgatttcatgcttgcccctggagttccgtgacataacagtttcagctatggaccgaattgatactatgattcttaatctgatgagcgagactgcgaagtcatatgacatttctcaaccacttcaggaaatcaatgagtctgttagacttgcatttttgagttcctttctggactttgctggttatctggagaggtttggaggtgaactaaccgagaacagaccaaacaaagaaaacaattatgtctcaaatggatacataaatggtactagagaaacatttgctaacacagatggagatttgcacaaaaagctgctggttgttttgagtaacattgggtattgtaaagctgaactttcagaagaactttacagcaaatatagacacatttggtctccagtcaggaataatgaggagcggagttctgacatgcgagacctgaggacttctttctctgcacttgaagagaaagtcctggaccaatatacttttgcaaagtcaaacttgatcagaagtgctgcacaaagttatcttttggattctgggatttattggggagcagcgccaatggtaaagggcattcgagatgcaactcttgacttactgcacatccttgtagcagtacatgcagaggtatactctggcgctcggcctctgttggagaagacaatgaaaattttggttgagggtttggtcgacatctttcttagtgtttttcatgagaataagaccaaagatattagattgttggatgcgaatggtttttgtcaactgatgcttgagcttgagtattttgagactgtactgcacacgtacttctcacctgaggcgcaacaggctatgaaatctttacaagagaatttgttggaaaaggcctgtgaaagtgttgcagaagccatggaaaatcctggacaccaacgtcgaccaacccgtggcagtgaagatacagcatcggatgacagacagccatcagtatcacctgatgatttgcttgtgattgctcagcagtgcagtagtgatcttctgcaaggggagttggagaggactcgattgaacatagcctgtttcatggagtcgacccttcaaccaacagctgcgccagcaggcccaaagcctgccgcacattcttcttaccaagcacagcatgctcccgtccaaacgtcctcgcctagttttagaaggcagcagactggtacaagttcccctgtagtctccaggcggcgccggtgagcttagtgcatcttcccatcattggcgtagcctcttcccggagtttccttcctttccccccctcacatgtgtgcttttttttttaatctgttgtaattgtcatcctgttgtcatgtgttacgaatttcgatccattcttttggtgttgtataagatgaaaaggaggagtacagtactggtgctgctgcacgggatcatggaattgtataatatcgacgagtcaaatattattgctgcctgaagataccaccacagctttatgtatatggaattctggagttgtcggtcag

SEQ ID NO: 27142 - DNA, 1640 bp, Zea mays
  Clone ID: LIB4725-021-D6_FLI
ccgggctcgcccgagcccgacagatcttcaattccccattccgcccaccgatcgaccttcacgccagtctcggtctcttccgaaggcgtcgcgcgcggttgtttgagaggagaggaggaagatgagggagtgcatctccgtccacatcgggcaggccggcatccaagtcggcaacgcgtgctgggaactttactgcctcgagcacggcatccagcctgatggccaagtgcctggagataagaccgcgggacatcacgatgatgccttcagcaccttcttcagccagactggtgctgggaagcacgttccccgtgcaatcttcgttgatctagaacccactgtgatcgatgaggtgcgcactggcacgtaccgccagctcttccaccctgagcagctcatcagtggcaaggaggatgccgctaacaatttcgcccgtggccactacacaattggcaaggagattgttgatctgtgccttgaccgtatccgcaagcttgctgacaactgcaccggcctccagggcttcctggtcttcaatgccgttggtggtggcactggctctggccttggttctctcctccttgagcgcctgtctgtggagtacggcaagaaatccaagctgggcttcactgtgtacccatctccccaggtgtcaacctctgttgtggagccttacaacagcgtgctctccactcactcactcctggagcacactgatgtctccatcctgctcgacaacgaggccatctatgacatctgcaggcgctccctcgacattgagaggcccaactactccaacttgaatcgccttgtgtctcaggtgatctcatcgctgactgcttctctgaggttcgatggtgccctcaatgtggatgtgaacgagttccagaccaacctggttccttacccgaggatccacttcatgctctcctcctacgcaccggtgatctcttctgcgaaggccttccacgagcagctgtctgtggcggagatcaccagcagcgcgttcgagccggcttccatgatggtcaagtgcgacccacggcacggcaagtacatggcttgctgcctgatgtaccgcggcgacgtggtgcccaaggacgtgaacgccgcggtggccaccatcaagacgaagcgcaccatccagttcgtggactggtgcccgacggggttcaagtgcggcatcaactaccaggcgccgacagtggtgccgggtgccgacctcgccaaggtgcagcgcgcggtgtgcatgatctccaactccaccagcgtcgtcgaagtgttctcccgcatcaacagcaagttcgacctcatgtacgccaagcgcgcgttcgtgcactggtacgtcggcgagggcatggaggagggggagttctccgaggcacgcgaggacctggccgccctggagaaggactacgaggaggtcgccgcagagggcggcagtgatgacggtgacgaggaggaggaatactgatctgcttgcatgaatctgtttggctgtcgagccaggttgtggtgttgaaaaacctttgtttgtgtcctggcccccctgggtaatgtttgggtgtttccttccatcatcacttgctgaactgctctagtatttgcatttgtaattgaagtctgtcgctttaagcacg

SEQ ID NO: 27143 - DNA, 1199 bp, Zea mays
  Clone ID: LIB4725-021-F4_FLI
aggcctcctcgacgagccggacctgctgcagaggcagtcaaattatacattttttctttaactgttagactggagtggtcagcctgtgatccttatttatgttttctcaggcatgttcatggtaagagggttctggtggtgaccaacacgaccgtcgcgccgctttacctggacaaggtgacatgggcactcacccacaacaacctgaatgtatcagtggaaagcgtgatcctgcccgacggtgaaaagtacaaaaatatggacacgctgatgaaggtgtttgacaaggcagtcgagtcccgttttgaccgccggtgcacatttgtagcactgggtggtggtgtcattggggacatgtgtggttttgcagctgctgcattcctccggggcgtcaatttcatacagataccaactactctgatggcccaggtggattcatctgttggtgggaaaaccgggattaaccacccactaggaaagaacttgattggggcattctaccagccacaatgtgttctaattgacacaaatacacttaacacattgcctgacagggagctagcttcaggcattgccgaggtagtaaagtatgggctcataagggatgcaccattctttgagtggcaagagaagaacatgccgaaattgttagcaagagaaccaaatgctttggcatatgctatcaagagatcatgtgaaaacaaagctgaagtggtggcacaagatgagaaggaaagtggccttcgagcaacactaaacctgggtcacacatttggccatgctattgagactgggacaggatatggagcatggctccatggggaggctgtcgcagctggaacagttatggcaactgacatgtctcaccgcctggggtggatagatgactccatcagaaaacgtgtggttgacatactaaagcaagccaaacttcccattgcacctcctgagaccatgaccgtagagaagtttaaaaacatcatggctgttgacaagaaggttgctgatggtctgttgagactcatccttctgaaaggaccgctagggtgctgtgtatttacgggggattatgacgggaatgcactcgatgaaaccctacatgcattctgcgacaactgagacatcccagttttggacatcacttctgtatgctagtactaggctatgtatcaatcagagaaaatattgtggtgtacatt

SEQ ID NO: 27144 - DNA, 1004 bp, Zea mays
  Clone ID: LIB4725-023-B3_FLI
cgggatttcgaagcccaccgaattccctgcgattcctctcccctcgcctcctcgtctccccctaggggatcgtcggagaggaatcgcaaagagggccgtctcatccgagttaaggaagccatggagcacaaggaggctgggtgccaggcccccgagggacccatcctctgcatcaataactgtggcttcttcggcagcgcggcgaccatgaacatgtgctctaagtgccacaaggagatgataacgaagcaggatcaggccaagctggctgcctcctctatcgacagcatcgtgaacggcagcgacgccgtcatggagccggttgttgctggcagcaacacggtagtagctgttgcccaagtcgagttgcaaacaatgaacgtgcagcagcccgctgatgttgccggacccagcgagggggtggcggcgatctccaaaggggggaaggtagggccgaaccggtgcagcgcctgcaggaagagggttgggctcacgggattcaactgccggtgtgggaacttgtactgcgcgctccaccgctactccgacaagcacgactgcaagttcgactaccggactgctgccagggacgccattgccaaggctaatccggtggtgaaggcagacaagctcgacaagatctagggggggttccctacggttggtgtcaggaagattgtaaaccgcggtagctcgtcatgcggaactgctgccttgccccccgcgcctttctcttccatgtttgctgctacaatcttgttgttgggcattgcagtgcacggtgcacacttgtgtagcccgtctccgagaattctcctgcctctgcatctggtcagttcaaaaatgatttgcatgttggctatgttgtgtaagctctatttatggtggtctcgctgagacgggtatttggcttcgcagttatctagctatgtgatgtactgttgtcttgtccctgggtattatatggtacactgcagccagtaatagtaatctgcaactgtgcc

SEQ ID NO: 27145 - DNA, 1550 bp, Zea mays
  Clone ID: LIB4725-024-A8_FLI
ccgggtagaaacttccgtgtgtaggtgacccccggctttacccccgcccttctcgccgtagttttcagtggtacaagcaagggaggaacgaacgtgagggctgcctgcctgcctgcggacatgggctccagcctcaagtaccgatctggcctgtgcctcatcgtcgccgtcgtgctgatctgggtcatctctgccgaggtcacgcaggggatattcacaaagtacagacatccatttgcagttacttacttgggggcctcccttatggtcatatacctccctttgtcatttctaaaagattttatatacaattcgttgagaaggcattctagaaacactagtgcttccaaaattgcaagcaaatcttcctttggtggtagtgcccctttgaagaatggtgaatttcagaagatgttggaaatggaatcacagaaaactatagtggtaaattgccctgatgtgagcatccctgtagtggaagagacaaaaccactcatatgcggaatcactgaaatggatgatggccttttcaaggacaagcaactttccactaaggagattgcaacgtatggattgtatctttgccccttatggtttgtgacagagtatttatcgaatgcagcgcttgcaagaactagtgttgccagtaccacagtgctgtcttcaacttcaggactcttcactcttttcattggtgttttacttggccaagactccataaatgctgcgaaaattattgctgttttcattagcatggctggcgttgtaatgacaactgtgggccagacttgggcatctgatgaatcagaagcaggcaaatctggttttacacagaggactcttctaggtgatatgtttggtcttatgtcagcaatcgcctatggtctatttactgtgctgcttaaaaaattttgtggagaggaaggagaaaaggttgatgtccaaaaactgtttggttatcttgggctttttacccttgttgctctatggtggattgtctggccattaaccgcactaggcgttgagccaaagttttcaatgccccactcagctaaagtggatgaagtggtcgtggcaaatagcctaatcggaagtgtattatcagactacttctgggctctttctgttgtttggactactcccttggtggccactctaggcatgtctctcacaattccaatagcaatggttgctgatatgatcattcacggccgtcactattcagcagtatatattcttggttctgtccaggtattttcaggctttgttaccgcgaaccttgcagatcgcttttctcgttctctagggctatcatagtctcataaaacagaacaggcccttattagagcgtgcatcaggaagctccaaggtcgggttggttaggccaatacttcagaaaatctggatcgggagataccaggaattattttccctttgcttctttaaacatagtggaggtgaattttgccgtggtgaatagtgaaaggcagcagatgaagaagaaaacatatgttatagcaaccctttgcaactgtaaattctcttactac

SEQ ID NO: 27146 - DNA, 1092 bp, Zea mays
  Clone ID: LIB4725-024-E5_FLI
gtgctcccctctcgtccgccgccagcacccccgcgccgccatggccacggactcctccgccggctcgttccagaagatccagatccagcgcgaggacaccgatccatcaacaaacttcagcaaccaaccacagacaaagaagacctggacactaactctccaggtcagcagggagcgtccagccaaacaaggcagagagggcctccacctgaacctggttcaagcagcgattaaataatgcagcatattcttacttttgatgcttatgttgttggcaaagaaaatgctcctggaattgtggttttgcaagagtggtggggagttgactatgagataaagaaccatgcgatccacatttcccaacttggtggaggatacaaagcactcattccagatttataccgtggaaaagttgctctggatgttgctgaggcacaacatctgatggagggtcttgactggcagggtgcagccaaggatatccaggcttcagttaaatggctgaagtcaaatggatcacccaaggttggtgttactggctattgcatgggaggtgctttatcaattgcaagtggagttttagtcccagaggttgatgctgttgttgctttctatgggacaccatcttctgagcttgctgatccttctaaggctaaggctcctatacaggctcatttcggggagcatgacagttttgttggtttttcagatgtcactgcagccaagtccctggaggagaagctcaaatcttccgggataccatatgaagttcacatataccctggatgttcgcatgccttcatgaacacttcgcctgaggcactcaagaggaagaaggggatgggtctgactgatgagaaccaggaagccgtcgacctggcctggtctcgcttctcttcttggatgggccggttcctcggatctgcttgattatgtgccgcgtgatgatgtgtggagtcaggtcccatgaataaaatagaataaaataaaatgttcagattcaggaaccatgcaaatggactgggctgtacggttctctggatttgcttgtccttctgtttatagttatctaccccagtgtggtttcctgat

SEQ ID NO: 27147 - DNA, 2062 bp, Zea mays
  Clone ID: LIB4725-024-E6_FLI
acacccggaccccggtctgcgtttgtccctgcgggctgcggccctgcctcttctcttctcccgttcccctcgccgcgtgagctctctctctctctctcctctgtggtgacgactgggcgcccgcacccccggcagccgccgccgcccagtccccgtcgggcccttcggcaggtcttcttcggccccttcgccggcgacgagccgcaccaggcgtacatgtgtacacccaggcccttaactgcgcccgcccctgcgactggttttcctgctggtttgtgtggatttggctgccggaggattggtgcagcctttaggatcacggtagattcgctgtgaaatccgaagggtgctcaggtcatgttgggggaccagcgcatgatactgggcttagactcggcaacctcatcaagcactgcccctgatttgacccgcgctgaagaggatccttctgtgagcaggagctgcgtgatcgaccgcctgcaggtggggtgggcgcagaagggaggacaggtggagggtctggtgaattgttatagcaagaagaacaagaccggcagtggttcgaggaatcttgcagccagagcctggtcctccgagatggagggttctgatgagggtggtgaagtcaacacgggcgacctcattggcgggatcggcagggagttggccatttcatgcctgctccgtcttccccggtcttactattatgatgtggcatgtgttaatcgatctttctactcccttgtgaggtttggggagctttacaggttgaggcgtgaggctgggatcgtcgagcagatgatctactgctcatgcaatgttctcgagtgggaaggttttgatccgcgccgccaacggtggttcagcatcccttccatgcctcccatagaatgcttcacacttgctgataaagaatccctggccgtgggcaccaacatcctcgtctttgggaagagggtggaagcccatgttgtgctgaggtatagccttctcactaactcttggactacaggagagatgatgaacacaccaaggtgcttgtttggctccgcaagcttcggtgagaaggctattgtagctggcggtattggccagaacggtacattggactctgctgagctttatgattctgagatgcagacatggaccactcttccaagcatgaatagggcacggcagatgtgctctggtttcttcatggatggcaagttctatgtcatcggtgggaaatctgagaggcacaatgagatccttagttgtgctgaggattttgacttggagagcagcacctggcgcttgatcccagatatggcacagggccttaatggtggaagtggtgctccacctcttgttgctgttgtgaataatgaactttatgctgctgactatgcaacgagggaggtcaggaaatatgacaaggaaagtaatgcatggatcactcttggattgttacccgggaggtatacatcagttcatggctggggcattgctttccgtagttgtggaaatatgctcattgtaattggtgcaatgagtgctggtggtagcggggtgattgaaatttgttcctgggtacccaataatggactgccagattggaagatcattggcacccgccgttccggaagctttgtgtacaattgtgctgtgatgagttgttgacataccagggctattacattatcaactgtacatcttgaccaaaaggaaggataaagaaggcaaattctgctgagtctgtttactccttgatgggtaacttctgcccacgggcattttaggctaagctgaaggtccgatagaacttctcatgtagcttcttacatgcctatgtctaatctcttcattttaattccatttggagggcctgcaattgatttctggaacgtggggcatgcagtgcagtattttagattaataatttggtgcaacctcaaaaattttgatcttccctgtgtatcttgatcaaagtttttttagctccagagaatagccttacattggcaaatcatttgcccatagattgtaagaaataaagaaaaaagaaatatctttgttgacg

SEQ ID NO: 27148 - DNA, 1325 bp, Zea mays
  Clone ID: LIB4725-024-G9_FLI
ccgggaagtccaaaagtcaagagccagcccaaagttagcgtcgtcgtgtagtcgtctttctcaagagtcaagagcatcatttcacctagtacccagtaaatggaggcgctcgtggtgcggcagctgggcgatcccaccctgccccctggcggtgaagcctccccgttcgccgcggtctctggggatcacccagtgccggagatctcatcgccgacggctgtccgagtgcgagtcgcggcgaccagcctcaacttcgccacgttcctccaggtgcagggcaagtaccaggagcggcccccgcttccgttcgtgcctggatccgactactctggcgtggtcgacgtagtcggtcccggcgtgcgtgggctccggcccggcgaccgcgtctgctcctttaccggcctcggttccttcgctgacttcatcgtcgccgaggagaagcagctatttttggtgcctgatggatgcgacctggtcacagctggggctttaccagttgcatttggtacatcacatttggcccttgttcaccgagcccaattgaaggctggccaggtgctacttgttcttggtgctgctggtggtgtcggggcatctgctgtgcaaataggaaaagtttgtggtgctgttgttattgcagttgctaggggggctgagaaatcggattatctcaaatccataggtgccgatcatgtaattgactcaagcaaggataatgttatagaaagtgccaagtctttcttaaaggctagaggcttgaaaggtgttgatgttttatatgacccagtcggggggaaattaactcaagatagcctgaaacttctcaattggggagcacaaattcttgtcatcggatttgccagtggtgatgttccagttattcgagcgaatattgctcttgttaagaactggacagttcatggtttgtaccggggaagctacttaactcaccggccacaagtactcattgattcgctcaatgaactcttgtcatggctttcaaagggtctgataacagttcaaatttcacactgctacagacttgttgaggtccatcttgctttctctgccctgagagataggaaggcggttggcaaagtgatgattgtaatgggctcctcagctgtaccaaggctctgatatcattcagaaacgtttctctacgagatcataccaaggctctgttatcattcagaaacatttctctacgagatcatgaggcttatcctgtgtatctcttttatcatctgagactgaagtagtttccttgtcaataacgtggtgtatgatctacaaaaataatcagagaaataagcagtttatat

SEQ ID NO: 27149 - DNA, 1097 bp, Zea mays
  Clone ID: LIB4725-024-H8_FLI
ctcgaggccggccgtgacgacccctacctccccttcccaactcccaagctcgtgtaattgctgcggcgacagtgcccaaataaaatcccctaaacctagcgccgccgccgccatgcttcgccgtctcgccgccgtcgcccagcggaccttctcctcctcttccccgcacgccccgccgctggctgcgtcgggctacaccccgcgccgcgagtacggcctggtgcccatggtgatcgagcatacctcccgcggggagcgcgcctacgacatcttctcgcgcttgctcaaggagcgcatcgtatgcatccatggccccatcactgacgatacggcgtccctcgtcgtcgcccagctgctcttccttgaatccgagaaccccgccaagcccgtccacctctacatcaactccccggggggcgtcgtcactgcgggcctcgccatctacgataccatgcagtacatccgctcccccgtcaccacgctctgcatcggtcaggccgcctccatggcgtcgctactcctcgccgctggggcgagcggggagaggcgggcgctgccgaacgcgcgggtcatgatccaccagccctccggtggcgcgtcggggcaggcgtcagacatcgccatccacgccaaggagatccttaaggtgcgggaccggctcaacaaaatctatgccaagcacacgggccaggccatcgaccgcatcgagcagtgtatggagagggacatgttcatggacccggatgaggcacatgattgggggcttatcgacgaggtcatcgagcaccgccctgtctctcttgtgtctgatgctgttggcagtgattcgcaaaacctcggtggaggcggagctggggtgaataaaggagcggatgagccatcctcagcgtgatggcattggacagtcgcaaggtgcaatcgttgtcatgctcctgtagctgtcttatttggatttgaggtttaattcgtacatgaggtgaataacttaattttctggttgctgggctaatccactagcaacgctgttgttttgatactttaattgatctgttgctgataacgaatgctatctggtatgagccctcaacagcgttgct

SEQ ID NO: 27150 - DNA, 618 bp, Zea mays
  Clone ID: LIB4726-002-D5_FLI
ccgggctgctagtcgccctattctactccactctgttttctggaggctgctaaactaaacccttcttctccccactccgccctcggacccgccgccgccgccgcttgccgggtctatagccatgtcaccagcggttgcctctgcctcatctggcgaccgcatacgaacctacgaagacttcgtgcgggtacacgcgtacctgctggccgcggcgggcatcccgccgtcgctgcaccagaggctgtaccgcaagctcgcggacgaggtcttcgacggcggggaggtctttgccgtagagccgtgcgaggacgggaggcagcggcgcctcgtgctcaccgccgatcagtctctaggaaaagagtccgatgtcttcctcgtcgaccatgcgtggtccttccgcctccctgatgcgctcaagcaggtgagtggcctatgagcctggtgcttgcagtgacttcagctagtttgtcgaggagcgaggtgttttagggtcagtatggcttatacgtgtttgtaacgcgtgcctgaataattactactacgaatttgaagatcgccatgaatccattcagtgtaatcatcttcttccagtggaattaatagttattcagtaaaaag

SEQ ID NO: 27151 - DNA, 760 bp, Zea mays
  Clone ID: LIB4726-002-F11_FLI
ctcgaggccggccgggagcacccagcaggccagggccagccggccaaaacacagaaaagctaaacccgacctccgctcgccggcgcccggcaggatggcttcgtcggcggcgtaccctgatgcggacgagaacctggaggccatcatcacccgcatagagcagaagtcccgaaagatcgagacccttctcaagcagtcgaagccggtggaggccctaaagacggcgctcgaggggtcaccgctcaagacccgcgacgagcgatgcaagtcggcggactggatcgtggtgcaccgcgcgttgatggcgattagggacgtagacggcatgttcaactccctggatcccgagtactacgacatcctcatgaagtacctttatagaggtttatctacaggggataggccaacatgtgaccagtgcctcaaaattcatgaaaaactgactgagaaggcaggcctaggctgtatattgcgatcccttgctgatactgtaaacactgtatgaactttgtctctgctgctgatggtggatattgcaaagttctctcctgctctttacaatcacatcaggcaaactacctgtagttgttaactagttttgcattgtgtctttctttgccattaggcaattttagttagcgtatcattgtaccttactagaatggccgaacaaaatgtgtattatgttgattttcaagtctttgtattaagggtgacaccggactctaaattttactctataaaatttaaggatgggatt

SEQ ID NO: 27152 - DNA, 1103 bp, Zea mays
  Clone ID: LIB4726-002-H12_FLI
tcgcaggccggccgggcgtcggcgcgtcgcatggatatggcccccgcgtctgtctacttcaatccgcgctcggtcgaggaaatcttcaaggacttctccggccgccgcgcggggctcgtccgcgccctcacctccgatgtggacgatttctgcagcttgtgcgacccaggtgagtgagatcgatccgcggcgagctcttcgctgcggtgcgtgcgtgcgtagagtggtggatccgggcggggaatgagcggatcgccgtttccttttcctgcgtgcagataaggataatttgtgtctctacggccttcccaacgggagctgggaggtgtcgccgccggcggaggaggttcctccggagttgcccgagccggcgctcggcatcaactttgcgcgcgacggcatgcagcgccgcgactggctcacactcgtcgccgtccactctgactcgtggctcatctccgtcgcattcttctacggtgcccgcctcaacggcaacgaccggaagcgcttgttcagcatgatgagtgatcttccttccgtcttagaagcattcgcggacaggaaacaagacagggataggtctggggttgatagcagcggcaagtccagacactcatcaaagagaggaaaagatggccatgccaagagttccagggcagcagctcctgccgccaaggagtatgacgaagacgatgacgaggaagacgaggaggagcacacggagaccttttgtggaagctgcggcggcctttacaacgcgagcgagttctggatcggctgcgacatctgcgagcggtggttccacggcaagtgcgtgcggatcacccctgcgaaagcggatcacataaagcactacaagtgcccggactgcagctcgaagaagatgaggcagtaggtgtaggtccccgcgtgatctgactgacccgtgtgatctgatccaaaaccataactccctccgtttgtttgtctcaaggtcgcagctagcagatgtgaattccttcatttgtggggcttgtttatgtggtggtaggaagaggcaaaggactgatagatagagatacatgaccgttttcttttatatatattcgttgttcaccgtttac

SEQ ID NO: 27153 - DNA, 1736 bp, Zea mays
  Clone ID: LIB4726-003-D5_FLI
ccggatcgcttcagctcggcgtcttcacaaacgccggcgcaaactctcgcccgagcccgacagatcttcaattccccattccgcccaccgatcgaccttcacgccagtctcggtctcttccgaaggcgtcgcgcgcggttgtttgagaggagaggaggaagatgagggagtgcatctccgtccacatcgggcaggccggcatccaagtcggcaacgcgtgctgggaactttactgcctcgagcacggcatccagcctgatggccaagtgcctggagataagaccgcgggacatcacgatgatgccttcagcaccttcttcagccagactggtgctgggaagcacgttccccgtgcaatcttcgttgatctagaacccactgtgatcgatgaggtgcgcactggcacgtaccgccagctcttccaccctgagcagctcatcagtggcaaggaggatgccgctaacaatttcgcccgtggccactacacaattggcaaggagattgttgatctgtgccttgaccgtatccgcaagcttgctgacaactgcaccggcctccagggcttcctggtcttcaatgccgttggtggtggcactggctctggccttggctctctcctccttgagcgcctgtctgtggagtacggcaagaaatccaagctgggcttcactgtgtacccatctccccaggtgtcaacctctgttgtggagccttacaacagcgtgctctccactcactcactcctggagcacactgatgtctccatcctgctcgacaacgaggccatctatgacatctgcaggcgctccctcgacattgagaggcccaactactccaacttgaatcgccttgtgtctcaggtgatctcatcgctgactgcttctctgaggttcgatggtgccctcaatgtggatgtgaacgagttccagaccaacctggttccttacccgaggatccacttcatgctctcctcctacgcaccggtgatctcttctgcgaaggccttccacgagcagctgtctgtggcggagatcaccagcagcgcgttcgagccggcttccatgatggtcaagtgcgacccacggcacggcaagtacatggcttgctgcctgatgtaccgcggcgacgtggtgcccaaggacgtgaacgccgcggtggccaccatcaagacgaagcgcaccatccagttcgtggactggtgcccgacggggttcaagtgcggcatcaactaccaggcgccgacagtggtgccgggtgccgacctcgccaaggtgcagcgcgcggtgtgcatgatctccaactccaccagcgtcgtcgaggtgttctcccgcatcaacagcaagttcgacctcatgtacgccaagcgcgcgttcgtgcactggtacgtcggcgagggcatggaggagggggagttctccgaggcacgcgaggacctggccgccctggagaaggactacgaggaggtcgccgcagagggcggcagtgatgacggtgacgaggaggaggaatactgatctgcttgcatgaatctgtttggctgtcgagccaggttgtggtgttgaaaaacctttgtttgtgtcctggcccccctgggtaatgtttgggtgtttccttccatcatcacttgctgaactgctctagtatttgcatttgtaattgacgtctgtcgctttaagcactcttggttctaaagatctctgtgcttttggggggtgtttttgcattgccccagatgc

SEQ ID NO: 27154 - DNA, 1185 bp, Zea mays
  Clone ID: LIB4726-003-F6_FLI
cctcgaggccggccggggatgaaaactgtatggttgactaaaagtgcacttacctacataaataaaaagaacactgggaaatttgatgatactgaaaaatgttagaaaggatgccttttgtctttagcattagcttgcacatatgacaaacttgatgtgcaattgatattttatccatcacatttttttgtgttaattaatgtgtcattcatttggtgccactgagttacaggtggattctcaagaaatcgagaacaaatctgcacaagagttgcctcctggttggattgaagtgaaggacccgacaactggagcgccatacttctacaatcaaagcactggagtgagtcaatgggatcgccctgacagtgttgtgaatatcatgcaacatcaagtttctccatccttgccagagaactgggaggaggcaattgacaaatcaacaggccacaaatactattataacacgaagacacagaccacacaatgggaacctcctacttctgtgaacaccagtgttagacctccagcttccaccaacactgcagttgagccagtcgctcaagctgcagatatttggaactctcaaatgcagagatgtttgggctgtggtggatggggagttggtcttgtccagccttggggatactgcaatcactgcacaagggttcaaaatcgtccttttcaacagtacccatcttacacaaataatacgatgcacgccagtggtaacaatgctcccaaagctcaggggaatgtttcagctaagaacagatcaagctcaaagccacctttagggaaaccaaacagaaaagaccaccgcaaaagaaatcgccccgaggatgatgaacttgacccaatggacccgagttcttactcagatgctccacgcggtggctgggttgttggtttgaagggtgttcaaccacgagcagcagatactaccgcagctggacctttgttccaacaaagaccatatccctcaccgggtgctgtgttgagaaaaaatgcagaggtagcaacccatggcaagaaacgtggtggtatggctccgataacaaaaagaggagatggcagcgacggacttggggaggcagattagtcttttggtgaactgaaatgttgtgctatccgaatctccttggtggttgtctctggagctgctaaactatcattgcacgccgg

SEQ ID NO: 27155 - DNA, 1144 bp, Zea mays
  Clone ID: LIB4726-005-A8_FLI
actgctcgctccctgcccttccctgtacctctctccctagggtttctaccacgcgcccgcttccgactagcagcgctagcgtcgcctaactccgaccgaggggacaacgagggttttgggacggacggcgtgagatttggaggaggcagcggagggccggagaccagaccatgaggccggtgttctgcggcaacttcgaccacgacacccgccagtacgacctcgagcgcctcttctccaagtacgggcccatcagccggatcgacatgaagttaggctatgctttcatttactttgaagatgagcgtgacgcagaggatgctataaggcgtctcgacaatgtgtcttttggttacaaccggcgcaggctttctgtggaatggtctaggcaagttgaaccggtgccaaagagccgtgataggcctactggggatgtaaagccaacgagaaccctctttgttatcaattttgaccccatacgcactaaggttcaagatattgagaagcatttcgaaccgtatggcaagattgccaacattcgcattcgaaggaactttgcatttgtacaatatgagacacaagaggaagctagtgccgctgttaagaacactgacaagagcaccatattggacagggtagcgaccgttgaatatgccttccgggatgatgacggcgatagagatgaccgatacgacatccccaaacaaggtgcttatgacaggcgtggtggtagcccctacatgcgctcacctagcccaaggtaccgaagggactacgttccagattatggtcggcgtggacgttatcctggctatggtcgccgtgatggagcaatgtatgaaaggcgaagccctgtatatgatcgctacggcgggggcagaagccccgcttatgatcgctatgacaggaggagaagccccggttatgatcaatactagtccggtcgattctgaggaacccagtaaggaagtagtttccaaggaagaggtggcgagcaacgacatgatttttgccacgccaagtatacctggaggagccgtggtgttccaagtatgtctgagtgctgtcatggtaacgcgatgctggttccctggttgttgattggaacgaaacctaagcgtctgaaagagattggtttgcatgg

SEQ ID NO: 27156 - DNA, 905 bp, Zea mays
  Clone ID: LIB4726-006-D4_FLI
ccgggcctaccctaccctcctgcgctggtactacttactacctagccaggccaaggagcccaacgagggggaacgctgcggtaggcgcgcgctgctcgtcccaccccacgccgccatgacggtgccggatgccgagtcgcgcttccatgtcctcgcggtggacgacagcctcgtcgacaggaaactcatcgagatgctgctcaagacctcgtcctaccaagtgaccacggtggattccgggagcaaggcgctggagctgctggggctgagggacgcgtcgtcgccgtctccgtcctcgcctgaccaccaggagatcgacgtgaatctcatcatcactgactactgcatgccaggcatgacaggatacgatctgctcaagagagtgaaggggtcctcctcgctcaaggacattcctgtggtgatcatgtcgtctgagaatgtgcctgcccggatcagcagatagcttttgacggagttcacagaaggctgctcgtcgctgattccttttgggagacgcctacccgaatagatcgtactatggtggccctgagcacacctgccgatactgtggcgcagttttttggttccaggagcgtgtaaaaagcgattcatctatagcgcaacgaagacttgcatacaatctctgttgcaaggggggaagatcaatttggagccttacaaaaggccgccatctgtacttgctgatctcttgtcgtttgatggcgatgcgcgctcaaaaagttttttgaggcttattcgcgtgtacaattcactctttgccttcacctcctttggtcccgctatagacaaagcgataaacaatggtactgcgccttatgttttcaagataaatggaatagtacatcatcgtatcggcaccttgcttccacgccgtggagcgatgg

SEQ ID NO: 27157 - DNA, 736 bp, Zea mays
  Clone ID: LIB4726-010-B11_FLI
tatagccacagccttcatatcataatccttgtcatgtagttcatctcaggcagggcattgtaggctagctagtactgttcaagttctgtcatatatgtagtcttctgtaggattgctgcatcccttgaaacttgcattctgtatcacattgcatcctgctgactcacctcccttcataacatctccctgtgttatgcaaagcgcacaaggatctcccctctggcacttctgttttttggaatgaagatgctcagaggagttgttatgaagtcccgatccaatgttctttgtcctccatgtctgtactgactttagctatgcatctcctttgtcaccccagtcccattgcatgtgccatccaatccgtttcgaaccattcatctcaaaaattgcatttagtggtggttttccttcgtcttattatcttttgtgcctcatgatcctggagcatgcccaggattctagtctcctccatgtattctcataaaggacttcatgtatcagagatctgcgaatgctcaaccctgaatatggtttgcttgtccgatgccacttcgcctcatccatacctggagttcagaattggcgaagcacctatcacttagctatctgtttcttagtcagtattgtgtcagactgttgtttttgtgcaatatttgattggctactagtctgtttgtgttactgttcaagtttatggtactgatcatatatggcggccggagtgttccacgtc

SEQ ID NO: 27158 - DNA, 1136 bp, Zea mays
  Clone ID: LIB4726-010-D10_FLI
ctcgaggccggccgggaaggcagacaaacagaaacaggggttcagatacaagtaatctctctctctccaattcgtgagctacatcaagcaaaatggacaagagcattcctgtagttagcaagattttttgctcaggcactccaacaatgctgatgataaggatgagacctattgtagtgaacggtggtggttttgttgttactgacctcagtcataacattgtattcgtcgtagatggttgtggaatacttggatccaagggagagcttatggtcaaagacggtgaaggagaaccaatattattcatctctaaaaagggaggaattgtccaggcgctaagcacaaggaacaaatggaatgtatactccatggattaccaagggaaaaacaagttggtttttagcctaactgatccgaaattatgcacagcacaaggtgctccgattagaattcatattgaacctaagaggcactgcaaaaattgggatttcgaaattggtggatcttttgcagatagagactgtacaatagttgattgcaccagaaaaatagtagcccaggtatgccacgcctttataatcccctacacctctgcttttgtagtaaattatatttgcagattccttgtgttgtcactaattaaaggcatacctgagctgatccaggtcatgatcaacaggtgttattccatgagagcagaaaataagaaagtctatttctacatatctatagacatggtgcatttttggctaaaaaaatgtataaccgtccctagagatagtgctaccctgttatgtacatgtgtatgcaagtacttatatgaaagtgtagaagtttacagacagtattacattcatgccaccagcatttgagtgtcagagggattgagatctaagacatagtatctgttctgcagatgggcacgaaagagccaataggaggcaaggacttctaccatgtggaagtgcagtcaggatatgaccaagctttcatcattggggtgatggcaattcttgacaacatacatggagaatccactagatgctgataacatgaattagagaatttgctcttgtttataagagtagactaatgttcaatagcacttatcttgcaacatactttcatcttcaagt

SEQ ID NO: 27159 - DNA, 1084 bp, Zea mays
  Clone ID: LIB4726-012-A1_FLI
ctcgaggccggccggggggaaagaagagaacaaaaataaagcaagaggcgagaggagagagcaacgacgccatcggagggaggaaagagaagaagacgatccgctagcgtgtgcgtggcgacgagatgtggcggaggcgagtgggcgccctccttctccgatctccacgaacttcttcctcggcctcctcggcctgccagagccgccgccaccatcttctccccagcgaggaacctcttgctctcaaccgtcttgccaggcttttcacgtcccaggctggaagtgatggtggcgatacccagaagccctttattgcttttgtcttaggtggtcctgggagtggcaaaggaacacagtgcactaagattgcttcggattttggatttgcccatctgagcgctggtgatattctccgacatgaaatagcatctggcagtgagaaaggggagttgatcctagaaatcataaaggaagggaggattgttccgtctgagataactgtggaactcatcagaaaagcgatggaaatgaacaatgctaaaagggttcttattgatggcttcccaaggtgtgaggaaaacagaatcgccttcgaaaggattgttggaacagaaccagacattgtgattttctttgactgtcctgaggatgagatggttaaacgccttctaggccgtaaccaggggagagttgatgataacattgagacaatcaagaagcgtctaaaagtgtttgaaagtttgaacattcctgtcgttgactactactcttcaaggggaaaagttcacaagataaatgccacgggtactgcagatgaaatatttgaagcagtccgtaggctgttttcttccttaaggttatgacgaggctagggtcttccagggaaccttgggatttgtctcttccacgcgcatggattttcggaaaagctactacgcatttcgatcagcatccacggagtttattatgtatggatgtatgtgtcccctcagcacattgacatcttgtatatatgcccaaaaatgaatgtgaaccatgtggagtgtttctgaaaaaaaaggagctgaaccctggttggttgtag

SEQ ID NO: 27160 - DNA, 867 bp, Zea mays
  Clone ID: LIB4726-012-A7_FLI
ctcgaggccggccggggcgatcaaaaccaccttcgacgactacgccgaaaccctagcctctatctcattccactccgacattcacgtgcagctgtcgggagcaggcaatggcgccggatctaagcgaactcgccgccgccgctgcagcccgtggcgcctacctcgccggcgtcggtgtcgcggtcctcctcgctgcctccttcctcccagtagccgagtcgtcctgcgtgcgagataactcattggtgagagacataagccaaatgccgcaaagcagctatgggattgaaggattgtcacatataacagttgctggtgcgctcaatcatgggatgaaggaggtggaagtgtggcttcagacaataagtccaggtcaaaggacgccgatccacaggcattcctgtgaagaagttttcactgtcctcaaagggaagggtacgctcttgatgggatcaagctcactaaagtacccagggcagccacaggaaattcctttctttcagaataccacattttcaatccctgtaaacgatccacaccaggtttggaattctgacgagcacgaagatttgcaagttcttgtgatcatttcgagaccacctgctaagatatttttatatgatgattggagcatgcctcatacagccgcggtactgaaattccccttcgtctgggatgaggactgcttcgaagcagcaaaagacgaactctaggtcacaagtgtttcctgcaatgtatctgcttcatccatgatcctgctggactactaaaattcacatgcactagtcgtaataaagccagtgcgcttttcatgtataattctgtattgtggctcgctaaaataaaatttggcaacggtttatgagc

SEQ ID NO: 27161 - DNA, 1618 bp, Zea mays
  Clone ID: LIB4726-012-E7_FLI
ccgaattatcgctttcactttcgtccctaccaactacacagccgccgcctcagcgaagctgtggaagaccagcagcaagggccccttcagccttcgccgcctctgtcccttctcctccttccggtcgaccagatggcctgccgcgcgaaggtggtaggacaggtggagcgggtcgacggagagtcgctatcctacgcggagttcgtccgccgcttcgtggcgcccaaccgccccgtcgttctcacgggtctcacctcatcctggcgggcccacaaggactggactctctccgggtctggtgaccttcgccgccctaatctcggcttcttcacccaaaacttcccttcctctctcgttcaggtcgacgactgctcctcgagtgatttcacggaccagaagcggcttgagatgtccatgcaggagttcatagaccactgggttgggggtcctcattgtggttcaagtgatggagatcgtgatggttctctgttgtatctgaaagactggcacttcgttaaggagtaccctgattatattgcatataccacaccaaccttctttgttgatgattggctcaacatgtatcttgacagtcaccctatacatagagattctgacattgccaatcataaaaatgaaataaactgttctgattatcggtttgtttacatgggggcaaaaggaacctggactcctctgcatgctgatgtttttaggtcatacagctggtcagcaaatgtttgtgggcaaaaacagtggttgtttctaccaccatcacaaagtcattgtatatttgataggaacatgagatcttcggtctataacttacatgatgtttctgaaaagcagtttcctgagtttaacagaatggctagaatgcattcaagagcagaatgaaatcatatttgttcccagtggatggtatcaccaagtccataacctggaggacactatatctataaatcataattggtgtaatgcctacaacctacactgggtgtggaacttgctttatgaagactacaaagttgcaaaagaatatattgaagacattcgagatatatgtgatgattttgaaggactttgtcaacggaatttggcagctaatacaggcatgaacttctatgatttctttgttttcatagtgaggtttgccttagccaatgtagttgagctttaccatcttcagcagccagaggttgcaaccttgtcaacagaaaccgcacaccatttggtctataatctgatgtcaattcgtaatgttgcatcaaaaatgacaactacagaggcttttactactgagaatcgtctttgtagtgtctcggaagataaccgcagtgctttctctaatatcaaacaaatattagaagaggagagtttcagaaggctatcgatgacactgtcaaaggcatatgaccacatagacagagggcaaagaagtctcaaatcttcgatctcgtatcggaagggctgttcgtcagtgatctgcttgaaatctgattgcaatgttgttgactacattacttctttggttgatgaaatttgtggacccgaggatttgacgagactaattgatagtgctctctctcatggataattttagtgtatctagcattgg

SEQ ID NO: 27162 - DNA, 805 bp, Zea mays
  Clone ID: LIB4726-013-B4_FLI
ctcgaggccggcctggataccatccctcgaccggccacctctccccaattgcatcgcatccccaggacttgcgcccggtccagagacggcgataatgggggcttctgaggtgtggtcatcggtgccggcctggctggcgatcgccgtcggcttggcggccgtggtttcctcgtcggaggctcacgtcttctacgccggtggccgcgacggctgggtccttgaccccaccgagagctacaaccattgggccgggcgcagccggttccaagtgaacgacaccatcgtgttcacgcacgaggagggcgtcgactcggtgctgctggtgacggagcaggacttcgacacgtgcaacacgcgcaacccggtccggcggctccaggccgtcggcagcagcggcagttcggagcgttcggtgttcaagctcgaccggtccggcccgttcttcttcatcagcagcgacgaggaacggtgccaaaagggccagaagctgtacgtaatcgtgatggcggttcgccggtcgacgacgccggcggcaccggcaccggcacccgacgcggcgttcccgccggcgccttcaccggtacccgattcggcgttcccgccggcgccttcaccggtgtgggcctcggcgcccgacaacgcgcacgctccaccaccgacggcgggtgcgtcacgtctggacgacggagcgatcatcggctctgtgcttggggttataggagctttggtgctctgtaccgtgtactaatcagaaatcagaaaccaagactccaaggggcgttccgcctgtgtggttttcaccgtc

SEQ ID NO: 27163 - DNA, 581 bp, Zea mays
  Clone ID: LIB4726-013-C10_FLI
taccctcgaggccggccgggagcatctcgatgttcatttctggtttcctgctgtccgcgatgatgatgctctacttctcaagcctgggttacattgatgttatctgggaagaggcacttggtaagctggcgcttgttgcactagcagcgacagtagtggagtgcgttcctgtgaccgaagttgtagatgaccacatatctgttcctttggccaccatgctggtagcttttctcttgtttagctccaaccgcacaatagttaattaaaatactactagtgcattatttaagacatgtgatgagttcttcagtgatgagttgtgcttacttttgcttcctatgtgatctctagtacttgatggcgacggcctaacatctcccagtttttggtgtctccttgccttggctgttttggtggaaaagtattgctagcttgtctaaagtgaatctctcactctcagatgctcagtgatgtgcttggctttacctgacggcctaacacgcccttagagcaactccaaaagagtgtgtaaactaaccccaaaacatgtattagtcaagaatagtggtttttcttacttc

SEQ ID NO: 27164 - DNA, 1016 bp, Zea mays
  Clone ID: LIB4726-013-C11_FLI
ctcgaggccggcccccgccgccgccgctgaagccagcgaggaagggggcggagacggaaaacgcaaggagtggtactccaaggctatcgcctactggcaagtaaagcgcccgctcttcctcctccccgaggccttgaaccctaaacccccaattcaaatgtttattcatgccttcggatttagcttagaatttggtcgatttggtgtcgtagggcgtggaggcgtcgaccgagggggtcctgggaggttatgggtgtgtgaacgacgcggatgtcaagggcagcgacgccttcctccgccctctcctcgcagatcggttcggcaccgcgaagcgtcatctggttgcgcttgactgtggctcgggtattggacgcgtcacaaagaattttcttcttggtcatttcaacgaggtagatcttgttgagccagtatctcattttcttgaagcagcacaggaaaatcttactggatgtatggaccaaggagaagactcacacaaggctgccaacttttactgtgtgcctcttcaggacttcactcctgaggaaggaagatatgatgtgatttggattcagtggtgcatagggcaacttcctgatgatgatttcatttcattttttaatcgtgccaaggtcgggctcaaacctgatggtttttttgttctgaaagagaacattgcaagaaatgggtttgtgttagataaggtggataacagtgtcactagatcagacgcatactttagggacctatttaaaaggtgtggattatatatccttagtgttaaggaccaaaaggaactcccgaagggactatttgctgtcaaaatgtatgcactggtgaccagtcaaccaaaaatccagaatagtggaaagagaagacggcctagaaattcacctcgtatgatccgctcttgaagaatgcccggtactaggtggccattgagctgctgggcctgtctggtcatgtattgccactggattgtgctaaaagttgctgggacatcagtttttgcggcg

SEQ ID NO: 27165 - DNA, 747 bp, Zea mays
  Clone ID: LIB4726-014-F3_FLI
atagaacgccggccgggactatccatcactaggccaccaccagcgggcgggctccagtcgcaactcgcaacacagacgccgccgccgccgccacccaaagaaagacgtcaactccaggagacaagatagtgagaactgaagagaaggatgggcttcgagaagcagatcctgagatccggcaccggccccaagccgataaagggccagaaggtcaccgttcactgcaccggctacgggaaggatcgtgatctgtccaagaaattttggagcaccaaggaccctgggcagcagccattcagtttcagcattggtcagggttcagtgatcaaaggatgggacgagggagttatgaccatgcaagtgggtgaagttgctcgtatccagtgcacgcctgattatgcttatggagccggcaggttcccagcctggggaattcaaccaaactcagtgcttgtgttcgagattgaagtcctcagtgcccagtaattcgcatctgtcagctatggaaacgttggccatgcttctcaagtaatgaaataattccgttgtcacctcatgctacatacagcagattggtgttacgagttaaatcctgtgaaactttagcattctgtaaccgtggatgtcgagtttatggagttccttgtgtggcgcctcaagtcaagttctcgtcaaagattgtaatctgatggcttccattgtgacttgtaggcggctgcaataaacttacttgatgcaattattgct

SEQ ID NO: 27166 - DNA, 395 bp, Zea mays
  Clone ID: LIB4726-014-F9_FLI
cagggtccgcgaccaccaccatagagatggatggcatatggaagtacaagtactgaaaaagtggatatggaatttggagacaaatgcatgaatatgcatgttatatctactatatctgcattgcattttgtgaaaatttgcatggttcctatatttcagcaataactagtcggtaagatatgtgtgcatgcatgtgctagtatatacatgcattgtatcattgcatgtgtggtatatgtgtgtgtcgtttggtcttagtaatccggggcatgatggtacccatacctggatttacatctgcttggtcgtgctgatgttgtgttgtaatttgtaaaaagcagattggagttcggtacagtatattatcgtgaacctatatatattatacttgtgtg

SEQ ID NO: 27167 - DNA, 1514 bp, Zea mays
  Clone ID: LIB4726-014-G3_FLI
gggacggttggcatctcccctgacagggacgggaacagccttcgggctttcctctagcaaccggtcgcgaaccctccccctccagccacgcctcgaaacggcgtcggggcctgcgcggcgagtccatggctgatcgcttcattcccaatgactttcctgacttcgtcgccgaggctgaggcctccgacggcgaggggcaccgccccgcagggcatcggggcctgctctcgcttccgtacaccaggctctccgaccacttcgtccgcgccgcgcgccgcctcaaggacaaggtggttgaggagacgtgggtgaaagccggacggaaggtgacggactacacgctctacacgggctctctcgggacagcgctgctgctgttcaagtccttccaggtcactggagaccgcggggacctcgccctcgccgctgatatcgtccgcgcgtgcgatgatgcatcgcggggcctgccgttcttgacattcatatgcgggagggcgggtgtctgcgctcttggggcggtgattgccaagcattgcgatgatcagctgagggtcactcagtatctgagctcctttgatgagataacaatcaccgagaaagttccaaatgagttgctgtatggaagggcaggctatctgtgggcttgtttgttcttgaataagcatctcagcgagaagacgatccctctcgatcacattaattctgtggcgaaggacattattaatgagggaagaggttttgcaagcaaggggagcagccctctgatgtacgaatggcatgggaagaaatactggggggctgcgcatggtcttgctggaatcatgcacgtgctaatgcacaccgaactgaaaccagatgagcaggatgatgtaaagaacaccctgcggtatatgatcaagaacaagtttcctagtggcaattatccctcaagtgaaggcaatgaatcagatcacttggtgcactggtgtcatggtgccccaggtgttgctcttacccttgctaaagcatatgaggtcttccatgatgattatttcgagcaatcagctgcagaggctgctgaggttgtctggaaccgagggcttctgaagagagtcggaatatgccacggtgtaagcgggaatgcctatgcgtttctctcactctacaggctaaccggtaatgttgagtacctctaccgggcaaaggcttttgcctgttttcttctggagaaagctgatcagttgatagccgagggggccatgcatggtggtgatcgcccgttttcactgtttgaagggaaagctgggatgtcatacctcctcttggacatggttgatccatctgaatcaaggttccctgcgtatgaactttgagatatactattaccctgcgacttgtgaggctgttcgatgatccatcagtcacgaaaactctgtttgtattttctcgtctagtatgtgatgtgtgcttagacctcggtggtctgttgtgtttgtagatttggcgttcgtgatgttgcaaacttgaatcttcgg

SEQ ID NO: 27168 - DNA, 1657 bp, Zea mays
  Clone ID: LIB4726-016-D6_FLI
ccgggaggaccacccctgcctgcgtcgtctcctcccgttcacccctgtctcgtcgtggcgacgactggggaccctagcctcctacgcccaataccctaaacccttcccttgcagcacctgccactgccagtgcattagatttacagcaacggattggtttggccaacacgttgagttcaggttcaatgtctgaaccagcacaacctagtggaggggaaggcgatgtcaacacgctccgaatacttgtagcaaccgactgccatctaggctacatggagaaagatgagatacgtaggtttgattcctttcaagcatttgaggagatttgcgcattggcagataaaaataaggtggattttatacttctcggtggtgatctattccatgagaacaagccgtcacgctcaaccctggtaaaaacgattgagattctacggcgctactgcctaaatgatcaacctgtgaagttccaggttgtcagtgatcagacagttaactttccaaacaggtttggtaaggtaaattatgaagacccaaactttaacgttggtctgcctgtgttcaccattcatggaaatcatgatgaccctgctggagtggataatctctctgctatcgatattctttcggcttgcaatcttgtaaattattttggaaagatggaccttggtggctctggcgttggtcagatagcagtttatcctgtacttgtaaaaaagggcatgacttcagttgcactgtatggtcttggaaacattagagatgaacgactaaatagaatgtttcagacgcctcattcagtacagtggatgcgacctggaactcaagatggggagtcagcgtctgactggttcaatatattggtacttcatcagaataggataaagacaaaccctaaaagtgccatcaatgagcatttcttaccacgtttcctggattttattgtatggggccatgagcatgaatgtcttattgatcctcaggaggtccctggaatgggtttccacatcacacaaccaggttcatcagtcgcgacgtccctgattgatggtgaagcaaaaccaaagcatgttcttttgttagaaatcaagggaaatcagtacaggccaaccaaaatacctctgagatctgtcagaccttttgaatatgctgaggttgtgttgaaagatgaagcagatgttaactcaaatgatcaggactctgtgcttgaacatttggataaaattgtaagaaatctgattgagaagagtagccaaccaactgccagcagatcagagcccaaacttccattagttagaatcaaggtagattactctgggttttcaacaataaacccacaacgttttggtcagaagtatgttggaaaggtcgcaaaccctcaagatattctcattttctcaaaatcagcaaagaagcgccagactacaggagatcacattgatgattctgagaaacttcgtcctgaggaactaaaccaacaaacaatcgaagctctggtcgcagagagtaacttggtaccttttgaactgcatatactgtgtccatttgttccctgtttgaggatggaataaatgttgtccattctattcttactagtcgcctgtaattgtgggaactaagcaaagatataatcttctccatattcttctgttaaaac

SEQ ID NO: 27169 - DNA, 932 bp, Zea mays
  Clone ID: LIB4726-016-E7_FLI
ctcgaggccggccgggaaaacaaaggaaaacagaaaagctgcggaagttgtcaagaactccgacgatcccacatatccgtcaatcgatcgactcccgttcccctcggaatcgaaatggccccgagaattccaacgcacaagaaggggaacaagggaaccaggcatcgcgaagagagcccggggtgatgaattgttacggttcatggacggagcaagcaaggagcctctccgcaaggactactacaaagttctggaggttgactatgacgcatctgatgacaccatcaaattgagttatagaagattagctttgatgtggcatccggacaagcacaagggcaatagcaatgccacaactaaatttcaggagattaatgacgcatacaaagttttgagtgacccaactaagcgactagaatacgatgtttccggttgctacgagatcgaccaatatactttgcgtgtaagattttcttgtcccgtagctagacagtagatgtttgagacgattctttatgcactcattttattatctctatcctctgttgtatttcaggagtaccttacaaaatttaagggtatgatacttacctgtaatggccttggcatagaccattcttctaagtggtaaacacaatacaactgagttgtcacctatttatttcgaaatgatgttatgttttctactcttgatcgttgatggatgcaatgtaaacaactgcatgatgatatcatatttgtcgtttccagggcccgacatttgagggaactgaaacctcattgatcaacgggtatggatttactgctctatgtaagacacaatgtgctgtatcacaattcacaaacaatggccccctactcccctagtcactttctgcccaaaagatgcatgtatgtttactaattccagatggaggatggtctgggctcag

SEQ ID NO: 27170 - DNA, 1217 bp, Zea mays
  Clone ID: LIB4726-017-A7_FLI
gtacctcgaggccggccgggcaggaattttaatgcaggtgtttatttgttagcatggagtcagaaaagggaggatgttgtaggtctgaaagctcccaaaaaggagaagcgagtgaagaaagaaaatagaacacaacctcctgtagaagcaccatatgttgcaccaaaaacgaagatatctatcaaacctgtaccagataaaactgttgagatttttgacgggatgactttgcttgacctttctaaacgaactggtgcgtatattagtacacttcaaggcatacttgcagatcttggtgaaaaggttgaatctgagtttgactctatcagcattgatcttgctgagttggttactatggaacttggcgttaatagcagaagaatgcacactggtgaaggcaagaatgagccacgccctgctgttgtgacggtaatgggacatgttgaccatggtaaaacatcacttttggatgctctccgtcaaacatctgttgctgccaaggaagctggtggtatcactcagcatataggtgccttcgttgttgaaatgtcgtcaggagcatctataacattccttgatactccaggacatgctgcatttagtgccatgcgggctaggggcgctgctgttacggatattgtagtccttgtggttgcagcagatgatggtattatgcctcagacactagaagctatgtctcatgcaaaagcagcaaatgttcctattgtagttgcaataaacaaatgtgacaaatctggagctgatcctgagagggtcagaattcaacttggttcagaaggtttacttttggaggatatgggtggggatgtgcaggttgttgaaatctctgcagttacaaaatctggtttggataaattggaagaggctttgctccttcaagctgagatgatggacctgaaagccagaatagatggccctgctcaggcttttgtggtggaggcaagggtggacaggggcaggggtccactcgcaacagctatagtcaagtatggcacattagttagtgggcaacacattgttgtgggagcagagtggggaaggattaggtctcttagagacacagcagggaatataacgcagtctgcaaaacctgcaatgcctattgagattgaggggttaaagggccttccaatggctggggatgatgttgtagttgttgattcagaggagagggcaagaatgctaagtcatgggag

SEQ ID NO: 27171 - DNA, 914 bp, Zea mays
  Clone ID: LIB4726-021-H2_FLI
ccggggcctctcccccgccgcgccgccacttcccctctcccgtcaactccggcttccgcgcgaggtcgagctagcgtttggagttctcgagacctgctgtgatggcgacagagcaagcggcggagaactacacggtggaggacctcgtggccctgaacccctacaaccccgacatcctcaacgacctcgagaagttcgtcaatgagcggtttgagccagaaaggatgagcatacagattgtggcccacatactgattaaggctctcatggcaatgccagcccctgacttcagtttgtgcttattcttaatccctgaacatgtgcaaatggaggagcaattcaaggtattgatagttctttctcactacctagagactgctaggttcagtcaattttgggatgaagcagcaaagaaccgccacatatcggaagcagtgccaggtttcgaacaagcaatccaatcctatgcgattcatgtactttccttgacataccagaaagttccaaggcctattcttgtagaggcaatcaacatcgaaggtctcgcgttggacaagtttcttgagtaccatgccgcgaactcaggttgggtgattgagaagggtgggcagtctcaagtgattgttcttccgcgtaatgagttcaatcacccagagctcaagaagaacacagccgatatccttccgtttgaacacgtaacacgcatattccctgtccttggctgattcaggcgtgctgagagatctatacaaaactcagcgagtgaagcttctcttagtcattgcatcttcagtttgtagtgtaccctattgagattatctcggtataccagtcctttttatgccggagttggtttctgcaacctatggttattgttattactataacgaaatgctcagatatgagattggtcg

SEQ ID NO: 27172 - DNA, 863 bp, Zea mays
  Clone ID: LIB4726-021-H6_FLI
ccgggcccatttcgaagcccaccgaattccctgcgattcctctcccctcgcctcctcgtctccccctaggggatcgtcggagaggaatcgcaaagagggccgtctcatccgagttaaggaagccatggagcacaaggaggctgggtgccaggcccccgagggacccatcctctgcatcaataactgtggcttcttcggcagcgcggcgaccatgaacatgtgctccaagtgccacaaggagatgataacgaagcaggatcaggccaagctggctgcctcctctatcgacagcatcgtgaacggcagcgacgccgtcatggagccggttgttgctggcagcaacacggtagtagctgttgcccaagttgagttgcaaacaatgaacgtgcagcagcccgctgatgttgccggacccagcgagggggtggcggcgatctccaaaggggggaaggtagggccgaaccggtgcagcgcctgcaggaagagggttggacttacgggattcaactgccggtgtgggaacttgtactgcgcactccaccgctactccgacaagcacgactgcaagttcgactaccggactgctgccagggacgccattgccaaggctaatccggtggtgaaggcagacaagctcgacaagatctagggggggttccctacggttgggtatcaggaagattgtaaaccgcggtaactcgtcatgcggaactgctgccttgccccccgcgcctttctcttccatgtttgctgctacaatcttgttgttgggcattgcagtgcacggtgcacacttgtgtagcccgcctcgagaattcctgcctctgcatctggtcagttctaaaatgatttgcatgttggct

SEQ ID NO: 27173 - DNA, 848 bp, Zea mays
  Clone ID: LIB4726-022-B2_FLI
cctcgaggccggccgggaccaacccgtgaccctaaaaccaactaaagtccagaacagaggcagctctcttggcgtgctcacctgcttgctccaagatttacccctccctcggtgcctgatacctctatcctccgcatccgtctctaaagacaaggcagtcgtcaagaaagggagtttgaccaagagcctgtggtgtccgtcggctgccatccatggcaggggaggccaagaagctcttcttcgcatccgaggttactctccacgcctccagggaggactgctgggtcgtcatcggcggcaaggtgtatgatgtgaccaagttcttggaggaccaccctgggggagaggatgtgcttctccatgcatcagcctctggggatgccacggaagcattcgaagaggtgggacacagcacttcagccgtcagcatgatggacagctacttgattggaagcatcaaggactatgttcgtccgagtgcatcgaaggccacagatccttggagcgctgatgttctaccaaattccaggacgatgcaagggaacaaagtcactcctaatccaaataccttcctggactttcttctcccattgtttgtgcttggcctggcatttgcagcttggtattacctaaccttcatctccaagaaccattaaatacagtgaagctgggaattatttctcactattatactgttagggttatatcagagaaaacattaaaagaaggcaaaccttgtattatggtattttgcacttgaaggttgctagctagggtttccttggatgtcctttcttacatgtaacaggcatgtcagtacgcagatgtatgaatgaaacaatttatcc

SEQ ID NO: 27174 - DNA, 680 bp, Zea mays
  Clone ID: LIB4726-022-F6_FLI
ctcgaggccggccgggaaaaaaaaaaaaccgaattccccagggtccacttcgctcgcaaccttccccagccatggcgaccgcgacgcggaggctgctccccgcgctcctcaagaccctagctccagccggcgcgcgcggcctctccaccgagaaggctgttggtgcagccgccgtcgtcggcagccacactgctaagtggatgcaggacacgagcaagaagtcgccaatggaactgatcaacgaggtacctccgatcaaggttgatggtcgcattgctgtctgtgaaggggcttctgaaggtgttggacttggccacccaatcgagtacatctgccttgatctggaggcacctaatgtgtgcaaatactgtggtctccgttatgttcaagttcaccatcactaaattgggaagatactgccgtctaccgctgcagaagctgagttgaggagtttatatgcacacacatttgttccacaatgttctgtagtgtactttgtactatgcttgcgggcaaagtattacctttgatgatcatcctcttctcgggcgatcttttattaatcctgtcttagtatgggttcatttttctacagatgaattgtgctcctttttcagaatatatacaagctgtgtgtattgaacttttactctgaataagcatggaactaattctgaggg

SEQ ID NO: 27175 - DNA, 716 bp, Zea mays
  Clone ID: LIB4726-023-E3_FLI
cctcgaggccggccgggcaccaaggaaattcacaaagcgatactagtccctaccaaagcatacttcctgaaacactcttgcaatccactgagttctgtttgttgagacgcatagagctagcgtcgacaatgtcgctcgtgaggcgcagcaacgtgttcgaccccttctcgatgaacctctgggacccattcgacaccatgttccgctccatcgtcccgtcggcggcctccaccgactccgagaccgccgccttcgccagcgcccgcatcgactggaaggagacgcccgaggcgcacgtgttcaaggccgacctccccggcgtcaagaaggaggaggtcaaggtcgaggtcgaggacggcaacgtgctggtcatcagcggccagcgcagcaaggagaaggaggacaaggatgataagtggcaccgcgtcgagcgcagcagtggccagttcgtcaggcgcttccgcctgccggagaacgccaaggtggatcaggtgaaggctggccttgagaatggcgtgctcacgatcaccgtgcccaaggcggaggagaagaagcctgaggtgaaggctattgagatatctggttgagcatccaatccaatatggacgtggaaggaaggtgtactgctgctggtccgtggctgtcgctgtcttgtgtgatgtttcctgtgtcttctacgatatataacgtacttccgtttgtttcgtttcgtatag

SEQ ID NO: 27176 - DNA, 431 bp, Zea mays
  Clone ID: LIB4726-023-H9_FLI
ctcgaggccggccgggagcacctcatccccctgcatatactaacactgcaaaactgaaaagggtgatagcaaactacaatgaggattgtgtacatggcagctgttatgtttttggttcttgcaaccatgtcttctacctccccatcattctgccaagctgggggctgcatcggctgcccacgggctccaccaccgccgtccgatgagacatgctacgaggacctcaagtgttcggcttcgaggtgccacctgggttgcatacacaggggctacaagggtacgggttcgtactgccgtgggagggactgctgctgcaaacattgatgcaccgtagtgcatctatgcatttcatgaccatacaataaacctagatgtgtatcctttgcctccgacgactataaatgaaatgaaatactactaaggttcagcac

SEQ ID NO: 27177 - DNA, 689 bp, Zea mays
  Clone ID: LIB4727-002-B7_FLI
ctcgaggccggccgggagtccaactagtccctctccccaaccaccatggccgcttctgatgaccatgacctgaaggcgctgctgcaggtaagggtgagcgatgaggatggtgcgctggtggacgcgctcaaccgtcgagctgctgtttctgccgccgcccccagcttcttcgaggggttcgcgctccacgggatccgcgtggagagcatccgcccaggccacatcctctgctccttcacggtccccgcacgcctcacctccggcagcgatcacatagcccccggcgccgtggtggccctggtggacgagatcggctccgccgcctccgtgtccgacggccaccatctcaaggtctccgtcgacatgtccgtcaacttcgttgacctcgacgccgccgcgcccggggacgccctccgcatcaccgccagggcgctcggccacaagggcgcctactccggcacgcacgtcatcgtcgccaacgccgccacggggcaggtggtcgccgaggggaggcactcgctcttcggcaagatgaagatcaggagcaacatctgaattggagcatgtgtgcacacagtgctgtatttgttgtcgtgtgctctgcttctcgactccttgtcaggaatgtaatggcagcagcttgcttcttcagtaaaaaataaaaaaaaaacagctccattattatgttg

SEQ ID NO: 27178 - DNA, 1391 bp, Zea mays
  Clone ID: LIB4727-003-E6_FLI
cctcgaggccggccgggcacaaaaagacataagccagttgtagggaagggccaagggaaacttcaagatagtatggcgaagaactatcgagagcgccgcttaaagagggcgatgaagatagatgagggagaggacgactttgaagctgattaccaagcattctctaagaagtacgatgagaaggatgagtgccactataagttcatggctttattaccattcaagaatggtcttcctaatgtctcaccgccaacaaaagagaaagttggacttcattttgccatgaaagatgttgtgattagtcaaaaaccaaccaccaccaatgaaggtatcattgtaaggccgaagtgcaagcgaaagaccccatataggggcatccgccgacgcccttggggaaaatgggctgctgaaatccgcgatcctacaaagggtgttcgtgtttggttaggcacgtataaaacaccaaaagatgcagctagagcatatgacgctgaggcccgcaagattaggggcaataaagcaaaggtgaatttccctaatgaaccaccaaacatggtgagcaatgcaccaaaactaattgttactgcaatgactacaatggctatcccagcagacaagttgaatgccaatgaattgatgtgccataaaaactactcaaatgaggattttttctcaatggtgaactttagtggaaacaatggtaactttatttctactgcggcctttggcttacaatgtatcaaaaagcctcgtgttccttatgacatcccaaggatgggtgagtgttcaaatcaaaacagaatgacatatggtttaagtaatggattgggcaatgaagctagtaggaacctgaatggatgctctttcttaccacaagctggcatgccaattttcattcaacctacttttgatggtccttcaaggatgataggaagaaatgatggcgtgattgttcctactttgactaatgcaacacccatggctggtgttgatgctgcgaaaaagatgaatcaacaacctattttccaagagatggaaagtgaagatattccttctattttgcaaggtgatgtcagtgaggacgtggcagctgagattagtatgtgggagttttatgacaacctattagataataaggaaaattgatggatcttgacatcatgcatggtccatatggcttctgtcttgatgatactagcaagtggttcgaagcatgcatgatggggatgtagtcgcaaatgacatattcgttttataatgtcaagtaaaatgcagccatttgtcatccatgtgtatcagtttggactgtttatttatgctttgttgtaagcttacaggcaacggaacctgattgacattgtgggtgttattgtaatgtattgataattttg

SEQ ID NO: 27179 - DNA, 1106 bp, Zea mays
  Clone ID: LIB4727-006-G2_FLI
ctcgaggccggccggggctactgccggctgtcccgagtcccgaccaccgtcctccgctcccggacgtgaatccttcctcctaccgcgatggagaccttcccgtcggtgaagaacatcctcctactggactccgaggggaagcgcgtcgccgtgaagtactacagcgatggctggcctactctctccgcgaagctggccttcgagaagtcggtcttcgccaaaacccagaaagcgaatgctggaacggatggtaatttacatctgatttctcttaatacggaagaattgttttcgactgatggtgagcgttgttgtgctcccttgaggtagtccggagtacttgattaacattatcatctcataatgaactcatgagtgtgatgtattgatgtgcctgtttgcgtgttttttcttttcttcaagtatttcatatgtttatttgtttctctttaacagcagagattgtaatgtttgatggtcaaattgtggtatacaagttcatccaagacctgcacttttttgttactggaggagaagaggagaatgagcttattttagcatcagttcttcagggattctctgatgctgtcgaacgacttctcaagttatcttccctctattgaagtttatcttttcaaccattgtttgttctgttacatgttattgtgttaatgctgattgtatatggatgtgtttccaaccttggtggtttcaggaacatggttgacaaaaggacagcactcgagaatttggacctgatcctattgtgtcttgatgaaattgttgatggagggattgtacttgaaacagaaggaagagagatagctgaaaaggtgtctggtcacggatcggagggtgcttcatcggctgagcagactttagtcaatgccctaacgcaagcaagagagcatctggcgaagtctcttctcatgtgatgttgtgctttatattttgggggtgacgacggagtatctattattgtgtctggatgacactattctttttgttagcaacggagaaagaaaaatgtctgaagcatttgaatgtgtagagtggcacattgcttccaaaattctcatggtcatctataagccttcaaagttcag

SEQ ID NO: 27180 - DNA, 1038 bp, Zea mays
  Clone ID: LIB4727-006-G7_FLI
ctcgaggccggccgggatgatctaggagccgtcgccgtcgagagctgaggcgaagcaacatagaagacgaggggggagtgcgactcctcgtgacttgtgagggagagaagccatggcggagatggagccgagcatcgggaaccatatggccgaagaccaaccgactccggccgcctccactgtcgaggaggccgctatggatgcagataccagcggcgagcggcgtagcgctgccgcgttggtgggcctgctccgcgggttcctcgccgtgcaacagcgccgggccgaggcctactccacgctacgaaggggtttttctgagtatatggcttatggaggtgaattggcctatcaacaactgtgtagcaatattacagcggagttcaatgattgctcaaaacaagtccttgaaataatttccctgctctcaatgccagaatttagtcgcagcgatcttgccgatttactgaagggtgttcaagcacatgagaaagagaagttgcatttgacagctaagattcaggtgctgaagaaagccggcaggccttcagagcgcctggtgaaccacgcagactgcaggtcgcgcagcatggcccagcacgtgtgcgtgcacgtcaaggagatcacggaggccgccggcaccgaggacgccgaggcggatgcggagtatgacgcggccctcaaggaggccatacagggcgtgcaggttgccgtgagcagcataaacgaacacatggaggaggtgcgctacgagattgacggactcgaggcagagacatcggtagcaagtggagcgaagtcgaggaagcgttccctggtaccctgtctataaaatagatagatgaggagagatgagatgttgagcgtggaagactgaagaagaatcacgaacagagagattcgatgtgaatttttgggtactgttcagttcagggtactcgtgttattatacgttctccaatccaaaatttagttctttctggtcttttttccctccacgtttgaatgataatgaatatagagatacatacaaactag

SEQ ID NO: 27181 - DNA, 1394 bp, Zea mays
  Clone ID: LIB4727-006-H2_FLI
ccgggtttacacaatagggtgaggggcgtccattgcgagttgcgactgcgtcgccgattcccctgccggcatgtgcagtccgcgccctcccctcggccggatcctccgcctcgccgtcgccgtcgcggcctgcgcctgctttcctagccccgtctccggcatccggaagggcattggctttattcaaccaattgtgtgcagaagcactgttcaggggcggcatctgatctctgatgataatggttatgtatgttctgcactttcaatcaatccatggtctcactgctgcccaacaacaggggaccgcttttcctgccagggctgcgaacttgatttacagtgctgcaattcatatgaatattgtgtttcttgctgtttgaatccttctaagatcaagaaagaagacgtgctgaagctgaaggtagctaagccagttactgctggaacatacacaaatgttttcgatttctgcatgggacgatgccgccatagctctgcaagtgtggttcatgaaaatgcctatgccagtgatttccattactgtttttcagtgcaacaaaattcatcaggatcaactgagtctagttctgtatcaaagttgttgggcattaacgttgtagtaggaaggcccagggaatcttgcagcttggtgtgcaaagtaagaggacagtcctgtgttccaagcaggctctctgtgttgaacaaatgtgagattttgcagaaatatatgagatgcaagagtggctgctttcccagccttggaccagatcaacctgctgaagttgttgacgaagctccaaccagcttgaatccaggagcatgcttatacatgcagatggatgagcggctcacatgtgatggttcgcaccatcatacccggcggctctgtccatgcgcctgagaaggggaaatgaatgtgacactcataagacagcagaggggaaacaagtggaggcgataagctgataaccgatggttctccatcacacccccatgacgaacaacctctccgcgcatcggttgcgggtttcctcaacaagaacgccctactctcctgtttctgggaaggattatggatgcaaaatgaaatggagtgcctgcaaagatctgctccagttcttgagaagcgtcgtggatgcagaaggagatgcaatgcaatacctttcaaatccttgcatggtatctggtaggattttgcatgctgaatgaaaatgcacgcaggcgattccatgagcctttcatgcatgttttgagacacctgaaccaattatatatattcgtaatatattgcacaagcttccatgcatgttttaagacaaaagtaacccaaacagaactagggatacatgatcttttaaatcaattacaccatgccagccagcatctctgcacac

SEQ ID NO: 27182 - DNA, 1502 bp, Zea mays
  Clone ID: LIB4727-009-C3_FLI
ccgggaaaaaaccagcgtctccaaatctcacgctctctcctcctccccatctccaatctcgcactctcctctcccaaaaaacctcatcttccccgctcgtctgcattctcggccatcggcggcgctccagagttccaggccaggagaagctagagttacaaatcgtagtccgtgagaaccagttgaatttcatcaatcttatcaggtcatctcaagttcagtgactctcaaccagcctacaacgacggaaaggaagttggcaccttcaagggtcctcaaatattgctgcaccggacgttgtgtcgtgtatcattgagaccttccttcctgatataggaaggcagggttcatgagcggcggcacgcctgcagcaagcagtagcctgcgggcagcactctcatactgcgtgaggcaagtccgcgcctatgactaccaccactacctctgccttctccacctggccccggccgtgcgcaaggccgcgttcaccttccgcgccttcaacatccagacagcaagggccatggatgtggtgtccgacccccggaccggcctcatgcgcctcctctggtggaaggaggcggtcgacaaggtctttggcaacaagctggtcgagcacctagttgcccacgcgctctcttcggtcatcgcagaccataaggttagcaagcactggctgaagcggtccgtggaggcgaggatcaacgacaccaaccgtgaggaaggcaccattcctgggacgagcgcggagttggagaggtatgcagaggacacccagtccaccatcctttacatgaccctgcaggctggcggaatacagtctaccgtggctgaccacgccgcctctcacatcggcaaggccagcgggcttctgttactgctcaaggcgctgccgcaccatgtaaataagcaagggacggtacattatatcccagctagtgtggccgaggaatgcggcctgctcatcacacgggagggtggcaggtcggaggtcagggcgggcgtgaggctgccagacgtagttttcaaggtcacatctgttgcagaggctcacctgcacaaggcgcgggagttggcatcgtccgtgcccaaagaggcgatccctgtgctcctcccagccttgccggcctaggtcctcctagataccctgcgaaggtgtgagttcaacgtgtttgatcctcggctgtcgaggggagtccacgaggtctctcctctgtggtaacagctgaagcttaactggaacgcgtggcgaagcaggtactaatgaggaggaggaactttttgccctcaaccatgggagctgctgttgttccttgtagcaaaaagctttttattggggggtttttgacatagcagagattgaataagatgagtagggtctgctacttgcagcagatttgaagctgttgaatatgtgtcgtgctttctgttgtgtttgtgggttgggctcatttacattgcacaattgcaacactgacaatgcctattttatttttgtttag

SEQ ID NO: 27183 - DNA, 582 bp, Zea mays
  Clone ID: LIB4727-014-H7_FLI
tcgcatccgtcccaccggaatccacggcgattcccgtccgcctgctatcttctagtactcacccttgccctcctcgtcgtctctgccgctgccaagtcctcccgccgccccatctccgtacgtctacccgcctgacccgaccctgccatctctcctccgcccgcctcttctagtctctatccatcccatcgcgcttaccgaactccgtggcgcaggacaacgagatccggcagaagaaggaggcctgctacaccgacgtcgagaacgggctgtggggatgggtgtgcaggtactcgccgacggagaaggagaactgcgtgttgcgctgcctctcgccggagtgctacgacctcatatacggcggggatccgcttgaggaaggggagttggactatgttcgaggccaggagtacaagtattgtatgcacaaatcatcccttggagaaagcttggatggtgtgaagggatccttcagctactcatgaaggaatgagaagaaaaaggttctgttagtctgctgtaaattttatttacaatcttgaacagacatgcatctttttagataatggaactgtaattccg

SEQ ID NO: 27184 - DNA, 1297 bp, Zea mays
  Clone ID: LIB4727-015-B7_FLI
ccgggatcataacgacaaaaacgaccatcgtgtgcgaccttttcgtgtttccccagctaccaaatctcttcacatcgtcaatccctcttccacagtttctgaaatcagaagggaaacacaggaacgacaggcaattcgaggcgggcaatctaatcgtctgccatcccgtctcatcgttctcccaaatctgagagcgttcccaggacctagggttcttgagatccagccccaggatggatccgaaccctagagctcccctcctcctcgccatcgtcgttctcgcgcttggcgtatccgtggtggccagcgccgaggacgacgcgtcgggggtctctctgggccgccgcgccggggggttcttgcacggcctgaagaaggatgcactggcggagggcgatcatggggtggcactagacgaggttggaccggggctgttcgacgcactctttgccagcctctccatgatactagtcagtgagattggagatgagaccttcatcattgctgcgctgatggcgatgcggcaccccaagtcaattgtgttgtctggtgcactatctgcgctttatgtgatgacagtattgtcaactggacttggcagaatagtgcccaacttgatatcaaggaagcacactaatggtgctgctacagttttgtacttgttctttggactacggttgctgtatattgcatggaaatctgacccaaagggatcccagaagaaggaaatggaagaagtagaagagaagcttgagtcgggtcaagggaaatcaaccatccgtaggttctttgcaagattttgtacaccaatctttttggaggctttcatcttaaccttcttagctgaatggggcgaccggagccaaatagcgacaatcgcgctggcaacacacaagaacgcaatcggagtcgcagtgggagcgtcactggggcacacggtgtgcacatctctcgccgtggtaggagggagcatgctggcgtccaagatctcgcagcgaactgtagcgacgatcggaggcgttctcttcctagggttttctgtttcatcctacttctaccctccgttgtgatgaaaaggctgctgatcaaaacatagatggcgtaacaacccagatcgtaacagcacgcctcgagtcgcgggcttcgtgtaatgtacagacacattcgaacattcctgacaacaatgttctctgccatgcagccttcaagtccgtatgtagaagctgtctcattgagagcatggttgactttttattgcttgtatccgaagtattaacttatactatacgctgctccg

SEQ ID NO: 27185 - DNA, 895 bp, Zea mays
  Clone ID: LIB4727-017-E3_FLI
ccgggaccagcagcagcatatacatatgttaatggaagaaggcatcaaagagggggcaagcaaagcagcgggagcggcggccaccgaagcaggcgaggcgaacaagagcacgacggcgatgtcggacgtgacgttcaagagcatcggcgacgtgctgaagctgctgccgacggcgacggtgatcgtgtacgaggtgctgaacccgatcgcgaccaacgcgggcgactgcggcggcgctgccgccgggtacaaggtcgccacgggggtgctgctggggctctccgccttcttctgcgccttctcgaccttcaccgacagctacgtgggcgccgacggcaaggtcaagtacggcctcgtcacgccccggggcctcctcccattcaacgtcgccgtgttcgcggcggtctccctgctggccgacgccaacaccgtggcgtgcttctacccgtcgctcagggaccagcagaagaaggtggtcatggcgctccccgtcgtcgtcggcgccgtcgccagcgtcgtcttcgccctcttcccctccacgcgccacgggatcgggtacccgccgtccaagcccgaggcgagcgcgctcgtcgcgtcgcagtagcgcgcggcgccgacgagagtcggggtcgagagctccattggtttcgcgcgaagttgtttgtatctataaatacgtacctctgtgcatacgtcatgcgtgtatcagtgtatgtatgcgtgacgttttcccacgcttgctttcatcgtctgacctgaccagtccctccaaaatcactgtgacccagagcaaggcagccagcttcacctggttcggcttaatacacttttgtatggattttcttttctatctttatctattacattaacatacagagtattaatacacttttgt

SEQ ID NO: 27186 - DNA, 700 bp, Zea mays
  Clone ID: LIB4727-017-G11_FLI
ccgagaagggcagcaaaggggagagaaaaaaaaaggaaatcgatggcggcggccggcggcgagaacagcggcgcgggcgagggcgagttctacctgcgctactacgtgggacacaagggcaagttcgggcacgagttcctcgagttcgagttccgccccgacggcaagctccgctacgccaacaactccaactacaagaacgacaccatgatccgcaaggaggtcttcgtctcgccctccgtcctccgcgaggccaggaggattatccaggagtccgatatcatgaaggaggacgacagcaactggcccgagcccgaccgcatcggccgccaggagctcgagatcgtcatgggcaacgagcacatttcattcaccacttccaagatcggctctctcgtcgatgtccagtccagcaaggacccggagggcctccggatcttctactaccttgtccaggatctgaagtgtttcgtgttctcgctcatcaaccttcacttcaagatcaagccaatccagtcttgagctccatcccaagccttcatgtagctggtttgtgagactgagagtgttttgagagagaacctttggtattgtggacgatgcgtgcgataggccctgtgtggtgcacttagtggaagtggaaccccctttgcatttggtttgtgcaaactgctgagtagagaacgtcatatttgtgccc

SEQ ID NO: 27187 - DNA, 1352 bp, Zea mays
  Clone ID: LIB4727-017-G4_FLI
ctcgaggccggcgggggaaaacactttttatgccagaaattcctccacgaccatcaccctcatctgtccgtacgcgactcgccgcaggaagagggccgcgggcgacgacctctcgtcggcggtggacatggatgtcgacgccgacgcgcagcgcgccacggacaagctgaaagcagtgtcagaggcacttgggcatgagatccgggttttttcaagtgagaactttgcttcacaaaccagcaagttgcctagtgcagatcatgaggaagatgacgacttttatgagcttcagcctgctgattactacaacttgatttcaaacaggatgggaggtagaaaatattgtttcggactttagttatttagtgtcaacttagtttaatatattgaccaacctgaattattttgcattctgatttacttacggtagcactgttgaaaatggcaaatttgtgcagagcactttaaaatgctgaagactcgcaagatgcgggaagcagaacttgctgctcagcgagcaaagagaacaaaaacagtaatgagggtgcgtttcccggatggctacatccttgaggctgactttattccatcagagaggatacatagtctagtggacctgctcttgaaagtacttgctagaccagatctgccattctatctttatacagtacctccaaagaagcgaatactggacacatcacaggacttctatacagctggttttgtccctggggctaatgttcatttttcttatgatctccctgaagattcgttgttaaatgcagatgatctaaaagcaggaccctttctccgcgaagaaattctaagtttggatggattgtcacttctgctgaaacctgctagtcaacctgatgattctagaatgaactcttcttctcttcaatctgatgcatctcaatctgttcctgtaccaacaacaacaaataagaagcctggcagaccaaagtggccgaaaaggtgataccactccaggtgtcaagtgtatgccatcaacacagaatcactctgttaggcttctaaacactattaatggccgaacaagctcaaatctgaacagggtacactgctgtagtacaagaattggatcctctgcttacagaagctgcaggggcattagaaatagaatcccacctttttttctaggtgggagccaagtagcatgtaaatttgaatgtgttgcgactcatcaagtcatcagaacagtgctcccctgtggctaagcactttgtcatcttacatttcgtgtaaaccccataggaagttagaaacggcggagataatagtccagtgttgttaacgcttcacggtgcaatgccatgcctgtcttcacg

SEQ ID NO: 27188 - DNA, 1404 bp, Zea mays
  Clone ID: LIB4727-022-A7_FLI
ggccggccgggacccgatctggctgcctcggtcgatttctaattctcctcgcgagcccaaaccctaaacctaaacctttcacccgccgccgccgccaccaccagcactgccactccgccaccaccgtcccgaagccccctcccagcgccatcgacttcatctcggattgaagcaatgtcgtcggacgatgaggtcagggaggagaaggagctcgacctctcctccaacgacgttgtcaccaagtacaaggctgccgccgaaatcctcaacaacgctctgaagattgttgtgtctcagtgcaagccaaaagtcaagattgttgacctttgcgagaagggcgactctttcataagagagcaaactgggaatgtttacaagaacgcaaagaggaagattgaaaggggtattgctttcccaacctgtgtatccgtcaatgacacagtttgccacttctcaccgcttgcaaccgatgatgccgttctggaagaaaatgacatggttaaaattgatatgggctgtcatattgatggctttattgctgtggtggcacatacacatgtaattacaaatgggcctgtcacaggaagggctggtgatgtgcttgctgctgcttatgattgcaaaattgtggaaggtgttcttagccatcaactgaaacaatttgtgattgatggtaacaaagttgtgctcagtgtctccaatgctgatacaaaggttgatgatgctgaatttgaagaaaatgaagtatatgcaatcgatattgtcaccagcactggggaggggaagcccaagttattggatgagaaacagaccaccatctacaaaagggccgtagacaagaattatcacttgaagatgaaagcgtcaaggtttattttcagtgagatcagccagaagttcccaatcatgccttttactgctagggcattagaagagaagcgtgcgcgtttaggcttggtggaatgcatgaaccatgaactattgcagccgtaccctgtacttcatgagaagccaggcgatcttgttgcacacataaagttcactgtgctgctgatgcccaatggatcagataagataacatcacatcctctacaggagttaaagcctaccaaatccattgaagacaatgcagagataaaggcatggcttgctttggggacgaaatcaaagaagaagggtggtgggaagaagaagaaaggcaagaaaggagatgcagcagaagcagatcccatggaggaggcgacaaacggtgctacaagccaagaataattctgatttttggaattactgccaccagcttttttcttgtttcttcgctgcatctgatggtgttatattacattcagttgtggaaaaattgagtactatttctagcttctaagaaatgaagcatcctattatcgg

SEQ ID NO: 27189 - DNA, 1765 bp, Zea mays
  Clone ID: LIB4727-022-D5_FLI
gcgtcttcacaaacgccggcgcaaactctcgcccgagcccgacagatcttcaattccccattccgcccaccgatcgaccttcacgccagtctcggtctcttccgaaggcgtcgcgcgcggttgtttgggaggagaggaggaagatgagggagtgcatctccgtccacatcgggcaggccggcatccaagtcggcaacgcgtgctgggaactttactgcctcgagcacggcatccagcctgatggccaagtgcctggagataagaccgcgggacatcacgatgatgccttcagcaccttcttcagccagactggtgctgggaagcacgttccccgtgcaatcttcgttgatctagaacccactgtgatcgatgaggtgcgcactggcacgtaccgccagctcttccaccctgagcagctcatcagtggcaaggaggatgccgctaacaatttcgcccgtggccactacacaattggcaaggagattgttgatctgtgccttgaccgtatccgcaagcttgctgacaactgcaccggcctccagggcttcctggtcttcaatgccgttggtggtggcaccggctctggccttggttctctcctccttgagcgcctgtctgtggagtacggcaagaaatccaagctgggcttcactgtgtacccatctccccaggtgtcaacctctgttgtggagccttacaacagcgtcctctccactcactcactcctggagcacactgatgtctctatcctgctcgacaacgaggccatctatgacatctgcaggcgctccctcgacattgagaggcccaactactccaacctgaatcgccttgtgtctcaggtgatctcatctctgactgcttccctgaggttcgatggtgccctcaatgtggatgtgaacgagttccagaccaacctggttccttacccgaggatccacttcatgctctcctcctacgcaccggtgatctcttctgcgaaggccttccacgagcagctgtctgtggcggagatcaccagcagcgcgttcgagccggcttccatgatggtcaagtgcgacccacggcacggcaagtacatggcttgctgcctgatgtaccgcggcgacgtggtgcccaaggacgtgaacgccgcggtggccaccatcaagacgaagcgcaccatccagttcgtggactggtgcccgacggggttcaagtgcggcatcaactaccaggcgccaacagtggtgccgggtgccgacctcgccaaggtgcagcgtgccgtgtgcatgatctccaactccaccagcgtcgtcgaggtgttctcccgcatcaacagcaagttcgacctcatgtacgccaagcgcgcgttcgtgcactggtacgtcggcgagggcatggaggagggggagttctccgaggcacgcgaggacctggccgccctggagaaggactacgaggaggtcgccgcagagggcggcagtgatgacggcgacgaggaggaggaatactgatctgcttgcatgaatctgtttggctgtcgagccaggttgtggtgttgaaaaacctttgtttgtgtcctgggtaatgtttgggtgtttccttccatcatcacttgctgaactgctctagtatttgcatttgtaattgaagtctgtcgctttaagcactcttggttctaaagatctctgtgcttttggggggtgtttttgcattgccccaaatcccaataaactcaccaaattcgggtcgtgcgtgccttcggcgccttgcccgactagcg

SEQ ID NO: 27190 - DNA, 866 bp, Zea mays
  Clone ID: LIB4727-023-A2_FLI
tcgtaggccggccggatgtgattctttttcttgctctttattgttctattgttttcttagtatcttgacggcagtgaagattgttgccttaacatgatgtacacacgtttcaactcaaaaggctagaaccacctggattcagtttccagatcgtaaatacaaatcttgatgaagttagccctcgtgctcgacgaagaagtgctttacttacatggcaacatatagcatcgctgccacccaatttgcctgttatctattgtggaggcttcaatacacagaaggaatctatgactgggcggtttttgcttggcagatccagagaacatggtgttgttggtgatatgagagatgcttggccaaatgctcgagtgcgaaaaaatgtttcactaatacacacatatcatggatttaaaggggagaaacaaggtgccctggaatttcttaaattgatatttagagctctttgcctctgctgggatcgacagacacaggacttgcatatcgactggatcttgtttagaggacgcccattggttcctgcactttgtgaggtcattaatgacaatatagatggtgtttatccgtcgtcgcacttccctatctttgccgagtttttgcttccacgctcagtccgcctagctgagacaccttcatagctattgtgtcaattttttgttctatttttcccaatcttattttgattacggctgattgtttctttcgaccacttcaccatgatcttgaggtaacccccctttacaaccattgttgggtttctttctgttatcccattccgcaaaacaagacaatgcacatgtgcatccttgtatgtttcctgtcactagtccctattatgtgttcgccct

SEQ ID NO: 27191 - DNA, 361 bp, Zea mays
  Clone ID: LIB4727-024-G10_FLI
gcagatgcctcggtgtttatgttcggagatgaagacgatgattatgaaagtgaatagtgcttctatgtgtgttccgttgtacagtttggttccctctagtccccctctcggcctctcccacccacccaaaaaaaaacacagcagctgagaaggagaagtcgaaagaagttatgcctgtttgattgctaaatatgccacatattggctaaaattgaagaactaacattagatagaaaaagttaggcaaagtgtgtcaagttagacagagaaccaaaagcgtcatcagtctgatattgtacccagatgaaacttgctgtaactcaaccagggctgaaccttgttgataactctcctacttccg

SEQ ID NO: 27192 - DNA, 1127 bp, Zea mays
  Clone ID: LIB4727-024-H1_FLI
ctcgaggccggccgggagaaataggtgctcattctgaagcacttgcaaccttctcctcgcccaccttcatctccaaatacatcccatgaactcgcataaatttcttctggcagtgctgctgcttttgcttctcaactatgcatcctatgctgccacatcgaaggaagatgatgacttcctcaaatcttgcccatcgcatcgatgccacaagcatggaccagagatccggttcccctttcggcttccaagcctccctccatcctgtggcgcacctgggatgcaattatcatgttctgggcatgacaccatccttgatcatccagttcttggctcctgcagagtgacagcaatatattacaggcatagtgtcatgaatgtcatcccgccagaggactcatcatcacactgccaacttcagaagcttgttaaaagaaatcaatcaactgatgtgtacacacctgtagtgaatcctgtctcagtacttgtaggatgctcaagagaagcaacaaatcaagatggtattgtcggcccaagctcttgtttaagcctcattaacaatgcaagccagctctggtacctggtggatccttctacagatatgtctactcttcccatgggctgcgaggttgttgcaaagggaatcccagtaccctacacttacgacaaaaatggtccaaactataacacattctccggaaggtcactcttcaacgaaaaggcaaatagaacaatcaattttggtgaaacatcattcaattggaacctcaacaacatcaccggctcttgtcaaaggtgtgaacaggaagggaaacattgtggattcagttcaaacaggcgacaagcattctgcctgcatcacgacgagaaagctactcaggatcctgaggttcagctggtagagactgctgagcaggacctcgttgaaggagaagaacaggtggtcgaagaggagccgcctaactgaggctttcgacttgatctagttgtcgtctcccagtcagctctctggcgctagggagtaatatttagttcactttattttatcatttatttttgtaagacttccgctatgtaataagtacatttatgatatttatgacatttatctctatgcactctgttattat

SEQ ID NO: 27193 - DNA, 976 bp, Zea mays
  Clone ID: LIB4728-002-D10_FLI
ctcgaggccggccgggcccctcgccggcgccgccgcggcggcgagaaagagagaacgcgctcctcttctttctcgactcgatctgccccttccagcgcgctcgcccctcatcgagcggcctccgtagccctaggtgatccgcgcctccttccgccgcagcggaacaggacgcctgaccgtcgaccgtcgaagcgattcctctctcgcgggcgtcctcatctcgccctcctcgcctcctcggtgccagtgggtcggcgcggggaggcatccgtccgggctacggtcgatttgttctccacttgctgttgaactttaaatagacaatggatctggagacagaaaatcgtcttgcttctttactacttgaagaggcccgaagattacaattagaggctaacagggaaggtgttcaagcatatctgcgaaaacctaatgttaggcatcgtccaaactcacggttcctcacagccacagttcgtggagttcagcaagcaaatcgtgttgtggaggtcaatgaaatgtggcgtgccagggaaaaggaactggagttggagtcaaaaatgaaaggctgaagtagcagaagtaaagatcatggtgattttagaggtgagaagcgcaaaagtgaaagaaaccatagctccggctcaaggattgaacaagaagggaccacttatgataattcgtactcagaccaggaggatggtctcagggatgatgaaattgaaagacttctttattcaagggcgaagcgaggacgtggggctgttggttccaggatggacgagcctggtccataccttgattctctgtcccatcatcaggacaatggacctagcccggacatacgtgtggaagaaaaatgggaacgcagagtacaaggcccagagaagcctccattttggggatgcaagtctctcgatggtcattggcgcttgggcacattggatggaaggccatcaagctctgaaccacagag

SEQ ID NO: 27194 - DNA, 993 bp, Zea mays
  Clone ID: LIB4728-003-G12_FLI
tccgaggccggccgggctctctgtctctctagggtttgtgattttaaccgccgccgctgctcatctcacatccctcgagaagacgcctgctcctcgccgatcgatacgatggccgtcttctccgacctccacaccgccgacggcctcaagtccctcgaggctcacctcgccggcaaaacctatgtgtctggtgactccattactaaggatgacattaaggtcttcgccgcggtgccgtcgaagcctggcgctgagtttcctaatgccgcccgctggtacgagaccgtctctgcggctgtagcctcaagattccctggtaagtctgttggtgtaaatctgcctgcgggatcagctcctgcggcagctgctcctgcggatgaggctgaggacgatgatgaccttgatctttttggtgatgaaactgaggaggacaagaaggcagctgatgagcgtgccgccgctgccaaggcctcctctaaaaagaaagaaagtggtaaatcctccgtccttatggatgtcaaaccatgggacgatgagactgatatgaagaagctggaggaggctgtccgcagtgtcctgatggagggcctgacttggggagcatcaaagcttgtgcctgttggatacggcatcaagaagatgactatcatgttgacaattgtcgacgatcttgtgtccatcgacactctaattgaggaccaccttacgcaagagcccatcaatgagtacgtccagagttgcgacattgtggctttcaacaagatctagagttcagtttctgagtttgggcaacggcagcggctcagctcgtcaagtttgtgctgggatgccagtttatcccttctagtctattacagaaatgttgttcggagctgagtctattataaacatcttggtctgagtttattgttgagtggtgccagtttttttcaatatacatttatcttaaaaacagcggtactgatgtttttttgtctaaagttaatgagtttg

SEQ ID NO: 27195 - DNA, 871 bp, Zea mays
  Clone ID: LIB4728-004-B11_FLI
cgcacgcaaagcagaacgctcccctcccggccttcccttcctccccgccctcccagaaggccagaagcttccggaagccagcccaagccatgaacgccgccagcaccgccgccgcggcccccgcgcctgccgcgaccgtgcaggtgccgcgcgggcaggtggatctgatcgacttcatcgactggaccggcgtcgagtgcctcaaccaggactcgtcccacagcatcgtcaacgcgctcaagcagagtttgagagacgacgaggggctgtacctcgccagcgattcggacgagcagctgctgatctacatccccttcatgcaggtagtcaaactgcattccgtgctattcaaaggtcccgaggaagagggccccaaaacagtaaaactctgtctccaacaaagagcatatgggtttcagcaatgtcaatgactatccaccaagtgacaccctcgagctatcatccgatcatttgatagagaataaacttttgccacttaagtatgtcaagtttcaaaatgttcgcagtctgactatatttattgaggacaaccaaagtggaagtgatgtctccaaaattcacaagattgctctttatggaacaactgtggacacgacaaatatgaaggatctgaagaagatagaagagcactgagacaattttaaggctgagcttattccagtccagtgggtgcatggcatactagaagcagtttagatgttgaattgagcaatttctagttgaccctgcaactttcccccttatttctatacatgaggagttaaaagagtgtgcgagtctggtgatgctgaagctattgcctcttgacatcctgtaatcctgcaatttatttatgtgacttgggagtgac

SEQ ID NO: 27196 - DNA, 1003 bp, Zea mays
  Clone ID: LIB4728-004-H10_FLI
aaccctcacactcccatccagccgccaccaggtgcagagtctttcgtcatctcttctccggcgaagaacccccagtcgcccaccagatcacttgttaaactttgttgaggggtgatggcggtttctttcgcaaacctcaactccgaggcagggcttaaaaagcttgatgagtaccttctcactcgcagctacatcactggctaccaagcttccaaggatgacttggctgtctacacttcgttttcggctgctccctcgtccaagtatatcaacgtagcaaggtggtttaaccacattgatgcgctcgtgaggctgagcggaattactgcagagggccaaggtgtgaaggttgaatcctcagcagttccttcagccccaactccagatgttgctgaagcacaggccccagttgctgaggaggacgacgacgatgatgttgacctttttggtgaggagaccgaagatgagaagaaggctgctgaagagcgtgctgcagctgccaaggcttctggcaagaagaaagaatctgggaagtcatcagttttacttgatgtgaagccatgggacgatgagactgacatggccaagctcgaggaagctgttaggagtgtccagatggaagggctgctctggggcgcatccaagcttgtcccagttggatatggtatcaagaagctgcaaatcatgatgaccatcgtcgacgaccttgtctctgtcgacactctcattgaggactatctgtgcgctgagccagtgaacgagtacgtgcagagctgcgacatagttgccttcaacaagatctaggcgtgacttccgatcagtccttctcctggggtgctggcgatggtggtggctgggcaatgcaccagcctaatttatccatagctatatgtctgctttgtgtggccagtgatattgccgtgagtatttttggatcctattcgagtcgaatgtaccagtaccagagttaatttgctttaattcgaaacaccgttccagttcg

SEQ ID NO: 27197 - DNA, 1084 bp, Zea mays
  Clone ID: LIB4728-005-B7_FLI
ctcgaggccggccgggagccagccagcgagtaactgaccactgggcccgatggacgacttcgatccagtcccctccgacgatgacggcgatggcggcgtcgccgcctcctcctcctctcccggccgctccatctgccacgccggctgtggccgcccgtcccgcgtctgcctgtgcccgtacctccctgcctcccctctcccgacctccacgaccgtcgtcatcctccaccacccgcacgccctccggcggaacccgctctcgacactgcccctcctcgcgcgctgcctctccaacctccgcctcgtcccgggccgccgcctcctctcctcttccaccgctcccgccccgggccccgtcctcctgctctacccgtcgcccgccgcctccgacctcgtctcctggtgccggtccacgccgcggcccgcgcgtgccgcccccaccctcctcctcctcgacggcacctggaggcaggccagggagatgcacgcggccagcctggccgtgctcgcgtcgctgggcgcggtccccgtcgccctcccagtcgacagccgcgccgacggggacagcatgttcgagtccgacctcgtggtgaggaaggagccgcgcaaggggtgcgtcagcaccatggaggccgtggcgagggcgctgcggctgctggagccggagcgggagggcgccgtggtcgaggagaccatgctcggtgtgctccgcgccatggtcgccttccagaccgagcatctgcggcaccggacggtgaagcctagagcgaagatgaggaagaagaaggaactcaggagggagcaggagatgcagagggatgctgtggactgatgcggcttgctcgtggtgctgagtggaatttcttgccttggaatctatcacaaaatccaccagactccagcagtgaaggtctgattttacctaggcatatcgatggtctcttcacttagtatgcattgttgcttagcataaccggatcatgttggttctagctcaaactgcctatgtctttccgatgttgtaaactgggttcatgttgattctagctcaaaaggattctgtgacgcaattatttctcctccg

SEQ ID NO: 27198 - DNA, 665 bp, Zea mays
  Clone ID: LIB4728-006-A8_FLI
ggccggccgggaaaaaaattttaggaagcacgcagccacacgccgccgcctcgctctctgctcccctctccatttttcatctcattcggcgccgcggcaccccctgctcgtcactcgcgatggcccggatcaaggtgcacgagctgcgcggaaagagcaagacggatctgcaagcgcagctcaaggagcttaaatcggagctctccctcctacgcgtcgccaaggtcaccggcggggctcccaacaagctctccaaaatcaagatcgtgcgcacctccatcgctcgcgtgctcaccgtcatctcgcagaagcagaagtcggcgctgcgtgaggcgtacaagaagaagaagcttctcccgctcgatctccgccccaagaagacccgcgccattcgcaggcgcctcaccaagtaccagctctccttgaagactgagagggaaaagaagcgtgagaagtcttttcccatgcggaagtacgctatcaaggcctagattagtgaaagaacagcttttatcctatcaagttctgcccagaagtttcttgagtttgatgtaccgcacatctatcgtcattacaatggaatgatgaaaacgaatatgttttcggcttctactccacacagtctttgttggcgatgctacacgtcttattaatgaattcttgcg

SEQ ID NO: 27199 - DNA, 747 bp, Zea mays
  Clone ID: LIB4728-006-E6_FLI
ggccggccgggatccatcctcgctagctcgctcgctctccttgcaactccagtgctgctcactgccactgccagcagatcgagctgctccgtctcacaaaccctcttgctttgctgctgcacctgcaagtctgcaaccgcgcacacagagatgtcgacgacggtgagccgtgcgtccctcgaccagaagctcgccctcgccaagcgttgctcccgaggtacgtgcgaggcacactagctctgccctcgaaccaaacaaacaagctagcctgtttattacgcaggcagtacagtagtacactgactaaactgactgatcgatgcttgtctgtatgtcgcatgcatggtctgcagaggcgaccctcgccggagccaaggcggcagcggtggcgactatcgcctccgcgatccccaccgtgagtttcctttcaccgtctctagctttctcccgtagatttaatcaggcgctgccgtacgtacgtacgcgtcgatcgtcgcgaaacggcccgtcgtcggccagcagtctctaataactggtcgtcgcttcttcagctggccagcgtgcggatgctgccatgggccaaggccaacatcaaccccaccggccaggcgctcatcgtctccacggtggctgggatggcctacttcatcgccgccgacaagaagatcctgtcgctggcgaggcgccactcgttcgagcaagcccctgagcacctcaagaacacctccttccagggcaccggccctc

SEQ ID NO: 27200 - DNA, 816 bp, Zea mays
  Clone ID: LIB4728-007-F11_FLI
ctcgaggccggccgggaccaccaccactggacgtcagcctagcaattagctcatcgactccagattggagaactcgacaccatgaaggtgctgatcgttgcccttgctctcctggcgctcgctgcgagcgccgcctccagtacaagcggcggctgtggctgccagacaccaccgtttcatctaccgcctccgttctatatgccgcctccgttctatctgccgccgcagcagcagccgcagccatggcaataccccactcaaccaccgcagctaagcccgtgccagcagttcggatcctgcggcgtcggcagcgtcggcagcccgttcctgggccagtgcgtcgagttcctgaggcaccagtgcagcccggcggcgacgccctacggctcgccacagtgccaggcgctgcagcagcagtgctgccaccagatcaggcaggtggagccgctgcaccggtaccaggcgacatacggtgtggtcctgcagtccttcctgcagcagcagccgcagggcgagctcgcggcgctgatggcggcccaggtagcgcagcagctgacggcgatgtgcggtctgcagctgcagcagccaggtccctgcccttgcaacgcagctgccggcggtgtctactactgaggaaactatgtactgtagtaataatgtaatggagccgctgactagctacctatagctagttcactcgtttagcggcgatgagtaacggagtgtcacccatcaccatgggtggcagtgtgagcaatgacctgaatgaaccattgaaatggaaaggaataatatatagggaaaaaggatgtttag

SEQ ID NO: 27201 - DNA, 1389 bp, Zea mays
  Clone ID: LIB4728-008-C4_FLI
ggcctgccttaaccattcctcccaacaccacctcgcctgcgatcttcgtagcctccgtcgcgtcgagcatcgatcatgtcggcctactgcggaaagtacaaggatgagctcatcaagaatgctgcctacattggcacccccggcaagggtatccttgctgctgatgagtccactggcaccattggcaagcgcctttccagcatcaatgtcgagaacgttgaggagaaccgccgtgccctccgtgagctcctattctgctgccctggtgctctccagtacatcagcggtgtgatcctcttcgaggagaccctgtaccagaagaccaaggatggcaagccctttgttgatgtcctcaaggagggaggcgtcctccctggcatcaaggttgacaagggcaccattgaggttgttggcactgataaggagaccaccacccaaggccatgacgaccttggcaagcgttgcgccaagtactacgaggcaggtgcccgctttgctaagtggcgcgctgttctcaagattggccctaatgagccatcacagcttgccatcgacctgaacgctcagggtctggctcgctatgccatcatctgccaggagaatggtctggtgccaattgttgagcctgagatccttgttgatggccctcatgacattgatcgctgcgcttacgtcactgagaccgtccttgctgcctgctacaaggcgctcaacgagcaccatgtcctcctggagggtaccctcctgaagcccaacatggtgactccaggctccgactccaagaaggtgacccctgaggtgattgctgagtacaccgtccgtaccctccagaggaccgtccctgctgctgtgcctgctgttgtcttcctctctggtggacagagcgaggaggaggccacccgcaacctcaatgccatgaacaagctcagcaccaagaagccgtggtccctgtctttctccttcggccgtgccctccaggcgagcaccctcaaggcctgggctggcaaggtggagaacctggagaaggctagagctgccttcctcgccaggtgcaaggccaactctgaggctaccctcggcacctacaagggtgatgctgccgccgacaccgagagcctccacgtcaaggactacaagtactgagttgcttctctttgcgtgcccgttttggaactcctgcctacgagctaggttgcggagtgtggtttgctcgttagagcttattttcggacatccaaaaaacatgcttcctatgtgggatgatggttatctttatatttgtatgttaattagtctctttgctgttaaatttcgtgtaagttggtcctgccgatggagaatcgagcagctccctttttttgttctatcaactatgctgtaattctggcg

SEQ ID NO: 27202 - DNA, 1598 bp, Zea mays
  Clone ID: LIB4728-008-H11_FLI
ccgggaagtaacttgaggactgggctgcaaaaggaaaaggagccgaggaagccctcccctctcgccgcagccgcaccaccagaccgacaaccggccggcttccctcgcccccggcgaggagtgaagacaagccgacaaggcaaaaccatcgcctgtacggtatccaaccgccgtcccgccgcacaaccaaggatagggcgggagagggggatctcgctttcgctccgctgccgcatgcgcaccgcccctcctcatgacaccaactagggcaccaccagcccccttctcgtcgacctccgcgcggtgactctgctgagcatcatacccttatagggcccgacccatggatgtaacttcgaccgctgccgcctccgcctcaggcgggggtaggtggtacacgggcatgtccgcggataacatcaagggcctggtgctcgcgctctcctccagcctcttcatcggcgccagcttcattatcaagaagaagggactcaagaaggccgcatcctccggcgtcagagcgggggttggtggctattcttatttatatgagcctctttggtgggttggcatgataacaatgattgttggagaagttgcaaatttcgcagcttatgcatttgctccggctattttggtcactcctctcggtgctcttagcattattatcagcgctgtgcttgcacatgtaatgctgcgggagaagctgcacatatttggcattcttggatgcgccctatgtgttgtgggatccaccacaattgtccttcatgctccaccagagcgtgaaatcgagccagtgacagaagtgtgggatctggctacagaaccagccttcatgtgttatgcagcagtggtaattgctatagctgccatacttgtttatcggtttgtcccactttatgggcagacacatgtcatggtctacataggtgtttgctctctcgttggttccatctcggtcatgagcgtgaaagctcttggtatagcattgaagctgaccttttcaggaacgaaccagcttatttacccacagacatgggcttttagtctggttgtcatctcatgtatcattacccaaatgaattacttgaacaaggcacttgacacgtttaatacagcagttgtgtcacccatttattataccatgttcacatctttaactatcttggcaagtgtcatcatgttcaaggactgggacaggcaaaatcctacgcaaattgtgactgagatgtgtggctttgttacgatcctttctggaacttttcttctacataaaacgaaggacatggctgatggtgggctttcgatgtcatcctccttccgtcttcctacatcttcttcggtgcgcttctccaaacaaacagatgaagatggtgaaggaattcctctaagatcgtccgaatcattccggtcaccacattaacgcatgcttgctaatcattaatttgcacagagttaggggtgggtattatatagataatgctatcagtgagcttgtactaagggtacgatggatggaccctcttttgctttggcagaattgtatatgtatgcccaacatcttgtggaactcccaatatatttctcttggctat

SEQ ID NO: 27203 - DNA, 690 bp, Zea mays
  Clone ID: LIB4728-009-D8_FLI
agacccgggcgggccccggcaattcacgcacctcgcgcgcacacagacacagtcacacaggcacacagcgcaatcaccgtctcgcctcgcagtcgtactcgcagtctcgcacacacccgtcccgccgtccgcatcctcttccggtgtcgccatcccctccgtcgcccgccgcgtccggccgcggcaacccgacctgtgtcaatctccatgactacctcaaggcgtcttgctgataggaagatatcacgatttgagaagaatatcacaaagaggggcgctgttcctgagacagccaagaaggcaaacgattatcctgttgggcctattcttcttgggttctttgtcttcgtggttgttggatcatctctctttcagatcatcaagacagcatcaaacgctggtctattctgaggagaatcggttgacacatgcagtttgtcactagaaactatacaagtgtagggcgtggctcaatgtcgcctttttaatgttgtaccgtggagagttttaagttatatatgtaatggaagtgctaatttaagtcacctgtctgacaggaaagatgttggagtagtccacaatacatatcgagtatagttatagttcgtgctaaatatttttatgctcaaattggtcacagcattgggctattgtactcttcgatttatcgagtaatttggtaatctttcg

SEQ ID NO: 27204 - DNA, 1226 bp, Zea mays
  Clone ID: LIB4728-009-E3_FLI
atcgaggccggccgggaaaaaaaaaaaaaaacaacaaaaaagattggattcttgaggagcgcaacgtgctggctccgtgtctctctcgcccttctcccgtctccgctccgcctccgcgcgtccggcgagaccgcgagagcgagacgatgggaatgctacaaattccccttctgagtccgaccctcctcatccaatagtaccacctgctcgctgctccgccaccgctctcgctcgatcgcccccctcgttcgtcggccttcgcttccagacctccgagtcctcaatctgcagctttggtaattggtcgtatagtccctcatcatcggaatggtggggtcacttatctttcccacacctaatgtggatccgaaggcagagaatcctaatgagatggttacagccggtgtgctttcaagccttcagaatttcctacgcaagtgcctcatagccatcctctcatatggcccaatgcagttaatggaggaaaaaatcaacgaactcttagagaaccgaagtgtaatcaacaagattaactgtaagaccaacttttggggtaacttggacttgttatatgagccggtgcggttggcggctgagaagctgacggcgagcacagctgggaacacagggctggtcttttctatctgcatgccatacaactcgacttctgagattgtcaatgctgtcagtcaagtctgtgcggaaaggatggaaatgtttcagagcgaacatattggcgaatgcaatggtcatgctgcaaataacggtgtgcgatcagagatttcagtggcggatttggatcgccacatgtatagtgccgaatgcccagatcctgatattgtcatccggacttcgggcgagactcgattgagcaatttcctcctttggcagacaacgtttagttacttgcagaatccagatcctctgtggcccgagttctctttcaggcaccttgtttgggctgtcttgcagtatcagagagtttaccctgctctggagcataacagaaagttggctaagaagcagttgtgattccatgttacttgcaaggaggtatcatgaagggctattaacatcaaacttttccttctcaatttcctggtaatggtaaatgcaaagaagaacatactagcatataacattatgaatagatcaccatgtaacttaagtgtgattgctaccgtaaccatgtaacttatttgagctcgtacaaatgctgtgattac

SEQ ID NO: 27205 - DNA, 576 bp, Zea mays
  Clone ID: LIB4728-009-G12_FLI
ctcgaggccggccgggacaactcacaagtccccacagcactctccccgaccttgccgtccagtcgtccaccccaccgccgcagcctcgccccgaggagacaggagaacagcaggatgccggcgacgccgacgatcatcggcgccctcctgggactgggcactcagatgtactccaacgccctccgcaagcttccctacatgcgccatccttgggagcatgtgttggggatgggtctcggtgcagtatttgtgaaccagctggtaaaatttgacgagaagctcaaggaggacctcgacaagatgcttgagcgcgccaggctagccaacgagcaacgctacattgatgatgatgaatagctgttcagatttgtttgtcagtgacctgtatttttttgcaacatgttgtcagtacacatggtcaggactgtggatcccccatgacttagttgttgcctcagcttccacatttcaactgtggccttgtaataaaatgtcgttgcccaatggatctgatggatcacaattgtaagctacaaattatgggctttgaatatgatcgcttactttctctgatgc

SEQ ID NO: 27206 - DNA, 1021 bp, Zea mays
  Clone ID: LIB4728-010-B7_FLI
atcgaggccggccgggacactcccatccagccgccaccaggtgcagagtctttcgtcatctcttctccggcgaagaacccccagtcgcccaccagatcacttgttaaactttgttgaggggtgatggcggtttctttcgcaaacctcaactccgaggcagggcttaaaaagcttgatgagtaccttctcactcgcagctacatcactggctaccaagcttccaaggatgacttggctgtctacacttcgttttcggctgctccctcgtccaagtatatcaacgtagcaaggtggtttaaccacattgatgcgctcgtgaggctgagcggaattactgcagagggccaaggtgtgaaggttgaatcctcagcagttccttcagccccaactccagatgttgctgaagcacaggccccagttgctgaggaggacgacgacgatgatgttgacctttttggtgaggagaccgaagatgagaagaaggctgctgaagagcgtgctgcagctgccaaggcttctggcaagaagaaagaatctgggaagtcatcagttttacttgatgtgaagccatgggacgatgagactgacatggccaagctcgaggaagctgttaggagtgtccagatggaagggctgctctggggcgcatccaagcttgtcccagttggatatggtatcaagaagctgcaaatcatgatgaccatcgtcgacgaccttgtctctgtcgacactctcattgaggactatctgtgcgctgagccagtgaacgagtacgtgcagagctgcgacatagttgccttcaacaagatctaggcgtgacttccgatcagtccttcccctggggtgctggcgatggtggtggctgggcaatgcaccagcctaatttatccatagctatatgtctgctttgtgtggccagtgatattgccgtgagtatttttggatcctattcgagtcgaatgtaccagtaccagagttaatttgctttaattcgaaacaccgttccagttggaattctgtt

SEQ ID NO: 27207 - DNA, 1126 bp, Zea mays
  Clone ID: LIB4728-010-B8_FLI
ggccggccggggagcacgcgcgagagataggataggaggaaagggaagctagcggcttcgctctcgcggggagatggcgcaggcggtggaggagtggtaccggcagatgcccatcatcacgcgctcctacctcaccgccgctgtcgtcaccaccgtcggctgcaccctcgaacactacgagatttggcgcctcgtcactaacttcctctacttccgcaagatggatttggattttctattccacatgttctttcttgcacggtactgcaagcttctggaggaaaactcatttagaggaagaactgctgactttttttacatgctcttgtttggtgctactgtcctaactggcattgttctgatcggagggatgataccttacatttctgagacatttgccagaattctgttcttgagcaattcattgacatttatgatggtttatgtctggagcaagcacaacccttttatccatatgagctttctgggcctgtttacctttacggctgcgtacttaccatgggttcttttgggcttctctatcctcgttggaagcagcacatgggtggacctcttgggtatgattgctggacatgtgtactacttcctggaagatgtatacccacgtatgactgggcgtcgccccctaaagacaccgtccttcattaaggcgctatttgctgatgacaatgttgtggtggcacagccacccaatgctgggattggtgctggtgcaaggttcggtgctattggtgtagatccccaggctcaatgatgaattactttcagtgacctgagggccgaggctgtgactgatctgggatgcggcagtttgtattctctgcgcaaattgcggaactgtacaagccattgttcttgtgtatttatacaggctagatgagagttattgtgcataacaaaaagattagtagtatcggaggcggctaagtttgtcacctgttggcagggcccggaggaaaatggatcgtgatgggcaaacaggccaacccctgttgcagaaacttgttcatgtgacggtttaacatctgacctgctaccctttcatgcatcggtgaatttagtctaggaaactgtttgaagtggggaaatttggtgctttggcagc

SEQ ID NO: 27208 - DNA, 1223 bp, Zea mays
  Clone ID: LIB4728-011-B11_FLI
ggccggccgggactcgcccctcccacacctccgctcccggcctgtgccgccgtcgccaccgctcgctcgcccgccagcctgcctgggcccgcagcaccgactctgacagcgcccgtcctgcttcctgtaccggcaggcgagggagaggactcagggagtgtgatggcggcaatgccggcgccgcttctgcctctgcttctgctggtggtggccgcggcgatgacgctctcccccgccgccgcccgcattcccggcgtgtacggcggcggcggcggcggctggcagagcgcgcacgccacgttctacggcggcagcgacgcttcgggcaccatgggcggcgcctgcgggtacggcaacctgtacagccaggggtacggcgtgaacaactcggcgctgagcacggcgctgttcaacgaggggctccgctgcggcgcgtgcttcgagatcaggtgcgaggagcagcccgggtggcggtggtgccggccagggaggccctccatcctggtcacggccaccaacttctgcccgcccaactacgcgctcccctccgacgacggcggctggtgcaacccgccccgcccgcacttcgacctcgccatgcccatgttcctccacatcgccgagtaccgcgccggcatcgtgcccgtctcctaccgccgggtgccgtgccgcaagtccggcggggtgcggttcaccatcaacggcttccggtacttcaacctggtgttgatcacgaacgtggccggcgcgggggacgtggtgcgcgcgagcgtgaaggcggccagcaccgggtggctgcccatgtccaggaactggggccagaactggcagtccaacgccatcctcgtcggccaggcgctctccttccgcgtcaccgccagcgaccgccgcacctccacctcctggaacgccgccccgagcacctggcagttcggccagaccttcgagggcaagaacttcagggtctgatgcatgggatgggatgggatgggatgcgacttgggagaagaagccaaaactcttttctttctttctttctttctttcttcttatacgtaattattactactcactcctgctagcgtactactgctactggagtactaagcgcgtgttagggtggtgggtgctgtcaatgcctgttttaaggtcacgccttcccgccttaatcccagatccaggtccaggtcctctctgaaaaaaatggagccttttcttctgcc

SEQ ID NO: 27209 - DNA, 1055 bp, Zea mays
  Clone ID: LIB4728-011-D4_FLI
accccccttcctcctccgatcgagccagggccaggcaacctggtgctccgcccctcgccgttaccgcgacgcttcggcctctggctccaccgcctgcctccgtggctccgtgacgagacacgacgccgagaggtcacccccacaccgcgccgaggccaccccgcttgggattgtgaggtaaagcgtgatggcagcgccaccggcgagggcccgagccgactacgactacctcatcaaactgctcctcatcggtgacagcggtgttggaaaaagttgtctcctgttacggttttcagatggatcattcaccactagcttcattaccactattggcattgacttcaagataaggactgtcgagttggatggcaaacggattaagttgcagatctgggacactgcaggccaagaacgtttccgcacgattactactgcttactacaggggagcaatgggcatcttgcttgtgtacgatgtcacagacgagtcatctttcaataacataagaaattggatcagaaacattgagcaacatgcttcggataacgtgaacaaaattctggtggggaattaagctgatatggatgaaagcaaacgggctgtgcccacttcgaaggggcaagctctcgctgacgaatacgggataaagttttttgaaacgagtgcaaagacaaacctgaatgtcgagcaggttttcttttccatagcaagggacatcaaacagagactttcggagaccgattccaagcctgaggatcgaactatcaagatcagggctgaaggggaagctgaggcagcggcggcggcgcagaattcagcttgctgtggctcctgagcacttgtcaccgcaagatagtggcgttctcgcgcatgtaattttcatcgtttcattctttgccagcgactctctccttgtgcttcttgagctatcgcagttgctgtggcctggacaaatgggtgttaactgttaagtcagagcagttaattgctgtattgtgggaactctacccatggtaaggcgtgcataatggctgtgcaaagtacctttttacacg

SEQ ID NO: 27210 - DNA, 1568 bp, Zea mays
  Clone ID: LIB4728-012-A10_FLI
cctcgaggccggccggggtagtagcctcgtagggccaacatgaccgaactcaaaatgtgcagcccacctccaatcccgtagaagatagtgctgccctgccgaatgccgcccacctccaatcccgtagaagacaaagagagagggagagaactggacggcggcggcggcggagacgacgatgcagtggtacttggtggccgcgctcctcaccatcctcaccagctcccagggaatattgaccaccctttcccagagcaatggcaaatacaattatgattatgccacaattccttttttagctgagctcttcaagttatctgtctcaggcttcttcctctggaaggaatgccattcttcatctccaccaaggatgacaaaggaatggaggagcgtgcgactatatgttgttccttcagttatatacctcatccacaacaatgtccagtttgcgacattgacctatgttgacccatctacctatcagataatgggaaacttgaaaattgtcacgactgggattttgtttaggcttgtcctaaaaaggaagttgtccaatatacaatggatggcaattgttttattggctgttggtacaactacaagccaggttaaaggatgtggagattcaccatgtgattctcttttctcagcaccattggagggttacttgcttggaatactttctgcttgtctttcagctctagctggtgtgtacacagaatatttgatgaagaagaatgatgatagtttgtactggcaaaatgtacaattatatacgtttggagttatctttaacatgggctggctaatttatggcgattttaaagctggatttgagctaggtccatggtggcagcgcctttttaatggttattcgatcacaacatggatggtagtgttcaatttaggatctactggtcttctagtatcatggttgatgaaatattctgacaatatagtcaaggtgtactcaacttcaatggcaatgcttttaacgatggttttatctatatatcttttcagtgtgaaagctacaattcagctcttcttgggcattatcatttgtataatttccctgcagatgtattttatgcctgtgcacatgcttattgagttgccacaaactttgcctgtaacatcaaagtaggttcatggcattgttagctaacccattgatcagctgagggtagggcactgttgattgagtggttaattgactatctgcagcccagctctatttgagtcatatatttggagatttatggttgtaatctcaacagctatggatatagacagctaggttagtttcatgttgcaggaaaggtgaatcaactgtcaagtgagcatgtaatgccaatacaaatggattgaaagttaacacctacatgccttccaatttttatccaggtaaaagatggaggctgattagttttgttgcctagggaaacgaaatccattcaaatgcaagttttcttaaaatagagcaaaactactcattcaccttgtatccacagttttgcattaatggagtcgatatggaactgacaagtacaatgagttatggcttc

SEQ ID NO: 27211 - DNA, 1292 bp, Zea mays
  Clone ID: LIB4728-013-G4_FLI
ccgggaacattctttttggagttgctctgctcttatccccaccgcggaaccagcaaaacccgctgcagcctttcgaattatggcagctgccgcagccgcgggcggagctgcatcagccgccgtcgccagccaagaacctatgaaggctctcggcacaggcatcctccgccgctccgcgccgcactggtccacagccgccgcttccttcttttccccacccttccgcccccgccgctgccgtcgcgcgcccgctcctgcagccgccgcgcgtaccccgcggtcccgcgcgagtgccaaggcccgggcgaagctcctggcggaggttgaggcccgggacccctggctcgcctccctctcgctgcttccgaccgacgacatccccagtgctgacgccaccaccaacgggtgggtgattggggtggatcctgacattggaggcgccatcgccgtcctctcgcctgacggctcgtctcaggtgtttgacaacccgttcgtgcacattgtggtgtcagaagtcatccgtaagcgactggacaccaagtcaattatccaactgctccgtggccttgatgcgcctcctggaactacggcatacattgagaagcctagcccatttccaactgatggaaagcagggatggtggagcactggtttctcatatggcttgtggattgcttctctagtggcttcggggttttcggttgtcccgattgcatctcagacatggaaggcttactttgggctaatgcgaagtgaaacaccaaaggatgatagcagacaagctgcttcaattttgttccctgacaaagatcagtccttgaagttgaaaaaacaccatgggcgagcagaggctcttctgttagcagcctatgggaaaggccttgtgctgccatcggggaagttcagcaaaacctcagtttgatgtctatggtgattgcagattgacttgccatttttttgggggtaaacagaggctcttctgttagcagcctatgggaaaggccttgtacgatgcctatggtgattgccgactgacttaccatttcctgtattgatggtactgcaaattttcatttcgcttaggaggccccaatcaagacattaaggttgaatctgctgtaagtttgcaaaccgtaatagagatcatagctaacccatcatttttcgtggaatgcactacagcattagacatttcccattgtgtccttagtgtggcaggctacctagatgaaatctggatgttgtaaacatgtaatgatggaaactggaatgaactggtcgtcttttcggtg

SEQ ID NO: 27212 - DNA, 1017 bp, Zea mays
  Clone ID: LIB4728-015-H1_FLI
ctcgaggccggccgggccctgaatgccaccgaaccgcaagaggcgagcagcagccatggatcccgcggcaggaggcgccggccagcagcgccagaacaaagcttcggcgggcaagaaggtaaagaagggcggtggcagcggcgggagatggccggcggtcaagcccaagaaggatctccagatcaatcgcctcaagggcacccacctcctcaccattccagacttcttcacttctgcggaggcaaaggctttcattgatatcgctgagtcgatgggcttcacgcaccagggcagtttggggccactaaagggggaggcttacagagacaacgatcggatatctgtgacggatccattgcttgctcaagccatttgggaatcaggaataaacaggatttttacagacatcagcgtctctggcaaagtagcaacaggattgaatccaaatatcaggttctacaggtacactgaaggtcagcgttttggtcggcatatcgatgagagtgtctccctcgctgatggttctaaaacgtattacacgcttttaatatacctttctggcaaaggaagtgcaaaggattcatctgggcaagctcttgtcggaggggagactgtcttttatgatcaaagaggtggagttgtcgctgaggttgctccagtgcaaggtatggcactcctccacctacatggcgccaaatgtatgctgcatgaagctcgggttgtgaaaaagaatgccaagtatgtactccgttcagatgttgtattttcttagctgaagaaatgcctcaacttgtttcagatcaacccgtctagggcacaatggatatggggctgggaagtacttctagttactttctcattttgcaagttgtcatacaaagagtcctgtaaccttttcaatgttggaagtgattcttttggcattagaaccgtgatctgttatctgttgatgcatttgctgttgtctaagtgcaaaagaaatcattatatttagccgcaaacattggctaccaaaag

SEQ ID NO: 27213 - DNA, 707 bp, Zea mays
  Clone ID: LIB4728-017-D8_FLI
atcgaggccggccgggctccgctcgccaccgtcgtctaagttaggctagggttcgaccagctagcggaaatggtggccttcaggttccatcagtaccaggtggtggggcgcgcgctcccgacgcccggcgatgagcaccccaagatctaccgcatgaagctctgggccaccaacgaggtccgcgccaagagcaagttctggtacttcttgaggaagttgaagaaggttaagaagagcaacggccaggtcctggccatcaacgagatctttgagcgtaacccgacgacaatcaagaactacggcatctggctgcgctaccagagcagaaccggataccacaacatgtacaaggagtaccgcgacacgaccctgaatggcgctgtggagcagatgtacaacgagatggcctctcgccaccgcgtgaggtccccctgcatccagatcatcaagactgcgacggtgcacttcaagctctgcaagagggacaacactaagcagttccacaacagtgagatcaagttcccgctcgtgcaccgcaaggtcaggccgccgaccaggaagctgaggaccacgttcaaggcttcgaggcccaacctgttcatgtgatttagctgtgcgagcttggtgaaccaatcgacgtgttgcgggttgttcgctctcggcatacttgaagtggtaatgttgatctattcggattccttacctcg

SEQ ID NO: 27214 - DNA, 1511 bp, Zea mays
  Clone ID: LIB4728-017-F1_FLI
gatgcacagcaggggtatatgtatctacacactgcacattgtaagcacacaacacaattgccatggtgaccttcaaggcacaccggagcgatccggagctggtgacgccggcatcaccaacacctcaggggagcaagaccctctccgacgtcgacagccagatccccctgtggttctacgccacggtgatcgagttcttccgcccccgtaacgctgttgacggccacgacacccaggcggtggtcgatgtcgcggaggccatcagggaggccctggccaaggccctggtgtactactacccaatcgccggccgtctcagggaggtctccaaagggaagctggcggtggagtgcagcggagaaggagtggtgttcgtggatgcccatgccgatgtgcggctagacgagcttggtgagccgctgctgccgccgtacccttgcattgaggagctcgtgtgcgacatcggcgacgccaaagacgttgttggcaggcctctgatgttcatgcaagtgacgaggttcaaatgcggcggatttgccatcggcgtcagcatatgccacaacatggctgacgccttcggtgtcatccagttcctcaagtgcgtaacggatctcgcgcgaggcgacgagcacccggccgttctgccggtgtgggacagagagcttctgacggcgcgcaacccacccgacccgacaagcttacccttcgtccaggagtcgcacgagtcatcgccggtccagcccatggccatggacaagatggtcggttgctacttcctcttcggcccgagagagatcgccgcgcttcgaagccaagtgaccgagccggccaccaacttcgagctcatcacggccgccatgtggatgtgccgagcggaagctatagctcttgctcttgggtgcgggagcgccggcagccagcagcagcgagcgtcgtcgtccctgctgatcaccatgaacgttcgagggaaagcgaagctgacaccgcccctcccgcgcgggttctacggcaacggcttcgtgttcgtggaggcggagctgcgcggggcgacgcgctcgctcggtggcacggtcgagctcgtgcagaaggccaagcgcggcatgacggaggagtacgtgaagtcgatggtggatctgttctcgctcggcggggcggcgccgtacgcgcaggggtggacgttcgtggtgtccgacataacgcggatcggggaggacgagttggacctggggtgggcggagcgggtggccggcggcgtgcccattgtcggaaacgacgacgcgaccaagatggttagctaccagatgaggtgcaagaacgcagacggtgaggactgcgtggtagcttccatgtacctaccagagccggccatgaacaagttcaaggagaagatcctcatcttagcaacttcaaagctagcgacttgaaacaaaaccataatgttctagtactccttaccatgtatggtttcggtaataagtaagttatatgcatctccatggggcttttggatg

SEQ ID NO: 27215 - DNA, 783 bp, Zea mays
  Clone ID: LIB4728-018-H11_FLI
ctcgaggccggccggggcgacaatataacattataacccacgcaactccggggtccgggttccggctcgccaaaccctagccgccgagtgccgcccaccgcccgcccgccctccgccgcgcgtcggacggtgccgagggaagaggcaccatgaggttggagaagtgctggttctgctcctctaccatctaccccggccatggaatccagttcgtccgcaacgacgccaaggtcttccgcttttgccggtcaaagtgccataaaaacttcaagatgaagaggaaccctcgtaaggttaagtggacaaaagcatacaggcatttgcatggcaaggacatgacccaggatacaacctttgagtttgagaggaagaggaacaggccggagcgctacgaccgcaatttaacggagcagactctgaaggctatcccgcttattacaaagattaggcatgaccgtatgggaaaacacatctcaaacagacataaacctggtaaacgcaaggagatggaaaaggattccaaggagctggagcaggacatcggcatgctcccgaagaagcttattatcaaccatctcgcggctgagaaaacgaaggtcaaggttgaagttgttcagcagcagacagaagataacgcgatggaagagtagtgcgtggcattttgtgtgcttgtgttttcatgcctgatgcagatccttttgtatttgcgtaagaagctatgtagttgatgaaagatgtttatttaatatatatattaatggatggattcgtggaccgagtagc

SEQ ID NO: 27216 - DNA, 978 bp, Zea mays
  Clone ID: LIB4728-020-G12_FLI
gaggccggccggctagggtttgtgattttaaccgccgccgctgctcatctcacatccctcgagaagacgcctgctcctcgccgatcgatacgatggccgtcttctccgacctccacaccgccgacggcctcaagtccctcgaggctcacctcgccggcaaaacctatgtgtctggtgactccattactaaggatgacattaaggtcttcgccgcggtgccgtcgaagcctggcgctgagtttcctaatgccgcccgctggtacgagaccgtctctgcggctgtagcctcaagattccctggtaagtctgttggtgtaaatctgcctgcgggatcagctcctgcggcagctgctcctgcggatgaggctgaggacgatgatgaccttgatctttttggtgatgaaactgaggaggacaagaaggcagctgatgagcgtgccgccgctgccaaggcctcttctaaaaagaaagaaagtggtaaatcctccgtccttatggatgtcaaaccatgggacgatgagactgatatgaagaagctggaggaggctgtccgcagtgtccagatggagggtctgacttggggagcatcaaagcttgtgcctgttggatacggcatcaagaagatgactatcatgttgacaattgtcgacgatcttgtgtccatcgacactctaattgaggaccaccttacgcaagagcccatcaatgagtacgtccagagttgcgacattgtggctttcaacaagatctagagttcagtttctgagtttgggcaacggcagcggctcagctcgtcaagtttgtgctgggatgccagtttatcccttctagtctattacagaaatgttgttcggagctgagtctattataaacatcttggtctgagtttattgttgagtggtgccagtttttttcaatatacatttatcttaaaaacagcggtactgatgtttttttgtctaaagttaatgagtttgc

SEQ ID NO: 27217 - DNA, 1101 bp, Zea mays
  Clone ID: LIB4728-021-A2_FLI
ctcgaggccggccgggctaatcgccacggccacactactctacctccgcgcggcgatgcggagcagaagcaatggaggtgctcagctccagccgcttcgctagggcaatcctcccgaacctcctcgacccggccatcaggatcctcagcaagcccccttgccgccgccgccgcgccgttcagaccctagcatccaacgcccacgcccccaccgccgcgccgtcgccgtcgccctcacttgctctgctcctcgccaccgcgctgcggggcggccggacgggaggggagctacccgacctcgcgaccgcggccactggcggggccgggataggaacgctgctgatgagcaccacggcggcggcggtgaccaaggcacgggagagcccgtacctgctggcgctggccgccaacccgaccttcgtgtcggggctggtggcgtgggcggtggcgcaggccgccaaggcgctgctcacctccgtcgtcgagcggcggtgggacctgcggatgctcttcagctccggcgggatgccgtcctcgcacaccgcgctgtgcaccgcgctcaccgcctccgtcgcgctctgccatggtgtcagcgacgcgctcttccccgtttgtctcggtttcagtcttatagttatgtacgatgccacgggcgtcaggcgccatgccggaatgcaggccgaggtactcaataagatcgttgaggacctgtttgaaggccatccgattagcgaaagaaaacttaaggagttgttaggacatactccgtcacaggtatttgcgggagcgattttaggcatcctggtggcatggtattgctgccaaggttgtattgttcccatgtgacgttgttatagtatgaatgatccagaaatggaactgatccatcgcgtggattttgcatgtagtgtgaccagtgttctggaaagtatttggtcttgactagtttgatcattggtaagatggcaactattgcccttcttgtctggaattttcctgtatatatgtaacctgatagtatgaaacaatcaagatatccatcctttaaactttaaagtctcaatgccaagttgaggctcaatttattcgtgattcaattgac

SEQ ID NO: 27218 - DNA, 806 bp, Zea mays
  Clone ID: LIB4728-022-D7_FLI
tcgaggccggccgggaccaccaccactggacgtcagcctagcaattagctcatcgactccagattggagaactcgacaccatgaaggtgctgatcgttgcccttgctctcctggcgctcgctgcgagcgccgcctccagtacaagcggcggctgtggctgccagacaccaccgtttcatctaccgcctccgttctatatgccgcctccgttctatctgccgccgcagcagcagccgcagccatggcaataccccactcaaccaccgcagctaagcccgtgccagcagttcggatcctgcggcgtcggcagcccgttcctgggccagtgcgtcgagttcctgaggcaccagtgcagcccggcggcgacgccctacggctcgccacagtgccaggcgctgcagcagcagtgctgccaccagatcaggcaggtggagccgctgcaccggtaccaggcgacatacggtgtggtcctgcagtccttcctgcagcagcagccgcagggcgagctcgcggcgctgatggcggcccaggtagcgcagcagctgacggcgatgtgcggtctgcagctgcagcagccaggtccctgcccttgcaacgcagctgccggcggtgtctactactgaggaaactatgtactgtagtaataatgtaatggagccgctgactagctacctatagctagttcactcgtttagcggcgatgagtaacggagtgtcacccatcaccatgggtggcagtgtgagcaatgacctgaatgaaccattgaaatggaaaggaataatatatagggaaaaaggatgtttgg

SEQ ID NO: 27219 - DNA, 1456 bp, Zea mays
  Clone ID: LIB4729-001-H6_FLI
tcgaggccggccggggcctgccttaaccattcctcccaacaccacctcgcctgcgatcttcgtagcctccgtcgcgtcgagcatcgatcatgtcggcctactgcggaaagtacaaggatgagctcatcaagaatgctgcctacattggcacccccggcaagggtatccttgctgctgatgagtccactggcaccattggcaagcgcctttccagcatcaatgtcgagaacgttgaggagaaccgccgtgccctccgtgagctcctattctgctgccctggtgctctccagtacatcagcggtgtgatcctcttcgaggagaccctgtaccagaagaccaaggatggcaagccttttgttgatgtcctcaaggagggaggcgtcctccctggcatcaaggttgacaagggcaccattgaggttgttggcactgataaggagaccaccacccaaggccatgacgaccttggcaagcgttgcgccaagtactacgaggcaggtgcccgctttgccaagtggcgcgctgttctcaagattggccctaatgagccatcacagcttgccatcgacctgaacgctcagggtctggctcgctatgccatcatctgccaggagaatggtctggtgccaattgttgagcctgagatccttgttgatggccctcatgacattgatcgctgcgcttacgtcactgagaccgtccttgctgcctgctacaaggcgctcaacgagcaccatgtcctcctggagggtaccctcctgaagcccaacatggtgactccaggctccgactccaagaaggtgacccctgaggtgattgctgagtacaccgtccgtaccctccagaggaccgtccctgctgctgtgcctgctgttgtcttcctctctggtggacagagcgaggaggaggccacccgcaacctcaatgccatgaacaagctcagcaccaagaagccgtggtccctgtctttctccttcggccgtgccctccaggcgagcaccctcaaggcctgggctggcaaggtggagaacctggagaaggctagagctgccttcctcgccaggtgcaaggccaactctgaggctaccctcggcacctacaagggtgatgctgccgccgacaccgagagcctccacgtcaaggactacaagtactgagttgcttctctttgcgtgcccgttttggaactcctgcctacgagctaggttgcggagtgtggtttgctcgttagagcttattttcggacatccaaaaaacatgcttcctatgtgggatgatggttatctttatatttgtatgttaattagtctctttgctgttaaatttcgtgtaagttggtcctgccgatggagaatcgagcagctccctttttttgttctatcaactatgctgtaattctggctatgtatcggcaaaaacaattctatatgctgagttggagtcggcaaaaattcat

SEQ ID NO: 27220 - DNA, 627 bp, Zea mays
  Clone ID: LIB4729-002-A4_FLI
acaccgcaatcttcaatctccccagcaatccctagcagaagccttccatcctcactcgctcgatggcccgcacgaagcagacggcgaggaagtccaccggcggcaaggcgccgaggaagcagctggcgactaaggcggcccgcaagtctgcccctgcgaccggcggagttaagaagccccaccgcttccgccccggcaccgtcgcgctccgggagatccgcaagtaccagaagagcacggagctgctgatccgcaagctgccgttccagcgcctggtgcgggagatcgcgcaggacttcaagaccgacctacgcttccagagctccgctgtctccgcgctgcaggaggcggctgaggcctaccttgtcgggctcttcgaggacaccaacctctgcgccatccacgccaagcgcgtcaccatcatgcccaaggacatccagcttgcccgccgcatccgcggggagagggcctaagcgtcatattctctgtcatcagtgcccgatcagaagatgtagagatgtgctgggttctgtagtttgggttactgtcgaatcatcgagtagttggttgttcactgctgtaacttaattatcatgatgcatatgaaatggcaatgagctctgttat

SEQ ID NO: 27221 - DNA, 1287 bp, Zea mays
  Clone ID: LIB4729-002-B3_FLI
atcgaggccggccgggaacctcacatcctcttccactcgagctccttcgtttaaacccaaaccctaattgcgacctccgttcccccaaaaccctacggccatggacggcggaggcggtggtgtagggggaggcggagttggggcaggtgtcatggtgggcggcggagtcgggccgggcggcggcgttggcgttggcgttggcggcgacgtagagctcgtcagcaagacgctgcagttcgagcacaagctgttctacttcgatctgaaggagaacccgcgggggaggtacctcaagatctccgagaagacctcggccacgcgctccaccatcatcgtccccgtcgacggcgtggcctggttcctcgacctcttcgactactacatccgcaccgacgagcgcgacgccttcagcaaggagctgcgactccagaccaaggtgttctatttcgatatcggggagaacaagaggggccgattcctcaaggtttccgaggcctctgtcaaccgaaaccggagtaccataattgttccagctggcagctctggtgaagagggctgggaagcattcaggagtgtactgctggagataaataacgaggctaccagattgtatgtcctaccaaatcatccaaatcagcaacacatggagccgccagagcgtcttcctggtctgtccgatgatgtgggtgctggatttatagcaggacatggtagccagtctgcttctgggccagaggtagatgtcgaacgcttggttgatctgcctcctcaagaagaaattagtggcatgggtatgtctaaggtgattagggcagatcagaaaaggttcttcttcgacctgggcagcaacaacaggggccattatttgaggatttctgaggtggctggagctgatcgttcgtctattatcttgccgctctcgggtttgaagcaattccatgaaatggttggtcactttgtaggtataatgaaggacaggcttgaaggaatgacaggagctaacgtgcgcactgtcgagcccagccagagatgattacccttgactgtgggcctggcaagactgctgttatgcctcctgtaggtttgccatgtggtgtgtggtaatgtagatcacgccgtattaattcatctggtggggataataatgtctctttttctctttattttttgaattcagtggcgaggattgatttgtttgggacttttttctttctttcagtcggaggaataatatgcagtgtattgttcgtggggtggtataattgtggttgctgcagtgttagccct

SEQ ID NO: 27222 - DNA, 834 bp, Zea mays
  Clone ID: LIB4729-003-F5_FLI
ctcgaggccggccggggaaacccgtctcgcaccacaagcgagcgagggacccggggcggaagaagagagagaagacgtctctctcctctcggcgtccccgttccccaacctctcgtctgctgcctgcctgcctgcaaaaaggagtttgtcatggcgtctaagcgcatcctcaaggagctgaaggacctgcagaaagacccccccacatcatgcagtgcaggtcctgctggtgaggacatgtttcattggcaagcaacaattatgggaccacctgacagtccctatgctggtggtgttttcttagtgaacattcatttcccgccagattaccccttcaaacctccaaaggtttctttcaagacaaaggtcttccatcctaatatcaacagcaatggaagtatatgccttgacattctcaaagagcagtggagccctgctttgacaatttctaaggtcctgctctccatctgctccctgctgaccgaccccaacccggacgaccctcttgtcccggagattgcccacatgtacaagacggaccggccgaagtacgagtcgacggcccgcagctggacgcagaagtacgcgatgggctgacgaacgctttcctgctcgtctgggcgccattgttcccttggatttgttgttggtcgtatgtatccctgatccatctaggatcatcgtattgtattgtagtgtatgtatgtcgtcggcctaccatcgttgccatccaccatagtgaggtggttggacatgcttcgcctatatgcacctgtgcttgccttccttcgggtcggtgctgtttggttaatgttcatcgaagacgttgattct

SEQ ID NO: 27223 - DNA, 556 bp, Zea mays
  Clone ID: LIB4729-003-H7_FLI
ggccggccgggagaaaccggcaaggggatcgaagcggagagcaagggagcggtcgagcgggtgacatcatcgtcatccagggtttctcaatcggcagcgatggcgaccagggcggcggcgaggagaaggccgccgagaacgtgtacatcaagaaagtggaacaagagaagctggagaagctcgcacgcaagggccccagctcaggagagcaaccctcgtcaaccacaggctctgcagcaagtgatgtgaaggccgatgctgggccaacggagtcagcatctgcaagtgtgtcgacggacaagaacaagaactatgctgttctggcaggcgcagttgctgccctgggtggcttgggttggtatctattgttaaagcctaagaagtcggaggaggttgtggactgaagagggaggttgtgaatgcggatggtcggccttatatctcaccatggttttactttctgcgcatagacctgcaacttctgaaaataattgttgaaatttactctgcactacttgttcttaggcctgttgcatcacagaaccttgaagtatat

SEQ ID NO: 27224 - DNA, 765 bp, Zea mays
  Clone ID: LIB4729-004-C4_FLI
ggccggccggggcaattcgcaattcccagccattccccgtcgcccggtcggaagcaccaccagctaccagcgatgtccggcgaggaggaggagaacgccgcggagctcaagatcggcgaagagttcctcaaggccaagtgcctgatgaactgcgaggtggcgatcatcctggagcacaagtacgagcagatccagcagcacgcgtcgtcggagtcggacccgtcgtcgcaggtgtcgcaggtgttcgagaagtcgctgcagtacgtgaagcgattcagccgctacaagaaccccgacgccgtgcgccaggtccgcgagacgctgagccgctacggcctcgccgagttcgagctctgcacgctcggcaacctctgccccgacaccagcggcgaggccaccgcgctcgtcccctccctcaagtccggcggcaggttcgtcggcgaccccggggacgagaagatcgagaagatgctcaacgacctctccctcgtcaagaagttcgagtagagcgggagcccccagggtccgtgtcccccctcttctcttcttttctcttgggagtagcgagcatccagagaggaggggaattcaacatcaagacgatgtactgctaaaattttacttgccttacactactatcgttgaggttcacgtctgcgtattgattagaaccttgtttgatcgataatccaagatactagtagtatgtgtgtggttgatgatctgtctgaaattctacacgaaaagcctgcagaggatgaggat

SEQ ID NO: 27225 - DNA, 883 bp, Zea mays
  Clone ID: LIB4729-004-G3_FLI
cgaggccggccggatgactcacacttgtcactcaccccgcgccgctccactccactccagccaggcgccagcactcacccacccatggcgtccgaagccgcgccgcgggtcgtcgtggacgagtgccggggcgtgctgtccgtgtacagcgacggcacggtggtgcggcgcgcgcagccggggttcgcgacgccggtgcgggacgacggcacggtcgactggaaggacgtgacgttcgacgaggcccgcgggctggcgctccgcctctacctcccccgggaccgcggggccgcggccgggcggcgcctgccggtcttcttctactaccacggcggcggcttctgcatcgggtcccgcgcctggcccaactgccagaactactgcctgcgcctggcctccgacctgggcgcgctcgtggtggcgccggactaccgcctcgcgcccgagcaccgcctccccgccgccatcgacgacggcgcggcggcggtcctgtggctggcgaggcagggcggcggggacccctgggtcgccgaggccgccgacctcggccgcgtcttcgtgtcgggcgactcggccggcggcaccatcgtgcaccacctggccgtgcgcttcggcggctcgcccgcggaccacctggcccccgtcgccgtgcggggatacgtccagctcatgcccttcttcggcggcgtggagcgcacgcggtcggaggccgagtgccccgccgacgccttcctcgaccgtcccctcaacgaccgctactggcgcctgtcgctgccggagggcgccacgcccgaccatcccgtggccaacccgttcggccccggcgcgccgccgctggacgccgtcgagttcgcgcccaccctggtcgtcgtcggcggccctc

SEQ ID NO: 27226 - DNA, 1103 bp, Zea mays
  Clone ID: LIB4729-005-G3_FLI
gaggccggccgggacaaacctcaccccacctatattatcccgtgccccttgtctttcttcctccacaagcagcgaaatccaatctagaagcgcccctctcccccttctctctcttcgccgtccgaagctccgcaccccaatccaatcgacacctcaccgagatgggccgcaagttcttcgtcggtggcaactggaaatgcaatggaaccacagatcaggtcgagaagattgtcaaaaccctgaatgaaggacaggttcccccttcagatgttgtcgaggtcgttgtcagccctccttatgtcttccttcctgtggtcaagagccagctgcgccaagagttccatgttgctgctcagaactgctgggtgaagaagggaggtgctttcactggtgaagtcagtgctgagatgctcgtcaaccttggtgttccctgggtcattcttggacactctgaaaggagagctctgctgggagaatcaaatgaatttgttggagacaaggttgcgtatgccctgtctcagggactaaaggtcattgcatgtgttggtgagacccttgagcagagggaggctgggtctaccatggatgttgttgctgcacaaacaaaagcaattgctgagaagatcaaggactggagcaacgtagttgttgcctatgaaccagtttgggctattggaactggtaaagttgccaccccagctcaggctcaggaagtgcacgcctccctgagggattggctaaagaccaatgccagccctgaggttgctgaatctactaggatcatctacggaggctctgtaactgctgcgaactgcaaagagctagcagcacagcctgatgtcgatggttttcttgtcggtggagcttctttgaagcctgagttcatcgacatcatcaacgcggccaccgtgaagtccgcttaagatgctacgctgaagacgaacatacttttttttttgctcaactgtgctatgtaagctagtagcttttgcgcaggagcagagactgttttgcctgcccccaacttctagcttgagcttgctaataatgtttacctctggacgtatcaataatggtgcttatgtatccccttttttttgtgc

SEQ ID NO: 27227 - DNA, 2087 bp, Zea mays
  Clone ID: LIB4729-006-D2_FLI
agtccagccctgcctcggttcttcctccccgtcccatcgtgctgtagaagttgcccgctgccgtctcctgtcctgactcctccatgtctctcacttccctcacttctcggctttgacctcggctcgcaatgaactctctcctgcgtccgccgctgccgggcccgacgccgagcctgagcgcgagacgcatggtctcgccgccgccagcgccggtgcgggtcagctcggcggcgctggccggcagcgggcgcagatgccggctggggctggcagtggcggcgtcggcggctccgtcgtggatggaggaggccggggtggccgtgctggaggaaggcgggcggaggaacccgtctgtgtcggactcgtaccgccctgctgggctgccgcggcccaacgccacggtgctggaggcgcaggcgcgggtgtgcacgggccccgcacagacgcgcccgctcggggaggagcaggccatgcgcgtcctcgacactatcctccgctccgcaatgggagaactcaaagaggagccagtctctagtgcacagttaggtgcattctttgcaggcatgacaataagatccaactcgtttccagaggccacacagtggagcgagggtgaacggcgtgccatgagcatattttggccacgccttgtacaaattcttcctccggaggtgaagtttatagcagaccctgaagggacgatcatgggtgcaaatggtttaacagggcctcggtatgttggtcaaggaactggagagatgagactagtcggtgctctgagggaagtgcttgctggtggccatttaggctatgaggaggttcaatgtgtgctaaaggatattttaccaattggaccgagttcagatttgacagtgactagtgaagcattgctggcagcatttttgattggacaacggatgaatagagaaactgatcgtgagctcaaagcgtattgcctagcctttgatgatgaactaggtcctcctctggttgctgacgtcaagtccttgacacactatggtgaaccatatgatggcaatacacggttttttagaagtactctatttgttgcagcggttcgagcctgctatagtgaatcatgcctcctccatggtgttcaatggatgccacccaagggtggaataacagaaggacaaatgcttaaattcatgggcgcaaacatacacttatctccaacacaagccaagatactgttggaggatgagactgctggttttgcatatttgaatcttcaggaagcatgtccaccattatattcaattattgggctcagggagcatattaagaaacggccaccattggctacctctgagaaagttcaacaatctgtgagggcacgggggagagaatcaatggttgcaggattttatcacgaaggctatgaagatccattgcttatgctgatgagaaggagaactgttcatgctggactagttgtgaagggtgaggaaggtgcgctttccttgacaaccaaggaaagatcagcccatgcatcaaaaggactccctgttaaccactgttcagggtttcggacaccaagcggcataaatttctctgagactgatggtattcctagagaaagcttcagggtcattgtgaatgcccaggaacttggttttgaatccactgaaactccaagaactgatagatcaattctaaggaacttggagcttggtctggcagcactaggtggcgaaaaaggagcagcgtatgaccgaatcgttcttaacgcggctatggctgaccacttactaggctgcagcggagctgaggatatcgacgctgcacttgaccgagcgagggaagccattggtagcggtgaagctctgagaaggctcatgagttacataaagatctcgcacaaagtgtcctagtgttgacccgtgagtctgtgaccatgtactgactgtacaattttggcgtgagtcacgactggatatcttcttcgcgttgtctgagtgccttccccactcaatgttacaaagccaccatgaaaaagtatactcccttgccctcaaggacatgtccaaaaaaaaacagttgaaaggaaacaatgccttgttggg

SEQ ID NO: 27228 - DNA, 744 bp, Zea mays
  Clone ID: LIB4729-006-H11_FLI
ggccggccgggcttcgctgcgccgccgcctccgacatcgtctcttcgtccccacgagcaaccgataatccgccggcgctgagatgttggtttatcaagacctcctatctggcgacgagctcctgtcggattcattcacctacaaggagctcgagaacggcgtcctgtgggaggtcgagggaaagtgggtcacccaaggtcctgtcgatgtagacattggtgccaatccatccgccgagggtggtgaggatgaaagcgttgatgacacagccgtgaaggtggttgatattgttgacacattccgtctacaggagcaacctccttttgacaagaaacatttgtctcttacataaaaaaatacatcaagaatctcactgctgtgttggagccagagaaagcggatgagttcaaaaagggtgtcgagggtgcaaccaagtttctccttagcaagctgaaggaccttcaattttttgttggtgagagcatgaaggacgaagcgtccgtggtattcgcctattacaaggatggtgccactaatccgacattcctctatttctctcatggtcttaaggagatcaagtgctagattagttacccatgttgggtactatatatgttctattgttatagccacaactatagctgccctgcctgaactgaactcaggttttttttaagaaaaaactgtccaagattggattgcttgttaaagctaaatattgttattgacgtgttattgcttagg

SEQ ID NO: 27229 - DNA, 842 bp, Zea mays
  Clone ID: LIB4729-008-A7_FLI
ggccggccgagagatcagatcacactcgtagagagaaggaaaaatatccccaaaccctagctcccgatctcgatggcgaaccctcgcgtcttcttcgacatgaccgtcggcggcgccccggcgggccggatcgtgatggagctgtacgccaacgaggtgcccaagaccgcggagaacttccgcgcgctgtgcacgggcgagaagggcgtgggcaagtccgggaagccgctccactacaagggctccaccttccaccgcgtcatccccgagttcatgtgccagggcggcgacttcacccgcggcaacggcaccggcggcgagtccatctacggcgagaagttccccgacgagaagttcgtgcgcaagcacaccgcccccggtgtgctctccatggccaacgccgggcccaacaccaacggctcccagttcttcatctgcaccgtcgcgaccccttggctcgacggcaagcacgtcgtcttcggccaggtcgtcgagggcatggacgtcgtcaaggccatcgagaaggtgggcacccgcaacggctccacctccaaggtggtcaaggtcgctgactgcggacagctctcctagatctctctgatctggtctgttcggccgccctccctccgtcatcgtcgactccccctgcgtccgttcctttggatctgaataagatggtggtgatctgagtggtggtcttagtttatcatgtatcgctcgcagtttaatttagcggtttaggtgtggatctgtgaaccccatggcgcctctgcttgattcgtgtttcacctgttatgttctgagattcatgataatgctatgagaactgaaattcccgtctg

SEQ ID NO: 27230 - DNA, 723 bp, Zea mays
  Clone ID: LIB4729-008-G6_FLI
ttcgctgcgccgccgcctccgacatcgtctcttcgtccccacgagcaaccgataatccgccggcgctgagatgttggtttatcaagacctcctatctggcgacgagctcctgtcggattcattcacctacaaggagctcgagaacggcgtcctgtgggaggtcgagggaaagtgggtcacccaaggtcctgttgatgtagacattggtgccaatccatccgccgagggtggtgaggatgaaagcgttgatgacacagccgtgaaggtggttgatattgttgacacattccgtctacaggagcaacctccttttgacaagaaatcatttgtctcttacataaaaaaatacatcaagaatctcactgctgtgttggagccagagaaagcggatgagttcaaaaagggtgtcgagggtgcaaccaagtttctccttagcaagctgaaggaccttcaattttttgttggtgagagcatgaaggacgaagcgtccgtggtattcgcctattacaaggatggtgccactaatccgacattcctctatttctctcatggtcttaaggagatcaagtgctagattagttacccatgttgggtactatatatgttctattgttatagccacaactatagctgccctgcctgaactgaactcaggttttttttaagaaaaaactgtccaagattggattgcttgttaaagctaaatattgttattgacgtgtt

SEQ ID NO: 27231 - DNA, 840 bp, Zea mays
  Clone ID: LIB4729-010-A10_FLI
ggccggccgggcaaaacactaaaaaagaaaaggccatcgaaaacgccgccgccgcctctgatgctttccgccgtgcgatgtggtgcccttcgccggtggcgcccgccgccgcacctcctcccacgcatcctttcctcctcctttggtacatctcccgcgcgaccacaggtgggggcgctgctggagctcccggaggtggagaaggtactgcgcgacgtacgagcgggtgacgtgcgcgtattccccgtcggcgagagcggtctgcacggcggggcctgcgccgactacatggtcgtcgccacaggccgctccgattggcacgtccgtaacatcgcgcaggcgctcctctacaagataaagcaaaagcagaagggctctgatagaatattgatgccaagtgtagaaggtcagcaagcgggaaaatgggttgtcattgattctggaagcataatcatccatgcacttgaagaaagggcaagagagtattatgatttagagagcatttggtcaaaagaggtgtcccctaacacttccattcaggagttggagacctcgctggtgaagacacgtcgccggaacctatcacagaaacccatgaagagcatctgaactaggggatctggtacgatgatccgtgaaccgagataaattacgggaggtcgagcttttatctctttccattttgtagcatcttttacttacctaaacttgtcttattatggtgacattactgagttcaccatggcgtaaatccagtctcacatgagtcatctagtgcatcctatagcgattacacaaatgacacatgcaacgcaaacttgaaatgtaggacattgttgt

SEQ ID NO: 27232 - DNA, 1507 bp, Zea mays
  Clone ID: LIB4729-010-F8_FLI
atcgaggccggccggggcgctgtaggttccctacagcctttcccctgaaaaaaaaattaccccccggacctcctcctccgatcggcttcctcctcccagtcccgaaccgcacgcgctcgatttcccgcaccccctctagcctctagcggccatgtcgcccgccgccgccaccacaaccttcgtcgcaatctccatcgccgtccccaaccctaccgctccatcccgcggtcgcgtgcgccttccgctaggcggggtccccgctgctccacgccgcgccgtcgcctctatggcagtgtccgcccccaggtccggcgccgccacctcgtttctcgagcgccgcgagtcggagcgcgctctccactttgtcaaataccagggcctcggcaacgacttcataatggtggacaacagggattcgtcggtgccgaaggtgacgcccgaggaggctgcgaagctgtgcgaccgaaacttcggcattggcgccgacggtgttatcttcgtcatgccgggggtcaatggtgccgactacaccatgagaatcttcaactctgatggcagcgaaccagagatgtgtggtaatggagtccgttgcttcgctcggtttatagccgagattgaaaatctgcaggggacaaatagattcactattcatactggtgctggaaagatcgttcctgaaatacaaagtgatgggcaggtaaaggttgatatgggcgagcctatcctttctggactagacatcccacaaaactgctagctaccaagaaccaaagctgttggtcaagctgaattggcagttgagggcttaaacatggcatgtcacatgtgttagcatgggaaaccctcactgtgtcacatttgttgcaaatgagttaaaggtattgcaggtcgacgatttaaaacttagcgaaattggccctaaatttgagcatcatgaaatgtttcctgctcgcacaaacacagaattcgtacaggttttgtctcgctcacacctcaaaatgcgggtctgggaacgtggtgctggagcaactcttgcctgtggtactggtgcttgtgcagtggttgttgcagctgttcttgagggtcgagctgagcggaaatgtgtagttgatttgcctggcgggccattggaaattgagtggagggaggatgacaatcatgtttacatgactggtcctgcagaggtcgtcttttatggatctgttgttcactaggtactggggaccaagatagaagggttggctgccactcagagcttgtgagattggttatagtatccatgaaacagagtgttctggtaccagtacacttgttcagatattcttaattatgattgcttgatttgggtagcagtagaggcttccttttgaagcattctagtgttcaccttttgtactcctttagtttgtcaggtttgaacactacatgggtaacatgtctttcccaccattttctgtttcttttctttgtaagtgaacgccaatgcagttttagtattgttttctat

SEQ ID NO: 27233 - DNA, 350 bp, Zea mays
  Clone ID: LIB4729-010-G5_FLI
aacaacgtgggcgcggcggccgggttcgttcgtatagggcaggaaactcggcaggaagcatgctcccgatcagtggatctgtctccgcctccgcctccgccaccggaggggcgaaggcgcggatgatcacgagctgcagcggctgccgcgtcctgcgcaagggctgcaccgacgcctgcaccatccgcccctgcctgcagtggatggagaaccccgaggcgcaggccaacgccaccttcttcctcgccaagttctacggccgggcggggctgctcaacctgatcgccgccgcgccagacgacgccgactcccgcgcgtcggtcttccgctccctgctctacgaggcgtgc

SEQ ID NO: 27234 - DNA, 637 bp, Zea mays
  Clone ID: LIB4729-011-C2_FLI
ggccttccgggaccgcaatcttcatctccccagcaatccctagcagaagccttccatcctcactcgctcgatggcccgcacgaagcagacggcgaggaagtccaccggcggcaaggcgccgaggaagcagctggcgactaaggcggcccgcaagtctgcccctgcgaccggcggagttaagaagccccaccgcttccgccccggcaccgtcgcgctccgggagatccgcaagtaccagaagagcacggagctgctgatccgcaagctgccgttccagcgcctggtgcgggagatcgcgcaggacttcaagaccgacctacgcttccagagctccgctgtctccgcgctgcaggaggcggctgaggcctaccttgtcgggctcttcgaggacaccaacctctgcgccatccacgccaagcgcgtcaccatcatgcccaaggacatccagcttgcccgccgcatccgcggggagagggcctaagcgtcatattctctgtcatcagtgcccgatcagaagatgtagagatgtgctgggttctgtagtctgggttactgtcgaatcatcgagtagttggttgttcactgctgtaacttaattatcatgatgcatatgaaatggcaatgagctctgttatcg

SEQ ID NO: 27235 - DNA, 987 bp, Zea mays
  Clone ID: LIB4729-011-D1_FLI
ggccggccgggaacaacagcaggccaccgctgctataaaaccctccgcctccaccggcggctcgccaaactccgtttcgaattctagggttttgctgctctccgaccccgagctccgaaggccgcagcatcaggcgaggcccccctcgcgtgtgaccgagatggcgctgccgaatcaggggaccgttgattaccccagcttcaagctcgtcatcgtcggcgatggtggaactggtaaaactacatttgtgaagaggcatctcactggagagtttgagaagaaatatgaaccaaccattggtgtggaagttcatccgttggatttcaccactaactgtggtaagatcaggttctactgctgggataccgcagggcaagagaagtttggtggcctcagggatggatactatatccatggccagtgtgcgatcatcatgtttgatgtaacctcaaggcttacttacaagaatgttcctacgtggcatagggatctgtgcagggtctgtgaaaacatccccattgtcctctgcggtaataaggttgatgtgaagaacaggcaggtcaaagccaagcaggttactttccacaggaagaagaatctgcagtactatgaaatttctgccaagagcaactacaactttgagaaacctttcctgtaccttgcaaggaagctggctggtgatccgaaccttcactttgttgaagctgttgctcttaagcctccggaagttaccatcgacatggctatgcagcagcagcatgaagccgagcttgctgcagcagctgcacaacctcttcctgatgacgatgatgatctgattgagtagaaaggatcatgagtcttggacttgagcaggagttgtgccttgcacgatttaagttgttctagggtggactctctcttgagttatcattgtctggatcatctttttctccttggacttgttgcaacttttgagtgtggaaatggattggaatagtcgccacg

SEQ ID NO: 27236 - DNA, 1012 bp, Zea mays
  Clone ID: LIB4729-011-D2_FLI
ggccggccgggacactcccatccagccgccaccaggtgcagagtctttcgtcatctcttctccggcgaagaacccccagtcgcccaccagatcacttgttaaactttgttgaggggtgatggcggtttctttcgcaaacctcaactccgaggcagggcttaaaaagcttgatgagtaccttctcactcgcagctacatcactggctaccaagcttccaaggatgacttggctgtctacacttcgttttcggctgctccctcgtccaagtatatcaacgtagcaaggtggtttaaccacattgatgcgctcgtgaggctgagcggaattactgcagagggccaaggtgtgaaggttgaatcctcagcagttccttcagccccaactccagatgttgctgaagcacaggccccagttgctgaggaggacgacgacgatgatgttgacctttttggtgaggagaccgaagatgagaagaaggctgctgaagagcgtgctgcagctgccaaggcttctggcaagaagaaagaatctgggaagtcatcagttttacttgatgtgaagccatgggacgatgagactgacatggccaagctcgaggaagctgttaggagtgtccagatggaagggctgctctggggcgcatccaagcttgtcccagttggatatggtatcaagaagctgcaaatcatgatgaccatcgtcgacgaccttgtctctgtcgacactctcattgaggactatctgtgcgctgagccagtgaacgagtacgtgcagagctgcgacatagttgccttcaacaagatctaggcgtgacttccgatcagtccttcccctggggtgctggcgatggtggtggctgggcaatgcaccagcctaatttatccatagctatatgtctgctttgtgtggccagtgatattgccgtgagtatttttggatcctattcgagtcgaatgtaccagtaccagagttaatttgctttaattcgaaacaccgttccagttggaattc

SEQ ID NO: 27237 - DNA, 1639 bp, Zea mays
  Clone ID: LIB4729-013-C2_FLI
gcccaggcagactccaacatagcagagaagccatggccggtccgccgctcttgagcttcctcttcttcttccttctctgcgtcgccctcgcctggagcgaggcgtatggagcaagcggtggctacgggctcggcgtcaactacggccgggtggcggacgacatcccttcgccgtggcgctccgtggagctgctccgcgcggcgggggccgggtcggtcaagatctacgacgccaacccgggcgtgctccgcgcgctggctgggacgcgctggcccgtctccatcatggtgccaaaccaaatcataccggacctcgccgcctctgctgccgcggcggaccggtgggtcgccgagaacctggtcccctactacccggcgacacgggtcaagttccttctcgtggggaacgagatcctctccgacttgtccatcgcgaactccacctggccacaccttgtcccggcgatggagaacatccaccggagcctccgcaagaggggcatcagcagcgtcaagatcggcaccacgctcgccatgggcgcgctcgccgacggcgccttcccgcgcccaccgtcggccgccgcgttccgcgccgacatcgccgagacagtcgtgcgcccgctgctgcacttcttgaacgggaccaactcgtactacttcgtcgacgcgtacccctacttcgtctgggccgacaacaacctcaccgtctcgctcgactacgcgctcttccagggcggacgcacccgctacgtcgacccgggcaccgggctcacgtacaccaacctgctcgacgaaatgctcgacgcggtggtcatcgcgatggcgaagcttgggtacgggcacgtgaagctggccatcgcggagaccgggtggcccaacggctgcgactacaaccagattggcggcaacgtccacaacgccgccatctacaacaggaacctcgcggcgcggatggctaagaacccgggcacgccggtgaggccgggcgcgaagatgccggtgttcgtgttctctctatacaacgaggacctcaagccagggccgggcaccgagcgacactggggactgtactacgccaacggcacggcagtctacgagatcgacctcaccggacggcggccactggggtcgtacccgcccctgccggcgccggagaacaacataccgtacaaaggaccgatatggtgcgtgctctcggccgccgccagcaacaagctgaacgagacggcggtggggaacgcgctgtcgtacgcgtgcgggcagggaaacgggacctgcgacgccattcagcccgggaaaacgtgctacacgccaaacacaacggcggcgcacgccagctatgctttcaattcgtactggcagcagttcgagaagactggagcgacgtgctacttcaacaacctcgcagaacagactaccaaagacccaagtcatggatcctgcaggttccctagctcgttggggtcgccttgaacggcagagcgagcgagaagacatcatttgggtcctgattttgtgtaacaagacgacttgggagctagggaacgaagtgtggagcaccgtagatgttctaactaacacagtactacttcttgcccagacttgtgccatgacagtgaaaggctcgatcggttgctcct

SEQ ID NO: 27238 - DNA, 2102 bp, Zea mays
  Clone ID: LIB4729-013-C8_FLI
gtgtcggaagctcccttcatttctttcacctccgattcgattccttgtcccctcttgatccgagccgccaccaaaccctaactatctaaaacccccgtctcgctgtccgatggccgccgcctcgccgccgccctccccaccccacgcaaagcgccccaagatgtcctcctcctccgacccggaagccgatgctgagcccacctcggcctccgccgccgttgagggcgccgatcctgcgcagcgtcgtcccaggtacaagcgccgcaaggtcgccatccttctcgggtactgcggcgcggggtatcagggcatgcagaagaatccgggcgcgcgcaccatcaagggggacctcgaggaggcgctctaccaggcgggcgccgtgcccgaggccgaccggtccgcgccgcgccgttacgattgggcacgtgctgcgcgcaccgacaagggcgtcagcgccgcggcgcaggtggtgtccgggcgcttctacgtcgacccgccgggcttcatcgatcgcttgaacgcgcagctcgcgccgcagatccgcgcctacggctacgtgcgcgttaccaactcattcaacgcgaaaaagttctgcgaccgccggaggtacctgtatctgctccccgtatttgctcttgaccccagcgcacacccggaccgcgaggccgtcatggcgagcatggggagtgggagcgagcttaccaagtgcctggagtgctccgagagaggcaggaagattcctggtgtcatgggccgggatgggaaactgcccagccccgggcagaatggtgttgatgctcccgtggagggaagtagccatgacgaatctggaacacttggggatgcaaaatgtgaccatacaagttcagatggtggtaacccatttgcccatggggaagttggatcgaacagcaaggagaagcctgatttgccggtccctggtgatggaactgaagttgcaaatgctgagatgggatcaaatggcgacagtgatgttgtatcatcagatatttatatggggaacgaggagaagaaacttcctgcagccactgaaaataaagctcaaggtatggaatctgagaagagcaatggagaagagaaactgccaactaagactaccttttcttacactgatgaagtgaaggagaggttcaacaggattctcaaatactatgttgggacacacaatttccataacttcactacaagaaccaaggcagaggatcctgcagcaaaaagatttatcatttcctttgctgctgaccgtgttgtcagcctggatgggattgattttgtcaggtgtgaagttgttggacagagtttcatgctccatcagatccggaagatgattggtcttgctgtagctgtgatgaggaactgtgcacctgaatcaatttatgatgtcgcctttcgcaaggatgtcaatcttaatgtgcctactgcacctgaggtcggactgtacctagatgaatgtatgttcacatcatacaacaagaaatggaaggatccacatgaggcagttttcatggaaccttattctgaggaggccgaagagttcaaggtcaagtatattttcactcatattgcggcgatggaacacaaggagggagctgtagctttgtggttgcattcattgaaccacagaaattatccagatttccgttacatggaaactgccgagcacaatgctggtgctgaagttgagagtattgctgctggtgcagagcccaaggttggagctgaagttgagaatactgaagaagtacagatgccaagcgacaatctaagtgagtaataaattttgccaaggggcatgcaaaactgaagaaaatatctgtttgtcgtgttactgagagggacctcaaacatttctaatgagatatcgtaatatagagaatgaagactcatatgttctccaatggaatatgaacatcaagaggttaatgtgcatcactttatgccatcatgatccttatgttaatcttctgaaataagaacctataggtctatattagtcttatatctgaacttcattaattgcttccagacaattgtatgacaaatggtttgctgaaattattatgggattcactattttctcg

SEQ ID NO: 27239 - DNA, 1029 bp, Zea mays
  Clone ID: LIB4729-013-D5_FLI
ctcgaggccggccgggagacccgtcaaatccaagcaaaggccaccccggccggcgacgacttccccttccaacaccctcctcccccgtccctccctccccgcaccctgatcccccggcatccatccatggcgacgaacagcgcggtgattgtgctcctcctcgtcgctgctgccgtactcgcctgcgcgggcggtgcgcgcgggttctacctcccgggcgtcgcccccgccggtttcctcaagaaggacccgctcgccgtgaaggtgaaccagctgagctctatcaagacgcagctgccctactcctactactccctccccttctgcaggccgggcacaatcgtcgatagcgccgagaaccttggcgaggtgctccgcggcgaccgcatcgagaattcactctacgtgttcgagatgatggagcctaggctgtgccagatcgtgtgcaagattgctccgacccaagatgaagcgaaggatctgaaggagaaaattgaggatgagtaccgcataaacatgatccttgacaaccttcctttggtcgtcccaattaagagattggatcaagaagcacctactgtgtaccagcaaggcgtgcatatcggcatcaagggacagtactcagggagcaaggaagagaagcatttcattcacaaccacttcacatttctggtgaagtatcacaaggatgacacaggtcttgccaggattgttgcctttgaggttaaaccatacagtattaagcatgaatttgatggcgactggaaggggaatgctacactccttaaaacctgtgacccacactcaagacgccttgtcgtagactctgattcacctcaagaagtagatgccaacaaagagatcattttcacctatgatattaactttgaggttagtttcaactatttttcatcttgaactttttgtctatgaccaaccttaatgcactatgacagaagtctccactgtaaacctacagatagatggtatgttttttccttgagaatttcagatgcattttttagtccg

SEQ ID NO: 27240 - DNA, 1862 bp, Zea mays
  Clone ID: LIB4729-014-B4_FLI
acagagaaaaatgtcgagtcaagaactcttctcccccgttcgcgcagcacagtcggccactacacacacgccgcccaccaacaccatggacgccgccgcgaaggaggcgctgatcctggacctgcacgcggtggaggccgtgaagctgggcaccttcgtgctcaagtccgggatcacctccccgatctacctggacctgcgcgtgcccgtctcccacccgcgcctgctcgcctccgtcgcgtccctcctcggcgcgctcccggccacgcgcccctacgacctcctctgcggcgtgccctacacggcgctgcccctcgcggccgcgctctccgtcgccgcctccgtgcccatgctgctcagccgctacgacaccaagcgcgtcgagggcgccttccgcgccgcccagaccgtgctcatcgtcgaggacctcgttaccagcggcgcctccgtgctcgagaccgtcgccccgctccgcgccgaggggctcgtggtcgccgacgccgtcgtcgtcatcgaccgcgagcaaggtgggcgcgagaacctcgccgctagcggggtcgcgctgcactcgctcatgaccctcacggagatgctcgccgtgctggcgaggcacgggaaggtcggcgaggagaagatcgcggaggtcaggcggttcctccaagccaacaggaaggtggcggtgcccggggtgcctgctgggccacccaagccgtcggctactgctcggaggaagtcgtttgcggagagggcggggttggccacgaaccccatggggaggaggttgttcgaggtgatggaggcgaagcagagcaacttgtgtgtcgcggctgatgttgggacagccaaggagctacttgagcttgctgacaaggttggtccagagatttgtatgctgaaaacacatgttgatatcttgtctgattttacaccagattttggggccaaccttcgcacaattgctgggaagcacaactttctgatctttgaagaccgcaagtttgctgacattgggaacacagtaactatgcaatctgaaggaggtatattccgcatcttagactgggcggatattattaatgcgcatatagttcctggacctgggattgtagatggcttgaagctcaagggtttgcctaaaggaaggggcctacttttgcttgctgaaatgagctcagctggcaaccttgcttatggagactacactgctgcggctgtaaagattgccgagcaacatcctgactttgtaataggatttatatcagtgaatcctgcatcttggtcaccagcaccgtcaagcccagcatttatccatgccactcctggggttcagatagctgctggaggagatgcccttgggcaacaatataacactcccttttctgtcatcaacgacagaggtagtgatataattatagtcggacgagggattataaaggccagtaaccctgtagagaccgcgagacagtatcgcatggaggggtggcaggcgtatcaatccggcttttcttgaggatgtttaagcaactcgccaaacgtagccggaggacattcgggcgagtgttgatgtgataagagtgcgccccatctatgatctatgtatgcaactgcgttctttcacttttacctgcccatcattgccacgcagtgattttcagtaatggttctgactgtacccccggatgctataatttgcaataaggtaacgccaaatcttagctgaactttcagtatgtatgtctctcattggcaagcagtgatagtattacctgttttgatcggagctctgtagagcaatttcatgtttctagatttgaattaagccaaactttcttaattttcattgaaaatatcattgatgtctg

SEQ ID NO: 27241 - DNA, 1557 bp, Zea mays
  Clone ID: LIB4729-014-B6_FLI
acccgaagcacatcccgtcgcatcccatcccactaccacccatctcgtcgtccgccgattcgatccggttcttccaacccaggggcagtgatggcgacgaagaggagcgtgggcaccctcggcgaggcggatctgaaggggaagaaggtgttcgtgcgcgccgacctcaacgtcccgctcgacgatgcccagaagatcaccgacgacacccgcatccgcgcctccgtccccaccatcaagttcctcctcgagaagggcgccaaggtcatcctcgccagccacctgggtcgtccaaaaggtgtcaccccaaagtacagcttgaagcctcttgttccacgcttgtctgagctccttggagttgaagtcgtgatggccaatgattgcattggtgaagaagttgagaagttggctgccgctttgccagaaggtggagttctgctcctagagaatgttagattctacaaggaggaagagaagaacgaacctgagtttgctaagaagctagcatctgttgctgacctttatgtcaatgatgcttttggcacggcacacagagctcatgcttcaaccgaaggagttaccaagtatttgaagcctgctgttgccggcttcctcatgcagaaggaacttgactaccttgttggagctgttgccaacccaaagaagccatttgccgctattgttggtggatccaaggtctcaagtaagattggtgtcattgagtccttgctggcgaaggtcgatatcctcatccttggtggtggtatgatctacacattttacaaggcacaaggatattctgttggaaaatctctcgtggaagaggataaacttgagctcgcaacttctcttattgagaaggcgaaggcaaagggggtttctcttttgcttcccactgatattgtagtagcggacaagtttgcagctgatgctgagagcaagattgtccctgccactgctatccctgatgactggatgggtcttgatgttggccctgatgccaccaaaacattcaacgaagcattggacaccaccaagactgttatttggaacggccccatgggagtgcttgagttcgagaagtttgcagctggcactgaggcgattgccaagaagctagctgagcttacaaccacgaagggtgtcactaccatcatcggcggcggcgactctgttgctgctgtcgagaaggctgggctggccgacaagatgagccacatttcgaccggcggcggtgcgagcttggaactcttcgaaggcaagactctacctggtgtccttgccctcgatgacgcctagatccgctgctgctgctgctactcaggttctgccagctttgcgtgtcatcttgtttcggaccttggtgtagcactgcaaggctaaggtttactcctccgcacatggacttttggggataggcttgccaccgtgttttgctagatgagtcgtggaataagcttttacttcctcgctgctgtgggtgaagtgactggaattcggaaatttggaactaacaaaaccccccgtggatttgtatgatatgttttgttcgacagc

SEQ ID NO: 27242 - DNA, 1673 bp, Zea mays
  Clone ID: LIB4729-014-G9_FLI
ggccggccgggggcacggcggagaacgcgagtaagcactcccatcctcaatccctcccctccgcggctccgccgtaaaccccgctgttcttcgccggagcactccctccccgttcccccgccgcccccggccccccgacctcgatatcttcggagcccgccgttgggggcctactgcatgctcaaatcgtagacactgggtcggggcgtggtagagatccgtccgggctcggatcgatttcttcgttcgctgcgaagcataaaataagccatcacaactgcatttaaagcaaggcttcccactgagccgaaggtcctgagttcgacacagtctctcttcaaaaaatacaggggtacccaggctctaataatttgtacaaaaccgatggaaacttctaaatctcctcaatcgtcaaagaacagtcatattgtggtgccttctgatagtaatggcccccgatttgacaatgatggtttttcttcagaagctgcatcaaatcaaatggtcgttttcaactctgaagcaggagataaagagcaagatgaactgggggaaaaccgtttgcagaagtcaatcataacaaggggaatatcgccatctattggagcattcactgtccaatgtgctaaatgttttaaatggaggcttattccaacgaaagagaagtatgaagaaattcgtgaacgtattatagaggaaccttttgtatgcaaaagagctcgtgaatggagacctgatgtaacatgcaatgacccagaagatatatctcaggatggtagcaggctttgggctattgacaaacccaatattgcacaaccccctcgcggatgggaaaggcagattaggataagaggtgaagggggtaccaaatttgctgatgtatactatacctctcctactggaaggaaacttaggtctctggttgaagtcgataggttcctccaagagaatccggagtatggtgctcagggtgtaactttagctcagttttcgttccagatacctagacctctacggcaggactatgtgaaaaagaaaccgaagttgataaatccaagtgatgaagcaagtatggttgcctctaagtcttttcaaccagaagaagtgaaacccatagcctgggcagttgctacaaaacacgagggcgatgccagtgaagaagcttctctcaccgatgaggcacctacatcagaagtcatgctagcccggaagagaaaagcaggaagctctttgtcggtagagccaaaccatctctctgatgaacttgaaccaaagctggaggatgcttagaacggggagacgtctacctgataagtaaaagttagcagcatcgtgatgccaactgccccctatcatggttttattggccctctgcttgtttctcatttccctttggagccagtttctctgttttgcgaggtcacacaagccttatttgtagtattacaacacagaagctggctgacccaaaatccgacactctgggggcagcaacttaacaaaatgtttgtacgagggtttagagccccacggtgcttctttggataagtatgtttattaccttgtacttagctaggaacctgcttatatgtaagatctttgtgtacgacggagaattgtcacagcggcataattctggtgcatcttggatttaatctcctgttctttgttag

SEQ ID NO: 27243 - DNA, 729 bp, Zea mays
  Clone ID: LIB4729-015-B8_FLI
ctcgaggccggccgggaaaaacctcctgcagtcgttttcacctcctccctctctcacggcggcttttctggcgacggcggcggcggcgacgacgagcagccacctggggaagagcaggtagcaggaaatggcggcgttcctgaggtcaaaatgttcaccagttggacgtactttgatgggaagccttggaaatagtttgtttggggctgccaactcttctgttggggcaataacaaggccttctcattgcgatgctatcagtcagcaaatcagaacattcatccagatgaggactaacctgaaggtggtcgataactccggggccaagcgggtgatgtgcatccagtccctgagggggaagaaaggagcaaggctcggggacatgatcatcggatccgtaaaggaggcccagcctcgtggcaaggtcaagaaaggagacgtagtctacggcgtggtcgtccgtgccgccatgaagaaaggacgcagcgatggcagcgaggtccagttcgacgacaacgcggtggtcctcgtgaacaagaagggcgagctgatcggcacccgcgtctttggccccgtcccccacgagctgaggaagaagaagcacctcaagatcctggccctggctgaacacattgtttgaggtgtgtcgcatagccaagtgtttgtgggaatgtttttttttgtgtgttctctgtttgaataatgcattgtgaaacgatagcatggacc

SEQ ID NO: 27244 - DNA, 793 bp, Zea mays
  Clone ID: LIB4729-015-H1_FLI
ggctcggccggggccaagcggcgccaaaccaacgagagcacccggaccagacgcccaagtcgatcgccatggcgatgaagccggcggcggcggctccccctaccccggccgcggcgcacagcgtgttcgtctacggcagcctgatggcggacgaggtggtccgcaccatcctcaagcgcgtcccgcccgccgccccggccctcctcccaaactaccaccggttcaacatcaagggccgcatttacccggcgatcctgcccgttgagagcaagagagttgctgggagggttatcatgggtgttactgatgaagagctccagcttcttgacgcgtttgaagacgtggagtacacgaggacaagagttgagatatcattggctgactcttccgagaacatgctggctgacacttacgtgtggagtgatgcagaggatctcaatctttatggagaatgggactttgaggagtggaagaaactgcacatgaaggatttccttgcgatgacgaacggtttcatgcacgagctcgagcagcctgaatcgaagacccgggtggagacctaccaggaattcatgcaacaacaggaacagcctgcgccggggacccaggtggagggttgagagctgcaatccgctggctgctgatctacatctagtcaattcccatggaggaattgcattggcattggactgtaccgtatctaataggtcacctatatcatttgtgaagatcaggattatccggtctataataactaaacatacaaataaaatgtccaccgaggtttctgttg

SEQ ID NO: 27245 - DNA, 682 bp, Zea mays
  Clone ID: LIB4729-015-H12_FLI
ggccggccgggagtggtcagaccgtctcgtcctcccttcccgtctaggtgtggccgtctcgcttcggcttctcccacttccttccccagatctccaagaccaggagccccggcgaagccaccgcgcccgcagcgatgtcggcgagcagcacgcccgtagacgctttgggggagccgatcccgacttcgtcggtgctgatggcagcgtcgaagcacatcgcagtccggtgccgcccggagaacgtcgccttcctcaactgcaagaagaaggaccctaatcctgagaagtgcctcgagaagggccgccaggtcacaagctgcgtccttagcctgttgaaagaacttcatcaaaagtgtcccaaggaaatggatgaatatgctggttgcatgtattactacaccaacgaattcgacttctgccgtaaggagcagcaagcttttgaggaatcctgccccatttccgagtagatcttgagagttttacttccagggatctttgcaaataaggaaagaaaggctgaaaaaccgagttcatgatctcccatgtttgttgtcctcatggaatttttactggtggatgaatagcacaccaaggagctattcaccacaattgtccccctcaatattttttttttcaaactggaagtgacttagccgtatgctctaagatggtgatggtgacg

SEQ ID NO: 27246 - DNA, 897 bp, Zea mays
  Clone ID: LIB4729-016-G2_FLI
ctcgaggccggccgggtcggccatcgtccacggatcctatcggtctctcctgtgtcctcttcagtctccacgccgttccagaagtcgccaaccttccctcgccgccgcgccgcaacagccgcctcccctccaaggtagcccaatcgaaaccactcgcccggccaccatggcctttgccagctcgctgcttcccgtgccgccctaccgcgtctgcgcgacccccgcgtcggaggtcgccgccttctcgccggccaagaagagcgtctcgttcgccgctgcgcgccagcgccgaggatcccgtcacggagtgagggcagaagtaaatgaatctggaagtgttttggctgttgatgcactctcgcaagttaaacatgttctgcttccagtccttgatcgcaatccttacctttctgaaggcacaagacaggctgcagcaacaacagcttccctcgcaaagaagtatggagcagatattactgtagttgttattgacgataaaccaaaggagtctgtcccagagcatgatactcaaatgtcaagcattagatggcatctctcagaaggcggattttcggagtttagattgatggagcgtcttggggaagggcagaaaccaacagctatcatcggggaagttgctgatgagtgggacttagacctggttgtgctaagcatggaggcaatccactccaagcatgtcgatgggaatttgctcgctgaattcatcccttgccctgttctactgctcccgctctgacatagagctgatttgcatctgtcatgtttttttgagacaaatgatctgtttgtccttgaagatgtaactcccgcatgttccctggatacgaggggtttgcgtcagctgatgattctattatgttgatgcagtttttttcg

SEQ ID NO: 27247 - DNA, 685 bp, Zea mays
  Clone ID: LIB4729-017-C12_FLI
ctcgaggccggccgggattcatatcaacttctactgtttcattcgagccaaacaccagtatctaacccacatggcccacctgcaccgagcggttgccgccgttaaaccctaccgctgctctcgtcaccatctctccgactcacccctctgtcctcgcaagccgccgccggccaagtcctgtccctctcccttgtctggttcggatcgtcgttgctagccaggtgctggatccgtagcggcggcggcggccatggacaagagcatgctcggcgacctggacggcctccccgaggaggacaagatgcggatggccgccatgatcgaccagctccagatccgcgacagccggagaatgtacaattcgctggtggagaggtgcttcacggactgcgtggacacgttccggcgcaagaacctggacaagcaagaggagtcttgcgtccgccggtgcgcggagaagttcctgaagcactccatgagggtcggcatgaggttcgccgagcttaaccagggcgtggccacgccggactaagaaacatgctgctgctggctgtggccgccaggtttctggctttgctggcacagatttgtagccgacaaaaggatttcagcacttccgctgcctgagatatatgcgtcttagagccgaacgctgggtgtcagattgaataaaaactgccttgag

SEQ ID NO: 27248 - DNA, 1107 bp, Zea mays
  Clone ID: LIB4729-017-D1_FLI
cgaggccggccgggaggcccgtccggatagtgccaggactgccagcccgatctcgcgtcgaacgatgtgaaagaactcctttcttctacgcggacggattcctctcgtctcgatcagctcgcttcgtgacttctctctcctctcgatcgattgcttcctccaccgaggcgggggaaagcgccgcccagatcgccgtaggcaagcggcggtcactccagctttgagcataagtttctgcagggaggctcgtgaagtcagtagtcgtatctggcagtggcagcacagcgcaccatggaatggctgagctggagaacggtgtgttgtttatcagtgctgtgcaccgtgctgttcttgcgcccggtcgagggcattcgctttgtgatcgatagagaagagtgcttctcgcataacgtggagtatgagggggatactgtccatgtatccttcgtcgtcatcaaggctgacaccccgtggcattacagcgaagaaggcgttgatcttgtggttaaggatcctaatggcgctcaagtccgtgattctcgagataagactagtgataagtttgagttcatagttcagaagagaggcgtccatcgcttctgcttcacgaataaatccccgtaccacgaaactatagacttcgacgtgcatgttggccatttttcatacttcgagcagcatgccaaagatgagcattttgcaccacttttcgagcaaatagccaagttagatgaggcactttacaatatccagtttgaacagcactggctagaggcccaaactgaccgtcaagcaatattgaacgagaacatgagcaggagggcagtccacaaggcactcttcgagtcggcggcactgatcgcggccagcgtcatccaggtctatctcctgcgccggctcttcgagcgcaagctggggacgtctagggtatgaggctccactggtatccaactctcccttgtagtagccaccatgatcgtaccgacataaccgttaatggtcgctagatcagctaatactgcttccttgtgggctttagttacatgtaatcttttgtggtgccacagatgagaactcttcggatttaaaccgtcaatctttcagctg

SEQ ID NO: 27249 - DNA, 1346 bp, Zea mays
  Clone ID: LIB4729-017-F1_FLI
ccgggattgccatctctttcaatcaccttcttcgtttcatcctctgattctccccctgctggtctgctctgctcccatcccatggagcccgacgccgcccaaaaccctagccccagccccgtccccccgcccatctccgcctactaccagacgcgcgccgagcaccacgccgtcgtaactggcgactggctcgcccacgccgccgccgcagccgcagccttccccggcgccgataccgccgatgccgccccgcccccgtcccccgggggcggcggcgtgatcgaggagttcaacttctggcgccgcaagcccgaggccgcggaggcggtggccgccatcatggctctcgccgccgtcatccgctccagcagggccaccaccatgatggagctcgagatcgagctcaagaaggcatctgacaagctcaagtcctgggatgctacatccatttctctttctgctgcttgtgatttgttcatgcggtttgtaacgaggacctcacatctggagcatgagaagtttgatgcagcaaaatcgcggctaattgagcgaggagaaaaatttggggagatatctttaaaggctcgcaagacaattgcaatgcttagtcaggattttatttatgatgggtgtactatacttgtccatgggtattccagagtagtactggaagttctaaagcttgctgcatccaatcgcaagctcttccgggtactatgcacagagggcaggccagacagaactggtttaaggatgtcaaatgaacttgcagcattagggatccctgttaaggttctaattgattcagctgttgcttattccattgatgaagttgacatggtttttgttggcgctgatggggttgttgagagcggaggaataatcaatatgatgggcacttatcagatagctcttgtggctcatactatggacaaacctgtttatgtggcagctgaaagctacaagtttgctcggctatatcccttggatcaaaaggacatgacgccagctcaccgaccaatagattttggagtacctatacccattggtgtggaagtggagacatctgcaagagactacacacctccccaatatctcacactcctcctgaccgaccttggtgttctgacgccgtctgttgttagtgatgagctcatccaactgtatctatgatctttgcggcaggcgccgttgtttcattggcatgtaacatctacagttgagtccagggtttgccctatcagttttgactatgatgtatgcttgcctttgttgtgctgatgcgatgtttagaagaatttctcggaacgattatgctgagagaaatcaacagtttgtaagagctt

SEQ ID NO: 27250 - DNA, 2228 bp, Zea mays
  Clone ID: LIB4729-018-A12_FLI
tcgaggccggccggggccacgccgcatttgcatttccggatcccctcctctcgcactccccattcccctccgccgccgtctcacgcgcccgcgacccacccggactcccgcttcgatctcgccccgattcccccgctcgcgcccccaacccgattcgtccctctcacgcgcgcgcgggtgggaagacagcgatggcttggggcgggggcctctctccccgccgcgggtgacctctcctcgcgcggggagccctcccgcgtgcccacgcggaggatcccgtcgcggctggtgcactaccacctcctctccattcgccactcccccgtgctctctcgcgcgtcccctcgaccatagatagggtttgctcccttccttcctcgccgcccgatttgatctcgtcccttccgggctccggctaggctgctccgtctctcctcctccgccatgttctcgcacggcgctgattccgcccacgacgccgggaccgttggcgtcagcagcggcgtcggggccaccgtccccgcccgcttcgtctggccctacggtgggaagagggtcttcgtctcaggctccttcaccaggtggtcggaacatttgccgatgtctcctgtcgaaggctgccccactgtatttcaggctatttgcagcctgtctccagggattcatgagtacaagttctatgtggacggggagtggcgtcatgatgagcgccaacctactatatctggggagttcggtatagttaacacactatacttgacaagggaatttaatcaaataaatgccttattaaatccaagcacacctggaagcaggatgaacatggatgtggataatgaaaattttcaacatacggttacattgtcggatggtaccattccagaaggtactgtgagagtttcagaggctgcaatacaaatctcaaggtgccgcgtttctgagtatctcaatttgcatacatgctatgatttactcccggattcgggcaaggttattgctctggacattaatttacctgtgaagcaatcttttcatattctgcatgaacaggggattcctgtagctcctctctgggactcattcagaggtcaatttgtcggccttctgagcccattggatttcatacttatattgcgggagctagaaactcatggctcgaacttgacagaagatcagcttgaaacacacactatatctgcatggaaagaggctaagcggcaaacttgtggaagaaatgatggtcagtggcgagcacatcagcatctagtgcatgccaccccttatgagtccttgagggacattgcagtaaagcttttgctaaatgacatttctacagtgccagttatttattcatcatcatcagatggatcattccctcagttattgcaccttgcatccctttctggaattttgaaatgtatttttaggtattttaaaaactcaactggtaatttgcctattctgaaccaaccggtgtgctccattccgctgggttcctgggttccgaaaatcggtgatccaaacagtcgtccattggctatgttgcgacctaatgcatcacttagctctgcccttaacatgttggttcaagctggagtgagctcaataccaattgtggatgaaaacgactccctgcttgacacttactctagaagtgacatcacagccctagctaaagacaaggtctacacacatgttcgcctggatgagatgaccattcatcaggctttacagcttggacaagatgccaatacgccttttggattttttaacggtcagagatgccagatgtgcctccggtctgatcctttgctgaaggtgatggagcgactggctaatccgggggtgcggcgggtgttcgtagtagaagctgggagcaaacgtgtggagggtattatatcactgagtgatattttcaagttcttgctgagcttgtgataagagaagaggagcatgacggacatttgtttgtgatcaatagtaagaaaacagcagggtatgtgaagcaagctgccatggatctcgcatttcccctccccctccggcctttggtcaagtaaggcaggattgaaggtggcgggctttgtctttgctgataatggctgttggaattcatggtctgtaaagttctttttttcccctttgtttttcgttttaaccattttgtgcctcccgttgttaccaaaaatatctggtgattattattattatttttggattgtttctct

SEQ ID NO: 27251 - DNA, 2041 bp, Zea mays
  Clone ID: LIB4729-018-C5_FLI
tcttcgtcgatcggtgtccctagcctccccctgcccggctgtccttctccccgatttcgcaagctcctggttacggcggcatctatcgttccgccgcatcgtctctctcgcgacgctgccccagaccgccgagataatggctggccaccgaaacagtcatggaaagcgccagtctgattttactgaaaatggaggcggtaagagaagaaatcctggcgatgatacatatgcacctggtcctgatgacactgtgtatcgctacctctgtgcctctagaaaaattgggagtatcattggcaggggtggagaaattgcaaagcagttgaggactgagacccaagctaagatcaggattggcgagagtgtccctggatgtgatgagcgagttattaccatatttagcacaagcaggaaaactaataccatcgatggtgctgaagatgaggtttgccctgctcaggatgccctctttagagttcatgagaggcctgccagtgatgagggtcttgggaacgaagacagcgaagaaatttcacctcaagttactgttcgcttgcttgtgccatcagaccagattggatgcattattggaaaaggtgggcagatcatccaaggaatccgcagtgagactggtgcacaaatacgtgtccttagtaatgatcatatccccgcatgtgccattagtggagacgaacttctccagatatctggggacacggtagttgtcagaaaggctcttcatcaagtgtcatctcgcctccataacaacccatccaagtcacagcatcttcttgcatccagcttgacccaaccttatccagggagcacccaccttggtggttcctctactgcacctgttgtagggatcactccagtaattcctccttatggaggctacaaaggtgatgtagcaggagattggccctctttataccaaccacgaagggatgagagctctgcaaaggagtttagcttgcgtttactttgtgctgctgcaaatgtggggggtgtaattgggaagggtggtggaattatcaaacagattaggcaggagtctggggctttaatcaaagtggctagctccaattcagaccctgatgatgactgcataattacagtttctgcgaaagagttctttgaagatcctgtatctccaacaattgatgctgcagttcgtttgcagcctagatgcagcgagaaaagtgatttagaatcagctgagcagtcatacacaacacgcttgctggtgtcaacatcacgtattgggtgcctaattggcaaaggtggttcaatcattactgagatacggagaacatccagagcaaatgtacgcattctttcaaaagaaaatgttccaaaggtagcagcagaagatgacgagatggttcagatcactggaggccttgatgttgcaagaaatgctcttgtgcaaatagctacaaggctgaaagccaatttctttgaaagagagggctctttatctgcatttccacctgttatcccttaccatcctttgcctgctggtgtttcggatgaaccaaaatatctaggcagagacacgaagcctgttgggcactatctatattcaagtggttttcgtacatcggatgacacgattccttctgacagctatgcaagttatggcggctcccaggcacctggaagaggatatggggcttacagcgggtacagtgctcgctcctctaatagtgggttatctggtcatagttctcttcactatggaaagcgtcatggttattaggatttagattgcttgataaagcagccaagacattgaagtttggagcctgcttattggagccccttcccaaaccagatgaccaagagagcccaacctggaagctttgcttaagaggacccgtgtggatgccatagaccaccttatattcctcactacattactttgtcttcctctgggcctatgtttttagccctgccgcaaatgttctgaacctatgtattgaaaggtcgcatttgagactgcatgtatttgcttgtttgaaacctgattcagtttcat

SEQ ID NO: 27252 - DNA, 1507 bp, Zea mays
  Clone ID: LIB4729-018-H2_FLI
ccggggacccttttccaccccgccgccgaagccaccgtgccgctagccttccccgccgccgcaaaatggccgcctccgcgcgacccctggttaccgtgagggccctggagggcgacatggccacggactccgccggtgttccgctggcggacgtcctccgcgcaccgatccgcccggacatcgttcgcttcgtccacaagctcctgtcctgcaacagccgccaaccctatgcggtgtcgcgtcgcgccggacaccagacctccgcggagtcctggggcacggggcgtgcggtatcccgtatcccccgcgttcctggcggtggtacccaccgcgccggccagggagcgttcggcaacatgtgtcgtggtggacgcatgttcgcgcccaccaagatctggcgccgctggcaccgtcgcgtcaacatacaccttcgccgtgtcgccatcgcctccgcactctccgccaccgccgttccgtcccttgttctcgcacgtggccaccgcgtggagtctgtgcccgagctcccgctggtcgtttcggactccgcggagtccattgagaagacagcccaggccatcaatatcctcaaacagctcggtgcctacgccgatgctgagaaggccaaggattctgttggcatccgccccggcaagggcaagatgcgcaaccgccgctacatcaatcgtaagggacccctcgttgtctacggcactgagggctctaaggtcgtcaaggcctttcgcaacctccctggcgttgatgttgccaatgtcgagcgcctcaacctgctcgatctcgcccctggtggccaccttggccggttcgtcatctggaccgagtgcgcattcaagaagctggatgaggtgtacggtaccttcaacgcaccatcagcgaagaagaagggtttcgtgctcccgaggcccaagatggcaaacgctgacctatccaggcttatcaactctgacgaggtgcaatctgtagtgaagcccatcaataaggatgtgaagcgtagggagcctaggaagaacccactgaagaatatggctgcagtgctcaagctgaacccgtacctcggtactgcacgcaagatggcagccctagccgaggcagcgcgtgtcaaggccaggaagcagaagcttgattccaagaggaccaagctcagcccagaggaggcttctaaggtcaaggctgctggaaaggcgtggtacaagaccatggtttcagacagcgactacacagagtttgagaacttcaccaagtggcttggtgttacacagtgattgtctggtccaacccttattgttttgccaattcagagattatgattttgatcgctgttgtcaaatatcctttgttattggtatattctgacattagttttggctttggtagttttttttaccgctggatgtttacttccagacacctattacaccttttatggaaacaaagtatatcgattctcaacactcaccgtgcttctgtttttggcagtattggttactcg

SEQ ID NO: 27253 - DNA, 1762 bp, Zea mays
  Clone ID: LIB4729-019-H4_FLI
ctcgaggccggccggggtccttctcgtaattattgtcggcaattccgactcctctgacaatccatctaccacgcgcggccaaactcctgttcttccacctgctggctgctcctgcctcccctgcgccccaaacccacccgcctcgccgtccccgcaggccgcagcctgctctcggctcccgccgccgtctaccgcgtcctgcggctgcggtgttgcgtcacctcgggttcgccttaacttccacaatcctcgccgtcctggtgctccgccgcccctccctttgtactcgcgctggagctgcagatccaccgcgacctggcgaccaattcctcctcccgctgaagaattggcgaccttggcctccgcccccgcggcgcggaggagtcaactgtggtagcaaccaccgcggaggctgcaagccttcggtaagggaggaaagttgacttgttggaagccggtccagggccgcgatgacgtcgaccgccgccggcgcgtcgtcgtcggcggcgaagagcgagtcctacctgcgggccgacaagatcgacctcgagagcctggacatccagctggagaagcagctggccaagacctgggagaagcacaaggggtcgtacaaccaggggcccagggaggactgggagatcgacctcgccaagctcgagattcgctacgtcatagcgcagggcacctacggcacggtgtatcgcggcacgtatgatgggcaggacgtcgcagtaaaactattggattggggtgaagatggctttgcgtcagaaactgaaactgccacactgcgagcatcatttaagcaggaggttgctgtctggcatgagctcaaccatccgaatgttacaaagtttgttggtgcatcaatgggtactacagaccttaagattccagccaatagttctaacagtggtgggcgcactgagctgccgccaagagcatgttgtgttgtggtcgaatatctcgctggaggatcactgaagcagtatttaataaagaacaggcgaaggaagcttgcatacaaggttgttgttcagatagcactggatcttgccagaggattgaactatctacattcaagaaagatagtacatcgggatgtaaaaactgaaaatatgctgctcgatacacagcgaaaccttaagattgctgattttggtgttgctcgtgttgaggctcagaatccaaaggacatgacaggcgcgactgggacacttggctacatggccccagaggtgcttgaaggcaagccatacaacagaaagtgtgatgtctacagttttggcatatgcttatgggaaatatactgctgtgacatgccatatccagacctcagttttgcagacgtctcgtccgccgtcgttcaccagaacctgcggcctgacatccctcgctgctgcccaagcccaatggcgaacatcatgcggaagtgctgggacgcaaacccggataagcgccctgacatggacgacgtggtgcggttcctggaggccctcgacacgagcaagggcggtggcatgataccagaaggccaggcaggcgggtgcttgtgtttcttcagagcccgtggtccttagaaccaaccaaccctttccagccatcctctacttgtctctgccctactacagtattggagccagatgtaggcctttgttgttcatcggataggggattgcagataacttgatgacaatctttgtgattggttgacacttgttatacgttctatagtgatgtgaataccagtgaggagtct

SEQ ID NO: 27254 - DNA, 1415 bp, Zea mays
  Clone ID: LIB4729-020-C7_FLI
ctcgaggccggccggaggccgctacgcccttcggcccttggcctcttctctctcttcgtcgcgccgccgtagcacgactccgactcggccatggcgacacccccagctctcctattcccttcgccctcttcggcatcttctccgccgtcatccgcgcaggtagaggcagtggtcctcttcaacgtctgcgacagctacgtgcggcgaccggaccaggcagaccgtgtcatcggcaccctccttggatccctcctccccgatggcaccgtccacgtccgcaactcctacgtggtcccccacagcgagtcggccgaccaggtcgccatcgacatcgactaccaccataacatgtacgcctcgcaccagaaggtgaaccccaaggaagtcatcgtcggatggttctcgactggatttggtgtttctgggggaagtacgcttatccatgagttctattcaagggaagtacaaagccccatccatcttacagtcgacaccggcttcactaggggggaagcttccatcaaagcctacgtctcatccaacctgtccctcggtgataggcaactcgctgcgcaatttcaggaaatccctctggatcttaggatgatcggggcagaaaaggctggatttgagatcctgaaatctacgatggtagagaagctccccaatgatctggaaggaatggagtcctcaatggagaagctttacattcttattgatgagatctacaaatacgtcgatgatgttgtggaaggacgcgtggcacctgataacagaatcggaaggttggtctctgaatctgttgcttcaatgccgaaattgtccccagctgctttcgataagcttttcaatgacaagattcaggataaccttgcgctggtatacctgtcaagcatcacaaggacacaaatcagcatcgccgagaagttgaacactgctgctcaggcgctgtgactttggttgtggcagatctatctggttgaaacgtggatgtttggcctacgtgaccaattggtggcagggatgcattttttgttatttgttattaaaaaatgggagagcttgcaggaaaaaaaaagggttagtcaatgatgggatcccggtagagtggtggatgtttctgtttggatagcattatgtgctccaggctgaatatttgtaatgctccttggttgtgtagcgacacagttaacgacatcgcaggcaaccgaggtcgtctgggtacatcgcaaataggctggtgctgaggtgacctcgacaggagtcgcagcaggctggcactaatgatgcgaataaagcaatacctcccaacacgttaaaacggggtccaaaattcaccatgattatgaagaagctgtacagctgatggaaacgtaggctcattgcaaatcaataaaatgtactccgtctcaaat

SEQ ID NO: 27255 - DNA, 1599 bp, Zea mays
  Clone ID: LIB4729-021-A6_FLI
ctcgaggccggccgggaaccgtccatttcccaggttctcaccggttcctcaaaccctaaaacctccaaaccccagcaatggcgggttccccttcgttccgtcgctacccgctcgcctcctccgtcgacctcgtccgctggctcccttcctcctccatctccccttccggtcgcctcctcgccgccgccgtccacgatcccacctccggctccttcgcctccagcatccgccttctccccctctccgaccctgtctcccggctcgcctccgtcccgctcccgtcccgcgccacggcactccgctgctcccatgctgcgctcgccgctgccacctcctcgggctcgctccacttcgttccctcctcattcgactcggacgccgcagtgtccgtccccggcggcgcgggcttccatgtcggtcctgtccggggcctcgactgcggcggggaggagtgggtcacagcgggagaagacggaagagtgcatgtggtcggcggtgtagctgacgggagagtggtaacgaggagggtgtgggacgggaaaggaatgtcagggtatgaagctgccagatgggcttcgccggtggagtttgccacgggtggagccggatgtggtgttcagtggtgggatcggaggaaaggggacgccatcgtggcgcggtgtaacggcatctggggccgtggcgtagttactggcatggtgcattccattgacattcatccatcaagaaagcatatctgcgtggtgggaggttcatcggggaccgtatttgcctgggatctgcggcagccacaggagccgataccaatctctgttctaggtcttaatgaaacagctgagcctgtgtgtgaaagtgaggtttgggaggttcttttcgacacttacactaagtcttccgatatcatctcatctgcatctgcaagaatattgccactgatgatgtgttcagaggatgggatccttgcagtcgtcgaacaagataagagaccccttgaattgcttgctgaatcttgtgccatcaactccttcgacatagatcctcagaacccctctgatgttgtttgcgcattagaatgggaatcggtcggtgtcctaactcgtggtagagatgcaatgtcagaagaatgaaaattttcatcacccagggatctcaatcagatttttttccaaggtgtttgaaactgctatcagaaagaatcttctgaattctgagggcttccatattcagtcaccattctaatgcccgtgaccatgggcaacggtagaaggaataaagcgtgcatgacgaatgccttttcctgtctttgcatactaaccaacactgtcttgtaccgttggaagttttactctgttgtcatgggtagttgcagattgcagaaaccttttctgggctagcttcaagatgtgtaattgctcttggatgccaactgctgacagtttgaaggagtggtcacaaacaattcaatccttttagctgggggctgatgaactgaagctataattagtttcataatgtttggttgtggtattaaattggctcctgaacaatatggactccgatacatattttatttatctggcttaccatttagattccatt

SEQ ID NO: 27256 - DNA, 757 bp, Zea mays
  Clone ID: LIB4729-021-C5_FLI
acccagcagcaagcaatctcgtccccaaacaagcaaccaccgcctccccgatctcgtcgagaggaagcccaatcccgaaaccgccgccctattccaatggcgcccaaggccgagaagaagcccgccgccaagaagcctgcggaggaggagccggcggcggagaaggccacggcggggaagaagcccaaggccgagaagcggctccccgcgggcaagtccgcaggcaaggagggtggcgagaagaaggggaagaagaaggcaaagaagtcggtggagacgtacaagatctacatcttcaaggtgctgaagcaggtgcacccggacattggcatctcgtccaaggccatgtccatcatgaactccttcatcaacgacatcttcgagaagctggcggcggaggcggccaagctggcgcggtacaacaagaagcctaccattacgtcccgcgagatccagacctccgtccgcctcgtccttcccggcgagctcgccaagcacgccgtctccgagggcaccaaagccgtcaccaagttcactagctcctaggcgagcgatgcgacgtgcactcatctccttcttgcagtagtacaatagtagtacggttaggtgtgttgccgcggtggtagttgccgctgcgtttgttttctgggctcggttgatgtcttttatgtaagaaagtaactgtattgtgtctgcagtaccttaccatgcatgttttaagtagcatcccttaatctataaggaatatgttttaatg

SEQ ID NO: 27257 - DNA, 1007 bp, Zea mays
  Clone ID: LIB4729-021-F1_FLI
ccgggaaaaaaaaaaaaaaaaaacccgtcccgtctccaaagtccaaactccaaagtccgaactccaaaccaaacgctccagccccgccgcacgcatacggcatacgcatccctcatctccctctcctcgccttcccgccgcggcgccgcctctcctttccgaattccgactcccgcctccccggggtgagtgtttccgcatccggctcgtccgccgatcctcgcgaggcctcctcgaccccgacccgacccggcgcggccaccggttcaagtcattcacaaaaaaacatgggtcatgatgaagctgtagttactcagaattcagtaaaagcaccatcaccacccaaggatcagccagctatttatccatgctttgattggtcgactgtgcaggcatattatggcccaggggtcttgccaccagctttctttaaccctggaatagcgcctggtcatgcccctccaccatatgtgtggggtccgcagactatgccaccggctgcctttggaaaatcatatgctgcaatatacccacatgctggtggtttcctgcatccactcatgcccctagtggtaaacccattgagtgcggagccagctaagtctgggaacagcaaggataatagtttaaacaagaaactaaaggaaattgatggatctgctgtgtcaagtggcaacagtgagaaaacaaggtggttacatgatatttctaatatattttttcctacgaatttggaagtgtactgttctggcatgttgttcgagccagatttgagccggcggactgtccggccctgaggccggacggtccgcggtccggacggtccgcgcgtgcgcagaacagattagggttccgagttttgtgctacggttgttagctatattcgcgggattagctcggaatcagttgtgtaaagggtccagcccccctcctctataaatagagaggtctacggccgatttgtaatcatcaacaatcgaatcaatacaacttctatttcgcatttt

SEQ ID NO: 27258 - DNA, 1858 bp, Zea mays
  Clone ID: LIB4729-022-E2_FLI
ctcgaggccggccgagctcacctcaccttccatcacggattcacggtcacggtcgaggaggaagaaacggtaccgcgcccgcggcgagagcctgggaggctgggaggaggaagaaccctctcgactcgattcttcgcccatcgcctcgccgccccgatccagttggtggcctatggcgggcgagggcgaggacgaggcggcggccattgagcggcagctggagcagcagctgcaggagcagcggtcctccctcgccgcggtcgacgaggccctcgccgccgacccctccaacgccgacctcctcgaggttcatgaggagcttcttgctgcgattaaggatgccgaggagggtcttctccatttgaagcgctctaggctactgaagcaagtagatgagatctttccagataaggaatcaatatcccaatcacccgaagttgctattgagtcattagatccagatgatgttgagccagaaccactggagtcacatgatttttcagttggatcaaagtgtagattccggcacaacaatgggcgctggtataatggatgcattataggctttgaaggttcaggcgatgcaaggatctcatttctgacacctacatctgaaaatatgtcgatatgcaagttcttcctacagcagcgatgtcgatttggtagtaactgccgcatgtctcatggtattgtaatgccttctaaagccttgaagcgattcactccaactaggtgggagcagtccttggtaggctccagcatactggcaacttctgggtataactctggcctttggaggagagcagagcttgagtcatgggatgataatctgaagattggccaagttgtttttcaagatgatgggagttctgcgagtctgccaagtgattctctttctgtctcggaatacgctgacatgagtgacgaagatgaaggaagcttaagtgacgaagaatctgagttcagtgacgatgctgatcaagaggacggaagtgttcatcagggtcttggccttttagaattcacaaattttagtggcattcagacagataccatgatcttcgcaaaatgggagcaccacaccaggggtgttgcctccaaaatgatggcaaaaatgggttaccgagaggggatggggcttggtgtgtctggccaaggcatgcttgatccaattccagttaaggtactacccccaaagcaatcacttgatcatgcacttgcttcaagcgaggctgacggaggcagtgggaaaaagcgcagtaggggtgggaaaaggaagcgtgagaagaagtttgcagaacaggccagggctgctaaagctgaagaagctgagagatctgtctttaattttatcaacagccatctagtaagccaagaaggttcgaccaccaaagttagaaagggttcatcagttgagaccaatggactcgctaagaaggaagacagaagatccttggttgcatacggtgaggaagtgaaggagctgaggattcgagttgagaaactggaagagatgaagaaccgtaactgcaaagacaaggcattctttgaagcagcttcaaggaaactggaagagactcggaaggcactcgctgatgctgaagctacccacgcttcagcgacgagtgcagttactagaaaggagaaagagaagaaatggttgaaattctgatgtcaatttcatgtgtgccaacgcttctctgtctgtgttctgacaagaacgtggcatgatgtatgcaacttacaattgttccccatgtcagctcttagccttctacacttgtatgtctatcaagttttagatctgttgtagaagcagtaacactaataattattcgaaggatgtggtatttagacg

SEQ ID NO: 27259 - DNA, 878 bp, Zea mays
  Clone ID: LIB4729-023-A10_FLI
ctcgaggccggccgggaaaaacacgcgaatcgtaccggtacgaacactgagcacgcacgcacgcaaactcaaaggagtgtgaccacggaactgaagccatggcggttacagttgagaagggcgctatgggcgagccggcgctgctgctggagcgcagccgggcgatcaccctgcacggccgtgaccggaagggccgtgccgtcgtcaggatcgtcggcaactattttccagcgcgcgcgctcggcggccgggcggaggaggcgctgcggtcgtacctgcgggagcgcgtcctcccggagatcggggaccgcgagttcgtggtcgtgtacatgcactcccgcgtggatcgcggccacaacttccccggcgtcggtgcgatccgcggcgcgtacgagacgctgccggccgcggccaaggagaggctgcgcgccgtctacttcgtgcacccggccctccagtccaggatcttcttcgccaccttcgggcgcttcctcttcagctcagggttgtatgagaagctgcgatacatgagccggcttgagtacgtttgggcccacatagacaaggagcagctggaggtccccgactgcgtgcgcgagcacgacgacgagctggagcgccgcccgctgatggactacggcatcgaggcgacggagacccgctgcatgtatgacgccgcgtccatggacacctcggcgtccctgcactcgctccgctgcgtctcctagtcgcctggacacttggacagtggcatcccgattcccgccgccggtacggcgtgctttctgtgttctggttggtaggaggtagctgcatggcttcatagcgcttcggtactgtagtttagctgtgtatttataatggataaagtttggagt

SEQ ID NO: 27260 - DNA, 2186 bp, Zea mays
  Clone ID: LIB4729-024-H5_FLI
ctcgaggccggccgggaggtcatctatctccctctttgccatccggcccatccccagcctgtgtttgcatcccatttgcttcccccccctcttgcccatcccctgtgctgtgctgtgaactgcggccgggggcatccttgttggggggtggcgtaggaggctgctgacactactgcagagcagggcagccatgaggcttcctctccctctgctggccctggtgtgctgcgccctgatggcgcgccagcattgcgctgcggcgggcaaggcccggcacttgaggtgggagatcagcaacatgttctggtctcccgactgcgaggagaaggtggtgatcggcatcaacgggcagttcccgggcccgacgatccgcgcccgggctggcgacaccgtccacgtccagctcaggaacgcgctccacaccgagggcgtcgtcatccactggcacggcatccgacagatcgggacgccgtgggcggacggcacggcggcgatctcccagtgcgccatcaaccccgaggaaaccttcacctaccgcttcgtcgtcgacaagccggggacgtacttctaccacgggcactacgggatgcagagggcggcggggctgtacgggtcgctggtcgtggacgtggcggagggggaggaggagccgttccagtacgacggcgagctcaacctgctgctcagcgactggtaccacgagagcatccacacccagatggtcgccctctcgtccaggcccttcaggtggatcggcgagccacagtctctgctgatcaacgggagaggccagttcaactgctcgctggccgcagcgcacatgctgggggccaccaaccagtgcgccgccaccgccgccaacacgcagtgcgcgccggtggtactccccgtgcaaccgaacaagacctacaggctcagggtggccagcaccacctcgctcgcgtctctcaacctcgcgatcgggaatcacaagctgacggtggtggaggccgacggcaactacgtggacccgttcgttgtggacgacatcgacctctactccggggacagctactccgtcctgctcacgacggaccaggacacgtcctcgaactactggctcagcgtgggcgtgcgcggcaggctgcccaagacggcgccggcgctggcagtgctcaactaccgccccaaccgcgcgtcggacctgccagccctcgcgccgccggtcaccccggcgtgggacgactacggccacagcaaggcgttcacgtacaggatccgcgcgcgcgccgggacgcccccgccgccgccgacggcggcccgccgcatcgagctgctcaacacgcagaaccggatggacgggcgcatcaggtggtccatcaacaacgtgtccatggttctgcccgccacgccgtacctgggctccctgaagatggggctcaagtcgacgctggcggcggcgcgccccgcggagacgttcagccgggaatacggcgtgacgctgccgccgccgaaccccaacacgacggtgggggacaacgtgtacgtcctggcgcacaacaccaccgtcgacgtcctgctccagaacgccaacgcgctgtcgcgcaacgtcagcgaggtgcacccgtggcacctccacggccatgacttctgggtgctgggctacggcgacggcgcgtaccgcggggacgccgccgacgaagcgcggctcaacctccgggacccgccgctgcggaacacggcggtcatctttccgtacgggtggacgatgctccggttcgtggcggacaacccgggcgtgtgggccttccactgccatatcgagccgcacctccacatgggcatgggcgtcatcttcgctgaggctgtggacctcgtcgccaaggtgcccaacgaggctgtgtcctgtggcgccacggccaccgcgctcatggccggcggtcacctgtgattgccatcaaatattggtggccaggctagggaaccgccttgcctcgcgcgcatgcatattaatgcccttctgtcgtacgagatctctggtcattaattagtgttatttattaatatttcttctatatcttttttccgtttattgagacgtgaacctggagtgtttgtgcttggctaaccatcccatcttagataggttgttgcatcgtaagccaattccttaaattaatgaaaatgcctttttctcaggtgttgag

SEQ ID NO: 27261 - DNA, 898 bp, Zea mays
  Clone ID: LIB4729-026-F3_FLI
ccgggaatacccgtcccatcggtcgacgccctctgataaaaatctggcagaaaccgaaccgtagagcccgagcctcgcggtcgcggatccgtcctgcaaatctcctctcatacttctccaccggatccctgtaagattcccggagatgtcggacgaggagcaccagttcgagtccaaggccgacgccggcgcctccaagacctacccgcagcaggccggcaccatccgcaagaacggctacatcgtcatcaagggatgtccctgcaaggttgttgaggtctccacttccaagactgggaagcatgggcatgccaagtgccactttgttggcattgacgttttcactggaaagaagcttgaggatattgttccttcttctcacaactgtgatgttccccatgttgatcgcactgagtatcagctgattgacatcactgaagatggatttgtgagccttttgactgacagtggcaacactaaggatgacctcaggcttccgactgatgaagctctggaaggccaggtcagttagcggcggcagattcccctccaccgcttctgttccaggtctctgagactgagacatttcgctctacgtctgcagatcaagagcggatatgatgatggaaaggacctcctcctgacggtgatgtcttccatgggcgaggaacagatctgcgctgtcaaggagatcgggggcaagaactaaagccgctgctgctgtctcgtgtgcttagagttgagatgcatagataaagcgtataagttatctgtggttttgggtttacctggaaatttgtcgaggtggttggtgttactactctacttggttagcgatctgtggtattcttttcaacttagttatggtcaatatgtattcagttgaaatatttggttc

SEQ ID NO: 27262 - DNA, 1554 bp, Zea mays
  Clone ID: LIB4729-026-G7_FLI
ccggaaatcgcgcacgctccccagtccccacactccccatccaatccgcgcacaccaagcccccaatctcggccgccactcgctgactagctgctccggcaacagtcccccccgaggtacgagggtgcgaccgcggcatggacacgctcccagaaggcgtcgtgcagcacatcctctcgcagctcagcaacgcccgcgacgtggccggctgcgccgccgtcgcccgctgctggcgcgactgtgtggccttccttccgtcgctctattttccgcggggcgcctttgaggccttggccggcggaccggcgtcggccgtggccttcgccgacgacgccatcggtcggatggtcgacgccgccgcgcgcctcgaggagctcgtcgtgtactgccccttctccgcgtccctgctcccgcactggctcgcggcgcgggccgccacgctgcgcgtgctcgagctacggatggactccgccgccgctgacaagtcggggcacctgaatctcgattctatcggggtggccgcgggcctcgaggagctcaggctgtgggggctcacgatgacgcgcgcccccgcgtggggccggatggagcggctccgcgtgctggagatcgtcagcgccatcctggtagacgcagcggtcaacgacgtcctcgccgcctgccccaacctcaccgacctctcgctgctcgggtgccagtgcgacggagaggcggtcatctcgctagcctcgctcgagcggtgccggctcgacttcctcggctctggcaactcctccctcaggttcgccgcgccccgcgtcgagtcccttgaggtccagggtttctcatttatctatctgcaaggtggcaaccgtctcaaacatctcacaatctccaagaacactggtagtgtgcatcatgtcgagatggggaagctcccggagctggaccagctctcgctgcgcggcgtccagtggagctggggcgccatcagctcggtgctgcagtgcgctagcgaggtgaagcacctggtgatgaaggtcgaattctccggtgattatgacacgctgcagccgtttccggagatcgacctcgtcgaattcttcaacagccacccgaagcttcgcaagttcgaggtccacggcgccatgttcgcggcgctgagtcaggaaaacagcctgaagaatttggattcaaggttcgtgatacctttcttggagcaggtcgtggtcaccgtgcggtcatctctcaatgctaagcagaagctgaacaccctcaagtccgttgtcaggtacagcgtgaggctaagaaggatgatcattaggatctcgcagatgaagaattgccatgctgctggagatgatttctttgaggagatttgcaagttcacttacatgaacagtgggacagtgtgcatagagtagaggtgttgctgcatttgccattcttgaagtgatttaacactaaatcaaggcagtttttacccatgctgtttgcttaggacagtttactggataattcattgtttgttttgttgttcaccgagcttgaatgtatcctgcacttcaggctcgg

SEQ ID NO: 27263 - DNA, 1178 bp, Zea mays
  Clone ID: LIB4729-028-B3_FLI
ccgggatccctgtctctcgctttccctaacccacaccagaataccagatcgagcaccgatctagggttgcacctcttctgctagccggctggcgaggagccgttcggcatctggacgcggccaagggagatgaagcccgccgctgaccaccgccccacggcggtgctcctcactggcgcgctcgacgagaccgtccgcgcttggctccccgacgacctcgctgccttggggtcccccacacggggccacgcgctcggagtcgtctccctcgccgcccaccccgccggctcgctcgccgccgccgtgtcgctcgacagcttcatccgcgtctttgacgtcgacacgggggcatccgtcgccacgctggaggcgccgccgtccgagatttggggcgtccagttccatcccaagggtaatgctctggccgcagccggtggtggcagtggatcagtgaagctgtgggacacggagaagtggaaggcgatcaccagcctcgccgtcccacgcccggagggagctcgccccgacaagacaggcagcggcaagttcgtcctgtcagtcgcctggagccccgacggaaggctcctagcatgcgggtccatggacggcacgatcgccgtctacgacgcggtccgcatgaagttcctgcaccacctggagggccaccacatgccggtgcggtccatggtgttctccccggtggacccgcacgtgcttttcacggcctgcgacgactgccacgtccacatctacgacgccagggagaagggcctcgtcggggccatgtcgggccacgcgagctgggtgctgagcatcgacgcgagccccgacggcctggcggtggccacggggtcgagcgaccgcaccgtccggctctgggacctcaacatgaggacctcggtgcagaccatgagcaaccactccgatcaggtgtgggccgtggccttcaggccaccaggcggtgccggagtccgagcagggcgtctggctagcgcgtcggatgacaagagcgtctccctgtacgattactcgtaggtttttgtttccttataaaccgttgcaaatgcctctgttgtaccgaccagagatttgaattcgggcatggtggttggaagaattgttgtacgcagcacagtagtcgaggtgttaaattgcaaggaaagagtttatttcgtggt

SEQ ID NO: 27264 - DNA, 868 bp, Zea mays
  Clone ID: LIB4729-029-F8_FLI
ccgggcccatcatcttcctcgcagcgccggcgctccctctcccgctcccttccttactcgcgctcggcacacaggcggcggcgctcgggctctcagcgacggcgtcagcggcttaccctcgcgccctcgcctccggtcctccgcacaccggccggtgaccctgcgtactacactggatatcccaaggacttagggcgatcaagaattataccattcacatctgagcgtcagtttgtgcagctattacatgaaggcaggcctgtagtcgttgcctttactattaagtgcacatatacacagcatcttgataaagttctggaagaggccgcagctaaattttatccacatatcaagtttgtccgagttgagtgcccgaagtaccctgggttttgcctcacaaggcaaaggaacgaatatccatttgttgaagtattctacaacccagaacaggctgcaagcccaggaaagagcgtggatcctaacatcaccaagtattctgtaaaagtgctaccgttcaactatgaccaaagcgtgtatggatttcgagaatatttcaagaagcgtggtttcaagtattctgaaacaaactagatttgttgttaaagatctgcctcgagagagtagtcctagggacttgagtagcaagcatgtggaggcagttgttgtatggagttgaaatggcgtgaggctctaatgggggggtcttgactagttcattggagaatggctgtcatgtattcatttgtatacgggctactgctcatgcctagagatttgaattttccgtacctatgaaccattggatttggtaatgttttacctctcaaagccagtagtgagcaatttgcatcatttttctccagcactg

SEQ ID NO: 27265 - DNA, 480 bp, Zea mays
  Clone ID: LIB4729-029-G7_FLI
cgtctccggtcccgtccgtaataacactgatccgatccacgccggccggcgatggagctcatcaagtccagggcgaccgtgtgcgcgctcctcctggcgctgctcctgctctcgcactacgacggcgggacgacgatggtggcggaggcccgggtgtgcatgggcaagagccagcaccactcgttcccctgcatctccgaccgcctctgcagcaacgagtgcgtcaaggaggacggcgggtggaccgccggctactgccacctccgccactgcaggtgccagaaggcgtgctaagcaaagctcttcaaacaaccttttggcttgccagaactgaactctagtagtactaagtaacacgcagtacacgtcgaccgacgtgcttgcttgcgcctgcgctgtgcacaacctacgtaatgtggtgtcatgtaacgtgacagcaataaatattattaataataataacacggcatgtagccaaac

SEQ ID NO: 27266 - DNA, 1579 bp, Zea mays
  Clone ID: LIB4729-030-A2_FLI
ccgggagtccactccaccaccgttcatgcatgaccatggagagatctcaaccgcagcaccagcagtctcctccgtcgccgtcgtcctcctcgtcctgcgtctccgcggacaccgtcctcgtccctccgggaaagaggcggcggagggcggcgacagccaaggccaataagagggcccgcaaggacccctctgatcctcctcccgccgccggggagaggagctccgtatacagaggagtcaccaggcacaggtggacgggcaggttcgaggcgcatctctgggacaagcactacctcgccgcgctccacaacaagaagaaaggcaggcaagtctatctgggggcgtacgacggcgaggaggcagcggctcgtgcctatgaccttgcagctctcaagtactggggtcctgaggctctgctcaacttccctgtggaggattactccagcgagatgccggagatggaggcagcgtcccgggaggagtacctggcctccctccgccgcaggagcagcggcttctccaggggggtctccaagtacagaggcgtcgccaggcatcaccacgacgggagatgggaggcacggatcgggcgagttttagggaacaagtacctctacttgggaacattcgacactcaagaagaggcagccaaggcctatgatcttgcggccatcgaataccgaggtgccaatgctgtaaccaacttcgacatcagctgctacctggaccacccactgttcctggcgcagctccagcaggagcagccacaggtggtgccagcgctcgaccaagaacctcaggctgatcagagagaacctgaaaccacagcccaagagcctgtgtcaagccaagccaagacaccggcggatgacaatgcagagcctgatgacatcgcggagcccctcatcacggtcgacaacagcgtcgaggagagcttatggagtccttgcatggattatgagctagacaccatgtcgagatctaactttggcagctcgatcaacctgagcgagtggttcactgacgcagacttcgacagcgacttgggatgcctgttcgacgggcgctctgcagttgatggaggaagcaagggtggcgtaggtgtggcggatttcagtttgtttgaagcaggtgatggtcagctgaaggatgttctttcggatatggaagaggggatacaacctccaacgataatcagtgtgtgcaattgattctgagacctatgcgtggcgtgcgacaagtgtcctgtctttgggtatacttggtttgtccaatgccacggtgccactgctgcgagtcagctgaacttcttgtagaaagcacatggcagcttggcattagacaagtgtgttggtgttccttaattctttggatatgctttaggcattgactaaccttaagggttcgtcactgtctcgcttagcttagattagactaatcacatccttgaatctgaagtagttgtgcagtatcacagtttcacatggcaattctgccaatgcagcatagatttgttcgtttgaacagctgtaactgtaaccctatagctccagattaaggaacagtttgtttttcatcc

SEQ ID NO: 27267 - DNA, 2133 bp, Zea mays
  Clone ID: LIB4729-032-D1_FLI
ccgggaaacaggcacagccctcccctcctccactcctcgccctctctctctctctctctctcatcccgtcccgagaagcggacaaagcgcggcgctgcagatttcgatccggttcccaatgcctcccatgctcgccgtcgccccgtgctagctcctctcccgtctccgcttcctccacctgccgcgccagcgccacgccgcctggatccggcgagcgcgtggccgggagcctcagatccgagcgaaacccagccttcccgtggtgacggccttcgctctagctccagattggctggcggctgccattcctcctcctcctcttctcgctcgaggtttcaaggcgggtccgttcagctctgtgctggcgtgacagtggaaaggcttactgttgccatggtattggtgtgacgacccgtcaaggtttcgcgcaagatgtggaagcagctcctcagcaagctgccccggaagtcgccggcctgcggggattcgggccagtgcagcaatggcaccggtatacagcgcaccagcagctgcgggagcatcccgcccggccgcccggcctccgccatccggcgcatgtcttccgcggtcttcccctcgagtgtcgtggccggtatcgagccgctggtctcgttcaaggatgtccccaactcggagaagcagaacctgttcgtcagcaagctgagcctgtgctgcgtcgtcttcgatttctcggacccgaacaagagctcagtggagaaggatatcaagaggcaggcattgctggatcttatagagtttgtcgagtcgaccaacgctcgcttctcggaggcagccatcgcggcctgctctaggatgtgtgccatcaacctgttccgggcgttccctccgagttgcagatctggctcatcaggtggtggtgagggcgacgaggaagagccaatgttcgaccccgcgtggtgccacctgcagcttgtttatgagctgctgctgaaatttatcggatcctcgtccttggacgcgaaggtagggaagaagcactttgatcactcattcatcgtgaagctccttaatcttcttgactccgaggatccaagagagagggattgcttgaaaactattctgcacagggtatacgggaagttcatggtacaccgtcctttcatccgcaaagcagtgagcaacatattctaccagtttgtctttgagactgatcggcacaatgggatcgcggagctgctggaggtctttggcagtgtcattagtgggtttgccttgcctctgaaagaagaacacaagatctttctttggagagttctgattcctttacacaaaccaaaatctgttggggtgtatcttcagcagttgacctactgtgtaacacagtttctggaaaaggacccaaagcttgcaagctcagtgatcattggtttgttaagatattggccgataacaaactgtcagaaggaagtgatgtttctcagtgagattgaagagatcttggagtctaccagccaagcagaatttcagaaatgtatggtaccattgtttcggcgaattgctcattgtattaccagttcccacttccaggttgctggaagagcgctcttcgtatggaacaatgatcacattatcagcttgattgcacaaaaccgccaagtgatcatgcctcttgttgttccagcgctagagcagaacattcagaatcactggaaccaggcggtcctgaatctgaccgtgaatgtcaagaaaatgttatctgagatggacgacgatctcttctcgtcatgcctggccaagtacaaggacgaagaagaaaaacgcgcgtcgctagaagcgaagcgtagacttacgtgggagaagctcgagtcagctgcagctttccagccagtgactggccatacagccgtcctagtaggccaccggccgtcagcaaatctgatcgccaccatgatctagctcatgcatgtatgccgaacaagcgaaggtggtgctctcccccccttttggtgaggcgcagcaagtgtagtgttctctattttgctcctgtttattattattattttccttttgctggcatgggtaatcagtgtagtagtaagttgtaactatttccggatgtttatgttcttaaggcaaggatacctgtaactg

SEQ ID NO: 27268 - DNA, 1653 bp, Zea mays
  Clone ID: LIB4729-032-E1_FLI
ccgggacccgaagcacatcccgtcgcatcccatcccactaccacccatctcgtcgtccgccgattcgatccggttcttccaacccaggggcagtgatggcgacgaagaggagcgtgggcaccctcggcgaggcggatctgaaggggaagaaggtgttcgtgcgcgccgacctcaacgtcccgctcgacgatgcccagaagatcaccgacgacacccgcatccgcgcctccgtccccaccatcaagttcctcctcgagaagggcgccaaggtcatcctcgccagccacctgggtcgtccaaaaggtgtcaccccaaagtacagcttgaagcctcttgttccacgcttgtctgagctccttggagttgaagtcgtgatggccaatgattgcattggtgaagaagttgagaagttggctgccgctttgccagaaggtggagttctgctcctagagaatgttagattctacaaggaggaagagaagaacgaacctgagtttgctaagaagctagcatctgttgctgacctttatgtcaatgatgcttttggcacggcacacagagctcatgcttcaaccgaaggagttaccaagtatttgaagcctgctgttgccggcttcctcatgcagaaggaacttgactaccttgttggagctgttgccaacccaaagaagccatttgccgctattgttggtggatccaaggtctcaagtaagattggtgtcattgagtccttgctggcgaaggtcgatatcctcatccttggtggtggtatgatctacacattttacaaggcacaaggatattctgttggaaaatctctcgtggaagaggataaacttgagctcgcaacttctcttattgagaaggcgaaggcaaagggggtttctcttttgcttcccactgatattgtagtagcggacaagtttgcagctgatgctgagagcaagattgtccctgccactgctatccctgatgactggatgggtcttgatgttggccctgatgccaccaaaacattcaacgaagcattggacaccaccaagactgttatttggaacggccccatgggagtgtttgagttcgagaagtttgcagctggcactgaggcgattgccaagaagctagctgagcttacaaccacgaagggtgtcactaccatcatcggcggcggcgactctgttgctgctgtcgagaaggctgggctggccgacaagatgagccacatttcgaccggcggcggtgcgagcttggaactcttggaaggcaagactctacctggtgtccttgccctcgatgacgcctagatccgctgctgctgctgctactcaggttctgccagctttgcgtgtcatcttgtttcggaccttggtgtagcactgcaaggctaaggtttactcctccgcacatggacttttggggataggcttgccaccgtgttttgctagatgagtcgtggaataagcttttacttcctcgctgctgtgggtgaagtgactggaattcggaaatttggaactaacaaaaccccccgtggatttgtatgatatgttttgttcgacagtttgcgtcccatctttcactgtggtatctggtatggtatgttttgttctgacagtttgcattcctgtgttgccgttgctattcgttcctgct

SEQ ID NO: 27269 - DNA, 1678 bp, Zea mays
  Clone ID: LIB4729-032-G5_FLI
ggttctgccgtctacgcctccaatttggcctctctcccttgcaagtttaagcttcatcttcagccatgggtaaggagaagtcccacatcaacattgtggtcattggccacgtcgactctggcaagtcgaccaccaccggccacctgatctacaagcttggaggcattgacaagcgtgtaatagagaggtttgagaaggaggctgctgagatgaacaagcggtccttcaagtatgcttgggtgctcgacaagctcaaggctgagcgtgagaggggtatcaccattgatattgctctgtggaagtttgagaccaccaagtattactgcaccgtcattgatgcccctggacaccgtgacttcatcaagaacatgatcactggtacctcccaggctgactgtgctgtccttatcattgactccaccactggtggttttgaggctggtatctccaaggatggccagacccgtgagcatgctctccttgcgttcactcttggagtgaaacagatgatttgctgctgcaacaagatggatgcaacgactcccaaataccccaaggcgcgttatgatgagattgtgaaggaagtctcatcctacctcaagaaagttgggtacaaccctgataagattgcctatgtccccatctctggttttgagggcgacaacatgattgagaggtccaccaaccttgactggtacaaaggcccgaccctgcttgaggctcttgaccagatcaccgagcccaagagaccttcggacaagcccctgcgtctccccctgcaggatgtgtacaagattggtggtattggaactgtaccggttggtcgtgtggagactggtgtcatcaagcctggtatggttgtcaccttcggtccaactggcctgactactgaggtgaagtctgttgagatgcaccacgaggctcttcaggaggcccttcctggtgacaatgttggcttcaacgtgaagaacgttgctgtgaaggatctcaagcgtggttttgtggcctcaaactccaaggatgaccctgccaaggaggctgccagcttcacgtcccaggtcatcatcatgaaccaccctgggcagataggcaatggctatgccccagtgctggactgccacacctcccacattgctgtcaagtttgctgaactcattaccaagatcgacaggcggtctggcaaggagcttgagaaggagcccaagttcctgaagaacggtgatgctggtatggtgaagatgattcccaccaagcccatggtggtggagacattctcgcagtatcctccccttggtaggtttgctgtccgcgacatgaggcagacagttgctgttggagtcatcaagagtgtggagaagaaggacccgaccggcgccaaggttaccaaggcagctgccaaaaagaaatgatgcaacctgtcgttaatcctgtatctgcttttgcaatacctgacttgtcactccatcccgaagttttgtatgcggttgttactgttattgtgtactgttaagctctgctgcggcgtgccctgttgtttgggtagcgtcaacgtcgagcgccacttgcgggtgtgcctttgtctgctatcagtagcggcaaaaattgaaagctctcgagacttatgtcccttttgggcgccgttgaactgattattttaaagtctgcccacatttttctg

SEQ ID NO: 27270 - DNA, 584 bp, Zea mays
  Clone ID: LIB4729-032-H10_FLI
aaaaaaaaaaaaaaaattcccgccgccgccgccacttgctcgcctttgccccttctgtctcccttcgtccgtagcagaccaggaaccaagatggtgctgcaaaacgacattgacttactcaatccaccggcagagcttgagaagctaaagcacaagaagaagcggctagtccagtcccccaactccttcttcatggatgtcaagtgccagggctgtttcagcataaccactgtgttcagccactcccagactgtggttgtgtgcccaggctgccaaactgttctgtgccaacctaccggtgggaaggccaggctcaccgaggggtgctccttccgtcgcaagggcgattaggtcctgcttctcttaacgtgagaagagataaatttggtgttttgcaactttctcaggatatgtactcggtgaggattttgttaattattatggctgttagcgtggcctgacaatgcttgtgtaaacctgcactttgtttgagcgtagtgacagctaatatggtgctgtttggcttttgctgagggagtggcaatgcaaatgaaatcaactggtggcgttatttgtcagggtcg

SEQ ID NO: 27271 - DNA, 2290 bp, Zea mays
  Clone ID: LIB4729-033-E1_FLI
ccgggatttcgtgtccgcatttcccactacccgcctcgctctgctccccagatccctcttccctctccgctcccccacgtcatctagtcgccgcccccgctcaccgattgtcctctgctgtggagcgagcaagcagcggcgaagcgatggaggaggagatcagaaaggagttccagagtaacggcttctccatcggaggagccggccccgaggacgccgcccagatcctctccacgctgctgacctactgcatcaactacaagatgagccccgcggatctcgtctcaaactgggaggtctactacctcaataggcaattggatggcttaaagctcgaaagctcgtatcttgatggttttctgtcacaccttcagaatgaagttaaagacaggataataaaagaagaagctaaccttcacatttactccagtaacgatgttgacatgctcttaagcaattcacatgtagatgaagcagcattccatgacacaccaggctatgaacaggaaaaggcacctgaaggatcatctatctctgagttaactcctcgggcaagtgacagaccatcatccagcagagtggccaaaacaaatgctgatcgtattaccccttttgcaacacgagtaaataaatttacccaacagtatgttctcaatgctgataacgcagttagtgtgccaagtaaaaatgctgaaatcacagaagatgaaataattagaagagttcaacctagtcaaagatgttacttacaagttcagcgctcacagcctgaaccaggttgcagattcatgtatgacagaatggaagacagatttaattacttggaagatcggatacggaaatcggcgagcttgttttctgcatctggattttgtggacaacctgcagatgctacccttgcttcagaggagaaaatgtttgcagtcggtacagtagcctgtgacggggaaggtcatttgaatgaaaagtctatcttgctacagggcagtgttgaacactccagggggcagtgtgtgcgccttgatttgaaggatcttgatcacttctctttgtttcctgggcaggttgtgggtattgaaggccacaatcccagtggacactgttttgttgcatcaaaattatttgattccataccggtctctgtggatgctcaacttcccagtgctaagaaacaagctattgataatgaaagcaaccaaaattctgacgctggcactctgtcaagagcattgtcatcgatcatcgcagcaggtccctatacaacaaccgataatatgttgtttgagccacttcaagaacttctttcatatgcttgtcgaaagccgcctcagcttctcatattgatgggacccttcattgactctgatcatcctgacataaaaaagggaactattgaccagagctttcatgacatttttcattttgaagttctgagaaagattcaagactttacccagtatctggggaacaccgttcgtgtaattctcattccatctgtgcgagatgctcaccatgactttgttttccctcagcctgcatttgatttgaatttgctagaagataccacccatcagattacttctctggcaaatccatgtctcttcggttccaacgagataaattttggctgttgtacagtggacattctgaaacagctcagtggccaagaaatttctcgcaagccacctggcggaaagcctggagacaggattggtagacttgcctcacacatactaaagcagcaaagttactaccctctatatcctcctgcccccggtgtgccgttagacttgtcactcgctaaggaagcgctggagatcccatcagcgccagatgttctcctccttccttctgatctcgcaccatttgtgaaggtgctctcccttggagaaggtagcgacgacgacagacggtttatctgtgtgaaccctgggaggttggcgaagggtattggcgggggcacatttgtggagctttactacaacgagggcatcgacaagaccaatgcctccatcatccgcatataggatcgctgaaactagggtgcgccgcagaaaatcacgtacgtagtttttgagctcggaaaatccatctcagcgtttgttatcccaggaagtgttgcttaacatgtggcatctccgctgcaaccgagtacctggactgaaatgttcatgttatcgtcaactaacaactgacctggtttacttcaggccctactgtataattacaggaattggttggtccatctttgctgttttccacagcattcttatggtaaaattattactgg

SEQ ID NO: 27272 - DNA, 1670 bp, Zea mays
  Clone ID: LIB4729-034-B8_FLI
ccgggatcgcttcagctcggcgtcttcacaaacgccggcgcaaactctcgcccgagcccgacaagatcttcaattccccattccgcccaccgatcgaccttcacgccagtctcggtctcttccgaaggcgtcgcgcgcggttgtttgagaggagaggaggaagatgagggagtgcatctccgtccacatcgggcaggccggcatccaagtcggcaacgcgtgctgggaactttactgcctcgagcacggcatccagcctgatggccaagtgcctggagataagaccgcgggacatcacgatgatgccttcagcaccttcttcagccagactggtgctgggaagcacgttccccgtgcaatcttcgttgatctagaacccactgtgatcgatgaggtgcgcactggcacgtaccgccagctcttccaccctgagcagctcatcagtggcaaggaggatgcagctaacaatttcgcccgtggccattacacaattggcaaggagattgttgatctgtgccttgaccgtatccgcaagcttgctgacaactgcaccggcctccagggcttcctggtcttcaatgccgttggtggtggcaccggctctggccttggttctctcctccttgagcgcctgtctgtggagtacggcaagaaatccaagctgggcttcactgtgtacccatctccccaggtgtcaacctctgttgtggagccttacaacagcgtcctctccactcactcactcctggagcacactgatgtctctatcctgctcgacaacgaggccatctatgacatctgcaggcgctccctcgacattgagaggcccaactactccaacctgaatcgccttgtgtctcaggtgatctcatctctgactgcttccctgaggttcgatggtgccctcaatgtggatgtgaacgagttccagaccaacctggttccttacccgaggatccacttcatgctctcctcctacgcaccggtgatctcttctgcgaaggccttccacgagcagctgtctgtggcggagatcaccagcagcgcgttcgagccggcttccatgatggtcaagtgcgacccacggcacggcaagtacatggcttgctgcctgatgtaccgcggcgacgtggtgcccaaggacgtgaacgccgcggtggccaccatcaagacgaagcgcaccatccagttcgtggactggtgcccgacggggttcaagtgcggcatcaactaccaggcgccaacagtggtgccgggtgccgacctcgccaaggtgcagcgcgcggtgtgcatgatctccaactccaccagcgtcgtcgaggtgttctcccgcatcaacagcaagttcgacctcatgtacgccaagcgcgcgttcgtgcactggtacgtcggcgagggcatggaggagggggagttctccgaggcacgcgaggacctggccgccctggagaaggactacgaggaggtcgccgcagagggcggcagtgatgacggtgacgaggaggaggaatactgatctgcttgcatgaatctgtttggctgtcgagccaggttgtggtgttgaaaaacctttgtttgtgtcctgggtaatgtttgggtgtttccttccatcatcgcttgctgaactgctctagtattcgcatttgtaattgaagtctgtcgctttaagc

SEQ ID NO: 27273 - DNA, 644 bp, Zea mays
  Clone ID: LIB4729-034-G3_FLI
gaggccggccgggaccgcaatcttcaatctccccagcaatccctagcagaagccttccatcctcactcgctcgatggcccgcacgaagcagacggcgaggaagtccaccggcggcaaggcgccgaggaagcagctggcgactaaggcggcccgcaagtctgcccctgcgaccggcggagttaagaagccccaccgcttccgccccggcaccgtcgcgctccgggagatccgcaagtaccagaagagcacggagctgctgatccgcaagctgccgttccagcgcctggtgcgggagatcgcgcaggacttcaagaccgacctacgcttccagagctccgctgtctccgcgctgcaggaggcggctgaggcctaccttgtcgggctcttcgaggacaccaacctctgcgccatccacgccaagcgcgtcaccatcatgcccaaggacatccagcttgcccgccgcatccgcggggagagggcctaagcgtcatattctctgtcatcagtgcccgatcagaagatgtagagatgtgctgggttctgtagtttgggttactgtcgaatcatcgagtagttggttgttcactgctgtaacttaattatcatgatgcatatgaaatggcaatgagctctgttatcacttc

SEQ ID NO: 27274 - DNA, 723 bp, Zea mays
  Clone ID: LIB4729-036-C8_FLI
ccgggagccaaaaaaaaaagaataaatcggaaaagcaagagacgccgaaaattcgaagggggaagaggagaagaggggaaagaagcaaatggcggagtccccgagcaagatcgaatccatgaggaagtgggtcgtcgagcacaagctccgagccgtaggttgcctctggctaggtgggatcagcagttcgatcgcatacaactggtcgcggcccaatatgaagactagcgtcaagatcatccacgcaaggttgcatgcgcaggctctaaccctagctgcattagttggttctgcatgcgtggagtactacgaccagaagtatggttcttctgggccaaaggtggacaagtacacaagccaatatctggcccattcgcataaagattaaggtccccatgttggttcatctcttggtgctcatgacccgcccgtggatgctggatgtttattctttttgtcttcttactttaaaaatggtgtacttgccagagaaatgataatgggggatataatgcagatattatcatcataatttagcgttatgttgcattgtctaaccgctctgttgactctcagcatcttcgaatattctttttatattttttgagaaaaggaaagaagatcctgatttgttgttagattattgtgtgtattagtgatgtaacgggccttggtctagcccaggtactcttatagatgaatgcactaacaaattgctgtgct

SEQ ID NO: 27275 - DNA, 770 bp, Zea mays
  Clone ID: LIB4729-037-A5_FLI
ccgggtcaccggccaccgcgaagccagagccccacgccccgtccgaactccgaaccccagaacagagcaaagcctcctcggcctccctgtccccagccttccccgatggcccgcacgaagcagacggcgcgcaagtcgacgggcggcaaggcgccgcggaagcagctggcgacgaaggcggcgcgcaagtcggcgcgctgcgcgagatccgcaagtaccagaagagcacggagttgctgatccgcaagctcccgttccagcgtctggtccgcgagatcgcgcaggacttcaagacggacctccggttccagtcctccgccgtcgccgcgctgcaggaggccgccgaggcctacctggtgggcctcttcgaggacaccaacctctgtgccatccacgccaagcgcgtcaccatcatgcccaaggacatccagctcgcgcgccgcatccgcggcgagcgcgcctaggcggttcggttgcggcgcctgctcgctactgatggaggtgcttagtttagcacgtcatggttgtgttataggtgtgcgttgttgttttcaagaggtagcttcttgctatgtgctgatgttaacggaggattatgattagcagttctgaaaaaaatgtaatggatgtgatctgctctatctacatgttttctgtctttgtcctggaatcccatggtgtttagcattgatttcacatgtcttgtttttctctgaatcctgcttgtaatgacatcgacatctgttacacgatctgcttcaatttgtttt

SEQ ID NO: 27276 - DNA, 1014 bp, Zea mays
  Clone ID: LIB4729-038-H3_FLI
ccgggaacccctcacactcccatccagccgccaccaggtgcagagtctttcgtcatctcttctccggcgaagaacccccagtcgcccaccagatcacttgttaaactttgttgaggggtgatggcggtttctttcgcaaacctcaactccgaggcagggcttaaaaagcttgatgagtaccttctcactcgcagctacatcactggctaccaagcttccaaggatgacttggctgtctacacttcgttttcggctgctccctcgtccaagtatatcaacgtagcaaggtggtttaaccacattgatgcgctcgtgaggctgagcggaattactgcagagggccaaggtgtgaaggttgaatcctcagcagttccttcagccccaactccagatgttgctgaagcacaggccccagttgctgaggaggacgacgacgatgatgttgacctttttggtgaggagaccgaagatgagaagaaggctgctgaagagcgtgctgcagctgccaaggcttctggcaagaagaaagaatctgggaagtcatcagttttacttgatgtgaagccatgggacgatgagactgacatggccaagctcgaggaagctgttaggagtgtccagatggaagggctgctctggggcgcatccaagcttgtcccagttggatatggtatcaagaagctgcaaatcatgatgaccatcgtcgacgaccttgtctctgtcgacactctcattgaggactatctgtgcgctgagccagtgaacgagtacgtgcagagctgcgacatagttgccttcaacaagatctaggcgtgacttccgatcagtccttctcctggggtgctggcgatggtggtggctgggcaatgcaccagcctaatttatccatagctatatgtctgctttgtgtggccagtgatattgccgtgagtatttttggatcctattcgagtcgaatgtaccagtaccagagttaatttgctttaattcgaaacaccgttccagttggaatcc

SEQ ID NO: 27277 - DNA, 597 bp, Zea mays
  Clone ID: LIB4729-040-A9_FLI
ggccaggactcggcatagacagacactcgacacaaatcaccagcgcacagcactcctcatcgccacacccgagctcgccctctccttcctcatcgaggcccgagtcctgctttgatggcgaccgacgttgctgagactcccgcgccgctggtggatgcggcccctgaggcgcccgcggacaccccggcggcgcctgctgttgacgcgaagccggccaaggccaagaaggccacagcgccgaagaagcgcgccagcccgacccatccgccgtacgccgagatggtctcggaggcgatcgcgtcgctcaaggagaggacggggtccagcagctttgctattgccaagttcttggaggacaagcacaaggacaagctcccgcccaacttccgcaagcttctgaacgttcagctcaagaagctcgtcgccggcggcaagctgaccaaggtgaagaactcgtacaagctgtcgtccgccaccaagccaaaggccgccccgaagaagaccaagaccggcgtgaagaagcccaaggccgctgccaaaccgaaggccaagtcccccgcgaagcccaagcccgccacaaagcccaaggcggccctc

SEQ ID NO: 27278 - DNA, 755 bp, Zea mays
  Clone ID: LIB4729-040-E11_FLI
ccggccgggaaaagatctaacaaagtataacataatcaactcgcaattccgcattcgttccaactcctgagcactttctcctcgtcccagacaagccaatcgaagccgagatacgaccatggactccaccggcaccggagcagggggtaaggggaagaagggagcggccgggcgcaaggtcggcgggccaaggaagaagtcggtgtcgaggtccgtgaaggccggtctccagttccccgtcggccgcatcgggcgctacttgaagaagggccgctacgcgcagcgtgtcggcaccggcgcccccgtctacctcgccgctgtcctcgaatacctcgccgctgaggttctggagctcgccggtaatgctgccagggacaacaagaagactcgcattattccgcgccacgtgcttctggcgatccggaacgacgaggagcttgggaagctgttgggcggcgtgaccatcgctcacggcggtgtgctccccaatatcaaccctgttctgctgcccaagaagacggcggagaaggcgtccagtggcgggagcaaggaggcaaagtcgctcaagaaggccgccaagtcccctaagaaggcatagactgactgtccggagtgatctgatgtttagcagtaccttgttaccagtatgcggtgatgcgtaggctgcagatgggacgaatgtgcttgtatgtgtatgtgtcctgctgcaagttgtcctttgctatttagaatggaagaagaaatgccttgtttag

SEQ ID NO: 27279 - DNA, 1430 bp, Zea mays
  Clone ID: LIB4729-040-F10_FLI
ccgggaacaacctcgctctatcggcaagtcccgatgggcgatggccggacaagagcatcgctgccggaggatcgtgctgttcccgttgccgttccagggccacatcagtcctatgctccagctcgccgagctgctccatgcgcggggcctcgccgtgacggtcctccacaccggcttcaacgcccccgacgccacgcgccacccggagctcaccttcgtccccatccacgagtcgtcgttccccgacgaggtcacgtccctcggcaccgacatcgtcacgcagctcctggccctgaacgccgcctgcgaggcgcccttccgggaggccctcgcgtcgctgctccgtggtggccaggacgtcgcgtgcgcggtggtcgacgggcagtgctactcggcgctgcgcgcggcacaccggctgggcgtcccggcgctcgtgctgcggacagacagcgccgccacgttcagcagcatgctcgcctacccacggctgcgcgacgccggtttcgttcccgtcaaagaggagaggctggacgagccggtgccggatctcgagcggctccgagcgcgggacctgatccgcgtcgacggcagcgacacggacgcgctgtgcggcttcatcgcccgcgtcgccgacgccgtccgggcctcggcgtccggcgtcgtcatcaacacgttcgagaggatggaggcgtcggagctggccaagatccagcgcgagctgtcccgtccggcgttcgcggtggggccactgcacttgctgtcccaggcaccggcggagcagagcctgcacgcgcccgaccgcggctgcctggcttggctggacgaccacccgccgcgctccgtgctgtacgtgagcttgggaagcgtggcctgcgtcgaccgcggcgcattcgtggagatggcgtgggggcaggcccgcagcggggtgtcgttcctctgggttgtccggccgggcttggtcggcggcgtgccggaggttccgccgctgccagatgggttcagcgaggaggtacggaacagagggaagatcgtctcgtgggcgccacagagagaggtcttggcgcacgccgccactgctgcgttctggacgcactgcggatggaactccacgttggagagcgtttgcgaaggcgtgcccatgcttgtgcagccgtgcttcgcggaccagatggtgaatgcgagatatgtcacgcatgagtggggtgttgggcttgaggttggggaagagattgagaggggcagggtcgccatggcggtgaccaaactgatgaccggggaagacgcagctcagatgagggggagggcttaccatctcaagatacttgcatctgctgctactagtttgcccatagatagcctaatccattacatatcgtccctgtgaactccgaaaatttgtcatgccaaattgtcaaatgctaatatgttgt

SEQ ID NO: 27280 - DNA, 730 bp, Zea mays
  Clone ID: LIB4729-041-A2_FLI
attcgctcctcccgaccgccgccgtcgccgcctcctctccccagcacccggagctcgaccgaacgccgctcaccgtcgacacgccctcccgtcccgagagttctgaatcgaaaccgtcggccacgagagcagtgcgaagcgcccaccgcgatggctcgaaccaagcaccaggccgtgaggaagacgcaggaaagggctgctgggaccgggggaagagcggcgtctggaggtgactcagttaagaagacgaaaccacgccaccgctggcggccagggactgtagcgctgcgggagatcaggaagtaccagaagtccactgaaccgctcatcccctttgcgcctttcgtccgtgtggtgagggagttaaccaatttcgtaacaaacgggaaagtagagcgctataccgcagaagccctccttgcgctgcaagaggcagcagaattccacttgatagaactgtttgaaatggcgaatctgtgtgccatccatgccaagcgtgtcacaatcatgcaaaaggacatacaacttgcaaggcgtatcggaggaaggcgttgggcatgatatataatatccattctgattgcatcattcttgtgaatttgtttgtaggagctagacattagtgttgttgaatgctgcatggttcctaatccttttcgcagtctaacatctgtggagttagtatgttacatggcaacagctgaacatctgtggactataactatatgac

SEQ ID NO: 27281 - DNA, 451 bp, Zea mays
  Clone ID: LIB4729-041-C6_FLI
ccctcgaggccggccggggactgactgcccgctcgtctgtttgaaacgaaggaggaggtacgcacgccgctactgcaagctagcaagaagaggccgctagcagggggttttgcttgatttctggcggacgacatgagcacggccacgggcgtgcggccggggcggcggttcacggtggggcggagcgaggacgccacgcacccggacaccatccgcgccgccatctctgagttcatcgccaccgccatcttcgtcttcgccgccgagggatccgtcctctcgctcgggaagatgtaccacgaccacagcacgatcagcacggcgggcgggctggtggcagtggcgctggcgcacgcgctgggtctggccgtggcggtggcggtggccgtcaacgtctcgggcgggcacgtgaacccggccgtcaccttcggcgcgctcgtcggcggccctc

SEQ ID NO: 27282 - DNA, 1552 bp, Zea mays
  Clone ID: LIB4729-042-D8_FLI
ccgggaacccgaagcacatcccgtcgcatcccatcccactaccacccatctcgtcgtccgccgattcgatccggttcttccaacccaggggcagtgatggcgacgaagaggagcgtgggcaccctcggcgaggcggatctgaaggggaagaaggtgttcgtgcgcgccgacctcaacgtcccgctcgacgatgcccagaagatcaccgacgacacccgcatccgcgcctccgtccccaccatcaagttcctcctcgagaagggcgccaaggtcatcctcgccagccacctgggtcgtccaaaaggtgtcaccccaaagtacagcttgaagcctcttgttccacgcttgtctgagctccttggagttgaagtcgtgatggccaatgattgcattggtgaagaagttgagaagttggctgccgctttgccagaaggtggagttctgctcctagagaatgttagattctacaaggaggaagagaagaacgaacctgagtttgctaagaagctagcatctgttgctgacctttatgtcaatgatgcttttggcacggcacacagagctcatgcttcaaccgaaggagttaccaagtatttgaagcctgctgttgccggcttcctcatgcagaaggaacttgactaccttgttggagctgttgccaacccaaagaagccatttgccgctattgttggtggatccaaggtctcaagtaagattggtgtcattgagtccttgctggcgaaggtcgatatcctcatccttggtggtggtatgatctacacattttacaaggcacaaggatattctgttggaaaatctctcgtggaagaggataaacttgagctcgcaacttctcttattgagaaggcgaaggcaaagggggtttctcttttgcttcccactgatattgtagtagcggacaagtttgcagctgatgctgagagcaagattgtccctgccactgctatccctgatgactggatgggtcttgatgttggccctgatgccaccaaaacattcaacgaagcattggacaccaccaagactgttatttggaacggccccatgggagtgtttgagttcgagaagtttgcagctggcactgaggcgattgccaagaagctagctgagcttacaaccacgaagggtgtcactaccatcatcggcggcggcgactctgttgctgctgtcgagaaggctgggctggccgacaagatgagccacatttcgaccggcggcggtgcgagcttggaactcttggaaggcaagactctacctggtgtccttgccctcgatgacgcctagatccgctgctgctgctgctactcaggttctgccagctttgcgtgtcatcttgtttcggaccttggtgtagcactgcaaggctaaggtttactcctccgcacatggacttttggggataggcttgccaccgtgttttgctagatgagtcgtggaataagcttttacttcctcgctgctgtgggtgaagtgactggaattcggaaatttggaactaacaaaaccccccgtggatttgtatgaaaaaaag

SEQ ID NO: 27283 - DNA, 1151 bp, Zea mays
  Clone ID: LIB4729-042-E3_FLI
ccggggtcttttgtcagttggacaatccgcagctcctccatctcattcttccccccatcccatccccaaggttgaccggcgaaatcagcagtccaagaaccgcgagcttctgcctgatccagcctcatcccgccatggacgagtaagtctcttcccctcgccccttccatggatggatgaaggaacctaatgtttcgtgccctgtctccatccatcccagatctgaggagcacagcaacggcggcgggcacccccacccgcaccacgggtacgagtggaagttcccggcggcgctgagcgcgaacacgacgagcgtgcacgtgacggcgctggacggcgtggtgaacgtgaactcgctgttcacggtggccgtgttcgtggggctgtcgctggcgaccccggggcagctgcggagcctggcgggggacccgcggtgcgacgccggcccgggcgtggcgcggtcgctgctggtgctggaggtggtggccttctcgtccttcctcttctccagcctggtggcgcagggcctgaagctggcgctcaacctcatcaactccaaggacccgcacgacgcggcgcgcgcccacatcgacgcccgcgtgctccgcctcggcatgctcgcctccgccgtcggatccgtcgtcggctgcgtcttcctcatgacgtccatggtcatggtcgtgcaggtccgcctcggcacgctgagctgccccaccgaccgcgccgccgccaaggccgccgcgggcctcgtcggcctcgtcaccaccgcgctcgccttctacgtgggcaccgtcttctacaccttcacccactgatgccagttccatgcgtccgtgcgctgcatcccaaatccatctagcgttgcgttgcgttgcaaagggcacatcgccatcagtggtgtcggtgtgcgaggaaattgaaaggaggacctgcaatctgcgttattactttgatctgatgcgctgttcgtttttgttcgtgactaaagtttagatagtgttggatattagttatgaatattaaatatagacttaattaagtttaataaattcatctgatcttttattttcatatgtgtaattagttttataattaaactacttgtaattgtcatcaaacattcgacagatactaaacttttgattacaacc

SEQ ID NO: 27284 - DNA, 1184 bp, Zea mays
  Clone ID: LIB4729-046-D9_FLI
ccgggacttcgtctatttgcggttctcggcgcaatacatttcccaacacagcgccgtacgcacagcacagtcacggtactccaccgctaaaaccttcggaaagaatccccaaatctcgcacacctcgaagccttcgaggcccgaaaccctagctcctcggcctccccgccgcttccacccatggctccaggactgcagcgcttcactgacattgccgacgacggcacgccccagctcgacgccgcgtccggcgaggagctggtccgtgtggaccgcaccgtggctgtcgcccttggcccccgctcgccggagtccccggggactctgttcgtcaccaccaggagggtgatttggctcagcgaagcggagaagggcaagggctacgcggtggacttcctcgccatctcgcttcacgctgtgtcgcgcgacctcgaggcgtacccctcgccctgtatctacactcagattgaggcagccgttggtgcagaagaggaggctggggaatcaaatcctgaagcaaatgaactagagctatctagagtatctgaaatgaggctcatactagcggaccccggtcaactggatgcactttttgatgtcctctgtcattgtgctgaactgaatcctgaccctaatgctgagtgcaatggggagaatggctggatccgtggtgaaaataatgtctaatggtgactggattcatgatgatgtggacatggttgatgaaaatgtcccgcagtttttcaatgccaatccgataggtcaaaatggtggatatgaccttagtcgttcagtatttgagcttcaaatcaacgaccaacgttttgtggatgcagaggaggaacaggagagccatggaaataatggacattagaaacagagacatgttcctcgagagcatcatgtgatttattttgttgtaaatcactaccgatgcagctcggtttgcctactgtttcatctacactttctcttcctttttccttgatgttataggattaacatcactgggtgactttctggaattgcatcgatggttccttttggtgagaaaaggtcttgctgctggtcaagaatgtaacttgtagagcatgatgttgaatcgtgtgaaattagttcagtacttttgatctaacaaatagaaggtcgaattgggaaaggagatatattatcttttcccttgt

SEQ ID NO: 27285 - DNA, 649 bp, Zea mays
  Clone ID: LIB4729-047-F1_FLI
ccgggaaaaaaaaaaaaaaaaacaccgcaatcttcaatctccccagcaatccctagcagaagccttccatcctcactcgctcgatggcccgcacgaagcagacggcgaggaagtccaccggcggcaaggcgccgaggaagcagctggcgactaaggcggcccgcaagtctgcccctgcgaccggcggagttaagaagccccaccgcttccgccccggcaccgtcgcgctccgggagatccgcaagtaccagaagagcacggagctgctgatccgcaagctgccgttccagcgcctggtgcgggagatcgcgcaggacttcaagaccgacctacgcttccagagctccgctgtctccgcgctgcaggaggcggctgaggcctaccttgtcgggctcttcgaggacaccaacctctgcgccatccacgccaagcgcgtcaccatcatgcccaaggacatccagcttgcccgccgcatccgcggggagagggcctaagcgtcatattctctgtcatcagtgcccgatcagaagatgtagagatgtgctgggttctgtagtttgggttactgtcgaatcatcgagtagttggttgttcactgctgtaacttaattatcatgatgcatatgaaatggcaatgagctctgttacc

SEQ ID NO: 27286 - DNA, 1446 bp, Zea mays
  Clone ID: LIB4729-047-H9_FLI
ccgggctgccttaaccattcctcccaacaccacctcgcctgcgatcttcgtagcctccgtcgcgtcgagcatcgatcatgtcggcctactgcggaaagtacaaggatgagctcatcaagaatgctgcctacattggcacccctggcaagggtatccttgttgctgatgagtccactggcaccattggcaagcgcctttccagcatcaatgtcgagaacgttgaggagaaccgccgtgccctccgtgagctcctattctgctgccctggtgctctccagtacatcagcggtgtgatcctcttcgaggagaccctgtaccagaagaccaaggatggcaagccttttgttgatgtcctcaaggagggaggcgtcctccctggcatcaaggttgacaagggcaccattgaggttgttggcactgataaggagaccaccacccaaggccatgacgaccttggcaagcgctgcgccaagtactacgaggccggtgcccgctttgccaagtggcgcgctgttctcaagattggccccaatgagccatcacagcttgccatcgacctgaacgctcagggtctggctcgctatgccatcatctgccaggagaatggtctggtgccaattgttgagcctgagatccttgttgatggccctcatgacattgatcgctgcgcttacgtcactgagaccgtccttgctgcctgctacaaggcgctcaacgagcaccatgtcctcctggagggtaccctcctgaagcccaacatggtgactccaggctccgactccaagaaggtgactcctgaggtgattgctgagtacaccgtccgtaccctccagaggaccgtccctgctgctgtgcctgctgttgtcttcctctctggtggacagagcgaggaggaggccacccgcaacctcaatgccatgaacaagctcagcaccaagaagccgtggtccctgtctttctccttcggccgtgccctccaggcgagcaccctcaaggcctgggctggcaaggtggagaacttggagaaggctagagctgccttcctcgccaggtgcaaggccaactctgaggctaccctcggcacctacaagggtgatgctgccgccgacaccgagagcctccacgtcagggactacaagtactgagttgcttctctttgcgtgcccgttttggaactcctgcctacgagctaggttgcggagtgtggtttgctcgttagagcttattttcggacatccaaaaaacatgcttcctatgtgggatgatggttatctttatatttgtatgttaattagtctctttgctgttaaatttcgtgtaagttggtcctgccgatggagaatcgagcagccccctttttttgttctatcaactatgctgtaatgctggctatgtatcggcaaaaacaattctatatgctgagttggagtcggcaaaaattcatat

SEQ ID NO: 27287 - DNA, 1596 bp, Zea mays
  Clone ID: LIB4729-049-A2_FLI
ccgggaaaaaaaaaattccttatctaaatttcgtcataggctctacgccgcttctagcgccccgatacgcggcgccggcgcaggcgtgcagccatggcgatgagctggatccgatcggttgttaggagggccctcatcgctccgaagccgcggggctcccgccagtttactgtcaccgccgccggcggcggcgcgacgcagaccgaaagggtggcggcggagatggtccgctacgccctcggcggcgccgtgcaccggagctcgccagaggaggcgatgcggatactggagcaaggcgcctcgaacctgcagggaggaggcgagggcagtgccgaagctgttgggttgctcatgctcgctatgtccacgctgctttaccggagtggaagacgtcaagacgcagtggaaaagctcaaagcaacccaacaagttgccccttctgcagtttttagagttgcagcgtgggaagcactaatgggattacacatggaggcagggcaggagatgtcatacttgatttccccaaatgattcagttgatctgtcaatcaaatatgatagcaaatggtctgatcaggaccatcttaaatttcgggttaatgctgtcagaggacttgttacacttctgaatggagaaacagaatcagctgcccagctgttcgatggttggtgcagagacttttctagaggcgaaaaccaaacagaaaatgctgccgtttcatacggtgaatatttgcattgtgttggggattttcaaatggcagcacaagtgtatgagaaaattctcgaggcattttgcatggatgatatgtctggaaaccttttagcagctggaaacatggttcccgaggaggcttctcttggggccacttgctcatatggccagcttttatctcactctgggaagtttgctgaggcagaggattatctcacaagagctctacagaaggctgaagaacaatttggtgcaaaccacccaaaggtcggcattatattgacctgtgtagctagaatgtacaaactaaaggcaaaatctgaaggttctacttcaattatggtccaggaggggctgtacaggaaggccctagaagtattgaaagcccctgctattaattctgagggtaccagcaaacaggttgactggagagatatcatctccctcgctagaggtgagtacgcggagctgttattaattcagtctaataggaaggcggagggtgaacggatgaagcagtgggcagaagatgcttggaggaaccgtaggctaacgctagcacaagctctagagttttcagaaccttcaaagccgactgtcgttgttgacacccgaatcggcagggtcgtgtagcttcagtcaacaatctcgtgagatgcacaaatgaagcaatccgtggatgcacctcgtgtcgtgtatattttcgaaagtgttgctccttgcgggctgcatccggtttgatccgttcaagtcccagcacactcgcctgcttgtttttcatatcacctttttgaatagggggacattcgaggatcacaaagcttgtgcatgtgatcactttaaacatttaatagcatatgtatatgttattgtacacagaat

SEQ ID NO: 27288 - DNA, 1301 bp, Zea mays
  Clone ID: LIB4729-049-G12_FLI
ccgggtggaaggggcatgcagaggagagcaacgcaagcaagcaattgtcaaccgactctatcttagctctctttgcaagccagtaggtcaccactcaaaagcttgtgaagctggtgagatgggcaaggaggtggatgtgtccactctggaggccggcggcgttcgtgaccgtgactacgcggaccctccgccggcaccgctgatcgacatcgacgagctcgggaagtggtccctgtaccgcgccgtgatcgccgagttcgtggccacgctgctgttcctgtacatcacggtggccacggtgatcgggtacaagcaccagacggacgcgtcggcgtcggggcccgacgcggcgtgcggcggcgtgggcatcctgggcatcgcgtgggcgttcggcggcatgatcttcatcctcgtctactgcaccgccggcatctcgggcggccacatcaacccggccgtcacgttcggcctcttcctggcgcgcaaggtctccctggtgcgcgcgctgctgtacatggccgcgcagagcctcggcgccgtctgcggcgtcgcgctcgtcaagggcttccagagcgggttctacgcgcgctacggcggcggcgccaatgaggtcagcgccgggtactccaccggcacggggcttgccgccgagatcatcggcaccttcgtgctcgtctacaccgtcttctccgccaccgaccccaagcgcaacgctcgcgactcccacgttccggtgctggcgccgcttccgatcgggttcgctgtgttcatggtgcacctggcgacgatcccgatcactggcactggtatcaacccggcgaggagcctcggcgccgccgtcgtgtacaacaacagcaaagcctggagcgaccagtggatcttctgggtgggcccgttcatcggagcggcgatcgcagcgctataccaccagatcgtcctccgcgccagcgccagggggtacggctccttccggagcaacgcctaggaccatctcgtcggcgggctattcagctcttcctcctccgcagtttaaggtgaacggaggagagcgcgagggggtacggctccttccggagcaacgcctaggctcacctcgcctttgccccccgtccatccacagcagcagtagctttcattcaggtcaagtgttgcagctgccggcaacggtagctagcgcaggcgtttgtgagtttgtgtgcggtgtggaaagcaagtgtgacttggtcagcgtctgtgtgtcctgttgggttgcagtcaatctaacttaataaagatggacgaatgcaagtgattattacggg

SEQ ID NO: 27289 - DNA, 1880 bp, Zea mays
  Clone ID: LIB4729-050-C1_FLI
ccgggcccttcgcacaatcgtactgttcccctcaaaccccagccagccatggcgatcgcggcggattctgccgccgatcaagacccaaaccctatacccaacgaggccgcgggcgaatccgtcgagctacccgcgtacactgaccacggggaacccaatgcggatcttgctgacgtggactacgaggatgaagaggagctggacggggtgacggcggaagcggcggcgagagacaaggtggaggcagtgttccagcggctgtcggaagcccccgttggcatccgcgtccacgacattatcatcaaaggcaacaccaagacccgcgacgcgctcatcgaggcggaggtcgtggggctcatccgctccgccgtcaccgtgcaggacctggtgcgcaccgccaacatcgccgccgtgcggctcaggctcctcgacgtgtttgactccgtccacgtcctcctggatgctggccctcccgagctgcctggcaccactaacgttataatccaagtcgtcgaggctgctaaccccatcgatggaagcgtcggctgcttctccaagccggaggcaaggtcatggacagttgaaggatcagtcagatggaggaacatatttggttatggtgacatctgggatgcttcgggagcatatgggtgggaccagtcatcagagataagcattggagtatccttaccaagatttagatcgataccaaccccctcgactgctcgggcatcactcttgtctcatgactggctgaaattttcatcatacaaggaacgtctgcttggcctatcctttggtttgctttcggacatgcaccatgatttatcttacaatctgacttggcgtaccttgactgatccttcacaatcggcatcaaaatccataacaagacagttaggacataaccttctttctgcattaagatatacatatacaatagatcaaagggattcccatctcaggccaaccaaaggatatgcatttgtctcaacttcccaagttagtggtctatggggcagcaaaggattgagattcttccgccaggagtttgatattcgcggggctgttccattgggcttttacaatgctgccctaaatgctggcatctcagcaggggtgattttaccgttggggagggggtttatggaatcaccttcatctgtacctgatagatttttcctgggagggcattcttctccagtaatcagtctttgtagtttaacttccctactgggtttcaaaacaagaggagttgggccaacagaactacggagaattgtcccaagtgaatctgtgacaaatgaatccacagcctctccaggatgggactatttgggaggtgatttcgcagtttctgcatttgctgatctatcctttgatttgcccttaaagttattccaggatgctggcatacatggccatgcattcctatctgctggaaatctcgccaagttgtccgagggtgagttcagaaatttctcgttttccaagttcgggcgcacatttaggagctcagctggtgttggcattatcttacccactaagcttcttcgtgcggagataaactaccgttatatactgaagcagtttgagcgtgatcgtggaaagactgggattcagttcagtttttcgtctccaatgtagatgtcatgtttgtggttctccctgactatgaacaatgcaatgcttaatcgtgctgagcatttccgctcgttctattttggttctggctgaatcatctttttaactaactaggagtccagcaaatccatatccagatgattgatcttttgtatcatgctcgttgttgaccattagaactggaagagttgccttgctgacggttattgtgaactgtgatggtttcatggtcgact

SEQ ID NO: 27290 - DNA, 2398 bp, Zea mays
  Clone ID: LIB4729-053-C9_FLI
ccggggccggcaactgccagttgggggttttttaggacaaagggagcaaaaagaaaaaaacgaacaccttcctgagcttaagacagcatggatcagtacgaggtgctggagcagatcggcaaaggagcatttggctctgctctgctggtcaggcacaagctggagaggaagaagtatgtgttgaaaaagatccgtcttgcgcgtcagacagaccgcactcgccggtccgcccaccaagagatgcagctcattgctaatgtgaggaatccattcattgtggagcacaaggattcatgggtggataagggttgctacgtctgcattgttatagggtactgcgagggaggagacatggctgaagctattaaaagggctaatgatacccacttttctgaggagaagctttgccagtggctagtgcagcttctcatggcccttgactatttgcatgcacatcacattcttcaccgtgatgtgaagtgctcgaatatatttctcactagggaccaaaacataagactcggtgactttggtctcgcaaaaatattgaccgccgatgatctggcatcctcgattgtaggaacaccaagttacatgtgcccagaactcctcgccgatataccttatggtaccaaatctgatatttggtcactaggatgctgcatgtatgaaatggctgcgctcaaacctgcttttagagcttttgatatgcaaaaccttatcaacaagattaccaagtcgatagtatcacctttgccaacaagatattctggtgcatttcgaagacttgttaggagcatgctacggagaagtccagagcataggcctagtgcagccgaactacttaagcatccacatctggaaccgtacgtcctgcaactccatctgaagtcacacctttctcgcagcatagttcctgttcaccagtctccaagtgagaagaggatgacattcgccgcagagcccgtttgcaggagcaagggcaggaggaactctttaggcagcgaaaggatgatagcagcctttagcaaaccttctcctgatagaagttctgtcagctctattcggagtgtcaaggacgagtacaccgccacacagagtgtcagagagctatccgttgatgacagcatggtcgaggttgccagtaaacccgtggcatcaaggacctcagatgtcatgaggactccgaaggcgactccgtggaagatgatgacgactctgaggaatcggctagaagctccacaagcatcatatgaccatacagagttttcaagaacaccggttgacaagaggaacagccgcgtggcccgcagagcatcgcttcctctgcccgtatttgagaccccgaagcagcgcagcagcatgagcgtcctggagcagctggagtcccccgacgtctccgtgaactcgcctcgcatcgacagaatcgccgagtttccgctagcttcgtgcgaggaccccttgttctcgaccgtgaagccaccgacacccgccagcgccagcgccagcgccacgcctccgttcgtggaccggtccatcaccaaggacaagtgcacggcccagacgctccggtccgcggcccgcgacggtggcaacggcagaagcgaggacggcggcggtttgtcctcgggtcgcaccaccaccacggcagcgtcaagcggtgggacgtcggggtcgttgcagccgaaggggcggttcgacacgacgtcgtaccagcagcgcgcggaggcgctggagggcctgctggagttcagcgcgcagctgctgcagcaggagcggtacgaggagctcggggtcctgctgaggccgttcggccccgacgagatggtgtcccccagggagacggccatctggctcaccaagagcttcaaggaggcgatggccacgggcttgcagcggtggcctccttgcaccggcatggacggatcaggaattcaggatcgcccatcagccttgcaggctgtagacggccggatggcatcgccggtgctggcgtgtgtaggtcaggtaggtaggctatgagaattgagaagagagaggcgttagcgttgacggatcagttgttagttgctgggagtggacacaacaccatctcagtgttggccccccggtttattttgttactatgctagcagttcttagttagttaatggcgctctggctagctagctagtgatgtaccaatgcaacccccccccagcagaattagtagcatcagggagtagcagtagaggtagtgctggaggagtcttgagctaggaaggagaaggggattagtgagatgaaattcctatactgtgatgtagcccaaggatgtaccagtagcttcatatgcatcagtgctgactgctgaagaacattcagacatctatggattcagccattcaggccgattgac

SEQ ID NO: 27291 - DNA, 863 bp, Zea mays
  Clone ID: LIB4729-053-D12_FLI
ccggagatcagatcacaccacagccgcggatagagaaggaaaaatttccccaaaccctagcttcggatctcgatggcgaacccccgcgtcttcttcgacatgaccgtcggcggtgccccagccggccggatcgtgatggagctgtacgccaacgaggtgcccaagaccgcggagaacttccgcgcgctgtgcacgggcgagaagggcgtgggcaagtccgggaagccgctccactacaagggctctaccttccaccgcgtcatcccccagttcatgtgccagggcggcgacttcacccgcggcaacggcaccggcggcgagtccatctacggcgagaagttccccgacgagaagttcgtccgcaagcacaccggccccggggtgctctccatggccaacgccggccccaacaccaacggctctcaattcttcatctgcaccgtggagaccccctggctggatggcaagcacgtcgtcttcggccaggtcgtcgagggcatggaggtcgtcaaggccatcgagaaggtgggctcccgcagcggcgccacctccaaggaggtgaaggtcgctgactgtggccagctctagatctctggtctgtccggctgccctccctccgtcatcgtcgactccgcctgcgtccgtcccttttcatttccttcgatctgaataagatgatggcgatctgagtggtggtcttagttgagtcttcaagtcgtttgtgtctgtgtccctcgcggttttaatttagcggtttaggtgtggatctgtgaatcccgtggcgcctctgcttaatccttgtttcagctgttatgttatgggatccatgataatgctataaaactgaaattccgtttcgtgcg

SEQ ID NO: 27292 - DNA, 1465 bp, Zea mays
  Clone ID: LIB4729-053-F9_FLI
ccgggactccaaatcctcctcccatttgaaaacctcttcttttctcctctcctcgccgcagctcccaccatttccgcagacggacgcttgtccccttcccagcttcccctgaccactccgccgcaggcccgcaagccccgacgccagcggcatgtcccccgccaccaccccgtcgcccgccccagcgtccaagggcgggaagcgcagcctcatgtcgtcactcatggacgccaccgcgctgctccgctcctcctccttcaaggaggactcgtacgtggcggcgtcgctcccggcgtccgagctccgcgcgctcgccgacctgaaggcgctggtggccacccacccggaccccatctccatctggggcgtcccgctgaatccccactcccctcctcccggcgcggcggacgccgccgccgtcgccgacgacgagcgcgccgacgtggtgctcctcaagttcctccgcgcgcgggacttccgcgcgcgcgacgcgcacgcgatgctgctccgctgcgccgcgtggcgcgccgagttcggcgcggacgcggtggtggacgaggagctgggcttcaaggacctggagggcgtggtggcgtacatgcacgggtgggaccgggacgggcaccccgtgtgctacaacgcgtacggcgtgttcaaggacagggccatgtacgagcgcgccttcggcgacggcgaccgcctggcgcgcttcctccgctggcgcgtccaggtgatggagcgcggcgtgcgcgcgctcacgctcaggccccgcggcgtcaacgccatcatacaggtgaccgacctgagggacatgccgaagcgggagctcagagccgccagcaaccagatcctctccctcttccaggacaactacccggagatggtggcgcgcaaggtgttcatcaacgtgccgtggtacttctccgtgctcttctccatggtctcgcccttcctgacggagcgcaccaagagcaagttcgtcatcgctcgcgagggcaacgtcgccgagacactgtacaagttcatccggccggagctggtgccggtgcagtacggcgggctgagccgcgcaggcgagctcgagaacggaccgccgaagcctgcgtccgagttcaccatcaagggtggcgagaaggtgttcctggagatcgacggtatcgaggccggcgcaacgataacgtgggacctcgtcgtcgggggctgggacctggagtacggcgccgagtacgtgccggcggccgacggcagctacaccctctgcgtggagaaggcgaggacggtcccggccacaaccgccgacgccgacgccgggccgctgcacaacgccttcacggctcgggaagccggcaggatggtgctgtccatagacaactccggttcccggaagcggaaggtcgccgcctaccgctacttcgtgcgcaagccgtcagcgtagcgtaggccttgcggttgctgtgctcgtggc

SEQ ID NO: 27293 - DNA, 1961 bp, Zea mays
  Clone ID: LIB4729-053-G10_FLI
ccgggatgccccaatagtgtagtgtagcgacaaggtgcgacaacagggcagctagggagctcactgatcttcctactgttaattcctccgatcttctcagccgctgttctagagtgtcgtcgtgagctcactctcacaataaggagaagatctggtgctgagaaaggggggcaacgagaggagagaagaaagataatcggctcggcatggcctcctccttcaacaacaaaaccagtcactggccgagcatgtttaggtccaagcacgccgctgagccgtggcaggcgcagcctgacatcagcagctcgccgccgtcgctcctctcaggtggcggctctagcagcaccaccaccatcggccgctgcctcaagcaccccctctcaggttactcaggtggcgaggagcggaccccggatccgaagccccggtggaaccccaggccggaacagatccggattctggaggccatcttcaactccggcatggtcaacccgccgcgcgacgagatcccccgcatccgcatgcgcctgcaggagtacggccaggtcggcgacgccaacgtcttctactggttccagaaccgcaagtcccgctccaagaacaagctgcgcaccggacagctggggctgggccttgcgcgcgcgccgggttgcggggccgctgcggcgcccgtcacgctgcagcctttgatcccgaaccaattccagctgctcgcctcgcccgcgcaggcgccagcttcctcgtcctcgtcctcctccgaccgcttctctgggtccagcaagtcggcggcgcagccgatgtccgcgacggcagcggccatggactttccagggccgctcggcgcggcgtgtgcgcagatgtactaccaagcccatcccgtggcgccggtctcggcgccgccagcgcacaaggtgcaggaccctgtagcctccgacgagcccgtcttccagccgtggccacaaggctacttcctgtcggctgccgaggtcgccagcattctcgggggccagtacaggcacaacgtgcccgtgcagcagcagccaccggcggcgttgcctgcgggagcgttcttggggctgtacaacgaggcgacagagccgactgtcactggtcacaggacatgcgcctggggcccggcggggctcgggcagttctggcccgtgggcggcgctgatcaccatcagcaccacaagcacaataccaccgcggcgaccaacaccgtggcaagggacgcggcgcacgagcacgccacgacgctggggttgctgcagtacggcttcgaagctagcgcggccatggagacggcttccgcggcggtgccccttgctgcgtcgccgggaaccgctgcgagcgtggcgacggctgggctcacatctttgcctgcaagtactaatgctgttgtcgtcaactatgatctgctgcaaggactggcagtgcccgggtccgggtccggggccgtcggtgtcagcaccggcggtgcaccgcctgtcgccgttgccgcggcgcccacggcagcgcaggagggcgtcgtcgtagcactgtgcatcacggacagcgtcacgggcaagagcgtggcacacaacgtcgcggctgccaggctcgacgtgagggcgcagttcggcgaggcggccgttctgctccgcgccgtcggcgaccgcggcgggctcgacctcgtgcccgtccccgtcgacgcgttgggctgcacagtggagccgctccagcacggtgccttttactacgtgctggtataacaaattgagcgtacgtgacgcgtgaagaaagctagagttcccggtgtgctgcgcgaaagcgcggatggcgtacgtaggtgttgtgtgccgatttattaagtcctggtttaatttgtctcgtatattatgtatgcttgattgcttgcacagttgcactgaagtgcactaagaacgtaagaactatatcgtattgcaatccctgtgtatcct

SEQ ID NO: 27294 - DNA, 703 bp, Zea mays
  Clone ID: LIB4729-054-C1_FLI
ccgggccttcgctgcgccgccgcctccgacatcgtctcttcgtccccacgagcaaccgataatccgccggcgctgagatgttggtttatcaagacctcctatctggcgacgagctcctgtcggattcattcacctacaaggagctcgagaacggcgtcctgtgggaggtcgagggaaagtgggtcacccaaggtcctgttgatgtagacattggtgccaatccatccgccgagggtggtgaggatgaaagcgttgatgacacagccgtgaaggtggttgatattgttgacacattccgtctacaggagcaacctccttttgacaagaaatcatttgtctcttacataaaaaaatacatcaagaatctcactgctgtgttggagccagagaaagcggatgagttcaaaaagggtgtcgagggtgcaaccaagtttctccttagcaagctgaaggaccttcaattttttgttggtgagagcatgaaggacgaagcgtccgtggtattcgcctattacaaggatggtgccactaatccgacattcctctatttctctcatggtcttaaggagatcaagtgctagattagttacccatgttgggtactatatatgttctattgttatagccacaactatagctgccctgcctgaactgaactcaggttttttttaagaaaaaactgtccaagattggattgcttgtt

SEQ ID NO: 27295 - DNA, 527 bp, Zea mays
  Clone ID: LIB4729-056-B3_FLI
aactactccgtcactttgtttgcaaagctcctcctcgatccatcgatcactgcaccggccggcggcaccgcgcgcgctcgcaggggctagccaacgagacggcagcaatggcggaccgtgaccgcagcggcatctacggcggcgcccacgccacctacgggcagcagcagcagcagggaggaggcgggcgcccgatgggtgagcaggtgaagggcatgctccacgacaaggggccgacggcgtcgcaggcgctgacggtggtgacgctgttcccgctgggcgggctgctgctggtgctgtcggggctggcgctgacggcctccgtggtggggctggccgtggccacgccggtgttcctgatcttcagccccgtgctggtccccgccgcgctgctcatcgggacggccgtcatggggttcctcacgtcgggcgcgctgggcactctggtcactggatgtgttgtgcatgcatcagctgtatgctcgtcgtctgttatggaaaatattggtcaaatgtattctcttgct

SEQ ID NO: 27296 - DNA, 1046 bp, Zea mays
  Clone ID: LIB4729-056-D6_FLI
ccgggaatcccaaggtcatttcggttaatctccacacgcatcacggacacggagacttgccttccttttggtgcggaaaaagaaagagaagtgaaggaggttctcagttggagcggctccctctccccgcgcgcgccaccgcctccgatccgagcagccgcctacagtcaacccattcaacctcaaatgttccttgtgaggtattatgacagaacagcaggaaggtgttagcaagagctcttcctcaagtattagcagcagcactcaggagagtgaggaggaactgaccatcggtacccttataaccgaagtaacaaacacaacaaacagtgccaagagtcttggaaagcgcctttcacacttagattcgatcccgcacactccacgtgttaatgggaaaattccagattttaataatgcgacaattgatcatgaatcattattagaaagattaggcacttatggcttagctgaatatcaaatagaaggagatgggaattgccagttccgagctctggcagaccagatattccgcaatcctgactatcacaaacatgtgaggaaggcggtagtgaagcagctgaaggagttcaggaaacactatgaaggttatgtgccaatggaatataaggtttacttgaagaaaatgaaaaggtctggggaatggggagatcatgtgaccttacaggcagctgcagacaggtttgctgctaaaatatgtctgttgacatcgtttagagacacatgcctagttgagatagtccccagagatgccactccaacaagagagttttggctaagtttctggtgtgaagtacactacaattcattgtatgcagttgaagatcttccaacacggaaaactaagaagaagcactggctgttctagctcgccaggctttggtgatttcttggtatgctattggtcttctctttgtagtccagcagcatctgtagacctgcttagttatgccttcgttaatgttgtaagttgtaacttgacctggaatcaaattcatttaagatcatgcaaaatacagtgagct

SEQ ID NO: 27297 - DNA, 1023 bp, Zea mays
  Clone ID: LIB4729-056-E1_FLI
ccgggaaactccgtttcgaattctagggttttgctgctctccgaccccgagctccgaaggccgcagcatcaggcgaggcccccctcgcgtgtgaccgagatggcgctgccgaatcaggggaccgttgattaccccagcttcaagctcgtcatcgtcggcgatggtggaactggtaaaactacatttgtgaagaggcatctcactggagagtttgagaagaaatatgaaccaaccattggtgtggaagttcatccgttggatttcaccactaactgtggtaagatcaggttctactgctgggataccgcagggcaagagaagtttggtggcctcagggatggatactatatccatggccagtgtgcgatcatcatgtttgatgtaacctcaaggcttacttacaagaatgttcctacgtggcatagggatctgtgcagggtctgtgaaaacatccccattgtcctctgcggtaataaggttgatgtgaagaacaggcaggtcaaagccaagcaggttactttccacaggaagaagaatctgcagtactatgaaatttctgccaagagcaactacaactttgagaaacctttcctgtaccttgcaaggaagctggctggtgatccgaaccttcactttgttgaagctgttgctcttaagcctccggaagttaccatcgacatggctatgcagcagcagcatgaagccgagcttgctgcagcagctgcacaacctcttcctgatgacgatgatgatctgattgagtagaaaggatcatgagtcttggacttgagcaggagttgtgccttgcacgatttaagttgttctagggtggactctctcttgagttatcattgtctggatcatctttttctccttggacttgttgcaacttttgagtgtggaaatggattggaatagtcgccatgaatttgctggctactttatacatgtctttgttcataaaccttgttttaagatgaagttgtggcaatcctcttagtgctaatataatgttctatcgac

SEQ ID NO: 27298 - DNA, 1116 bp, Zea mays
  Clone ID: LIB4729-056-G4_FLI
ccgggctttccctcccagccttcctcctgcgtctcgctctcgccggaggtcaggcgcaccgccgccgggcgatggacgcctcctaccgccgcgccggcaccgggagcggctccgctccccgctccgtcgaggacatctacaaggactaccgctcccgccgctccgccatcctccgcgccctcacccacgacgttgaggagttctacgcgctgtgcgatccagagaaggagaacctgtgcctgtacggctacgcgaacgaagcgtgggaggtagcgctgccggcggaggaggtgcccacggagcttccggagccggcgctcgggatcaacttcgcattctactacgccgcgcggctcaaccgcagtgatcggaagcgtttgttcggcatgatgaatgatctgccaactgtttttgaagtcgtctccagtggtgtgaagcaatcaaaagagagggatagatccggtactgacaatggtggtagaaataaactgtcggtaaagcaaacaagcgagccacgattagaaaataacgccagggagcctgatgagggctacgatgaagatgacagcaaccacagcgaaaccttgtgcgggacatgtggtggaatatacagcgctgatgagttctggatcgggtgcgacgtgtgcgagaagtggtaccatggcaagtgcgtgaagatcacacctgcaaaggcggagagcataaagcagtacaagtgcccaagctgctgcaattcaaaaagacctaggccgatttaggcctatagcatcgccctcctcccgggaggacggccatggatggaagaagactggacaagcaggtcagagtttcctcttgcgcaaggtcaatgccgccttgcgatgtttactgtaccttttcgattaagcttacatatgacgaacgatgatgatgctaatgttagcagggaaagatcacacattaatttataatctttttgtggtttctccatgccgtggagagttatggtagtctgtatgttgccggagaaggaataggggcagaggaagcctttgtaatctttctataggtggaatgtgcagcttatgcgaagataataataatccgtgatgttcatgttaatatattttatttacg

SEQ ID NO: 27299 - DNA, 803 bp, Zea mays
  Clone ID: LIB4729-057-F8_FLI
ccgggtcccctttccccattctacaccttctccacccctcggccctcagccctttttaggggcagttccgtacttgcgcgagctccacgcgccgacgcctggttctagtggtctacagaacaaccggggtccctccctgcgaattcgccgcaagtccaaaggcaaagggcaaagcggaagttgcggttggcctcgtcctcttctccgtcgcggctctgatctctgcgtgcggcgatggcgtcgttctcggaggctccccccgggaacccgaaagccggcgagaagatctttaagaccaagtgcgcgcagtgccacacggtcgacaagggcgccggccacgagcaaggtccaaacttgaacggtctttttgggagacagtctggtaccactgcaggctactcctactctgcgggaaacaaaaacaaggctgtagtctgggaagaagacactttgtatgagtacctgcttaaccctaaaaagtacattcctggaaccaagatggtcttccctgggctgaagaagccgcaggagcgtgctgatctcatcgcgtacctgaaggaagcaactgcatagttcattgacatgcctttgccatgaagagaaaatttgttttgcagtttaataaaaacattttagacaatttgggtcactctgtttgaacagggtgcaaccacgtctcattattttcgttcttatggtgtcggtatggaatgcctaggtgtttagctgtgcacaaataacagttaaactttgacggctcctatttcaactgctggagaaatgccagtgccctatttttgact

SEQ ID NO: 27300 - DNA, 771 bp, Zea mays
  Clone ID: LIB4729-058-B4_FLI
ccgggacttttccggcctcccattcctcgcgcggcgaccacccgattcgaagcgtgcggagagaccgaagaagcgggagagatggctcgtaccaagcagactgctcgcaagtccacgggagggaaggctcccaggaagcagcttgccaccaaggctgcccgtaagtctgcccccaccactggtggagtgaagaagcctcaccgctaccgccctggaactgttgccctccgtgagatccgcaagtatcagaagagcactgagctgctgatcaggaagctgcccttccagaggctcgtcagggaaattgcacaggacttcaaaactgatttgcgtttccagagccatgcggtgcttgccctccaggaggctgctgaggcataccttgttggcctgtttgaggacaccaacctgtgcgccatccatgctaagcgtgtgaccatcatgccaaaggacattcagctggcaaggaggatccgcggcgagagggcctaatcgccacctcaaacatcgtgacaaaaacatgaaggcctggggttattgttaatctggtgccattgtaaggacatatgagtagggtttgttttgtggatcgcaagtttctcttctgctactgttgctgctacctttgctggtgttattgctagggtcgaatacttaagttaactatgcgctgacagtctggactagcagtgttatgtgcgctgctggaccttgcgcgcaatgctgtggccgatttgttcgttaatgtcaagaattgtgttacagtgcgtg

SEQ ID NO: 27301 - DNA, 1047 bp, Zea mays
  Clone ID: LIB4729-058-F7_FLI
ccgggaacactcaacactgcagaaatcagattcggagcttcggggggaaaggcaggcacagtatcgtcgaccatgctgccaggtcgccacccggcgcgccgggccgacaccaccgggacggggccgctcctgccggacgccactcgcgcggtggtggcggagttcgtcgccacagccatgttcgtgttcgccgccgaaggctccgtctacggcctctggaagctgtacaaggacacggcaacgccgggcggcctgctcgcggtggccatcgcgcacacgctggcgctggtggccgcggtggcggtagcgagcaacgcgtcgggtgggcacgtcaaccctgcggtcacgttcggcctgctcgtgggccgccgcatctccttcgggcgtgccgcggtatactggctcgcgcagatgctcggcgccgtggtcgcgtcgttgctgctaacgctcgtctccggcggcacgcgtcccgtgggcttcgggctcgtccgcggcgtccacgagcggcacgcgctcctgctagaggccgtcatgacgttcgggctcatgtacgccgtgtacgccaccgcggtggatcaccggagccggggcggcgcggtcgcgatcgcgcccctcgccatcggcttcgtcctgggcgcgaacatcctcgccggcggcccgttcgacggcgccgcgatgaacccggcgcgggcgttcgggcccgcgctcgtcggctggagctggcgccaccactgggtctactgggtcgggccactgatcggcgccgggctggctggcggcttgtacgagtttgtcatggttgagcaggagcccgaggcgccgctagctgcagttcctcggatgccagtggcctctgaggactactgatgtaggtgtacatgtattgtatccctaccgtttgtattttcactgtgtatcgtatgggtgtaccgtgtatctaggagactaggaccgagcttggcatctgctttagaggcacgtcatagactttttggatattcccaagaacccttactactagatcaaaataaacacagacatgaatcg

SEQ ID NO: 27302 - DNA, 1279 bp, Zea mays
  Clone ID: LIB4729-058-H11_FLI
ccgggtaggccctactcactgtggaccccaaatccccaactgctcctcttcctcgtcgtcttcctctccgtccccgtccccgtccccctctcggcctccccctccactagccccaaatcctccgtctcctcctgtccctctccgcatccaccggaccccaccgggaatggcggtttgagtaagttcccgtaccagggttcttcggtctgggaggccgaggggacaccgggtcggagtgaggggccgccatggcgagcgacgtgcccatgaccccggagctcgagcagatcgacggagagatccacgatatcttccgcgccctccaaaatggattccaaaagatggataagattaaagattcaaataggcaagctaagcaattggaagatcttactgtgaaaatgaaggagtgcaagcgcttgatcaaagagtttgatcgcattctcaaagatgaggagtcaaataatccacctgagatcaacaagcagctaaatgacagaaaacagtccatgatcaaagagttgaattcctatgtcaccttgaggaaaacataccaaagtagccttggtaacaacaataagagggttgagctctttgatatgggtgctggaagtagtgagcctgctgctgaggacaatattcaaatggcatcagccatgacaaatcaacaactcattgatgcgggaaggaaccaaatggaccaaacagatcaagctattgaacgttcaaaaatggtcgtagcacaaactgttgagactggagctcaaactgctgcgacattaacacagcaaacagagcaaatgaagagaattggtaatgagctagatactgtccacttctcactgaagaaagctagccaactagtgaaggagattggtcgccaggttgcgactgacaaatgtatcatggcattcctctttctgatcgttttgggtgtgattgctatcattgttgttaagatcgtccatcccaataacaaaaacattcgagacattccagggctggccccgcctgctcaaaactatcagattcacaacaggagattgttgtgggcagaagcttccataggcctgtgatggctgaatgtaggcttcatgacagctatccatagtaacaattctttgtgcctgtatatctattttgtcttgttaactccgagccctaggtctgtattcctgcgtctggtgtttgtacaccgctggccgtttggctgtgtatatggtacagagatgagatgttaaaaccaaaccagtaattatgacgaatacttgaaagagcg

SEQ ID NO: 27303 - DNA, 835 bp, Zea mays
  Clone ID: LIB4729-059-C11_FLI
ccgggaaaaaaacaccgaaggttcggactgaatgaagcgaaagcccaaatcccattccccttccccctcttcgtctccgtcggtggcgtcggaccgaacccgagcccggagccctaactaaccctaggaggcaggcggcggcggggatggtgtactacgcgctgttggtgggcgcggagctggatggcctcaccaacctgcagccccgccacggctgcgacgaccccaacttcccctactacctcaaaccaaaggtatcttgcaatcacaacgaacaaaagctctcgatctcaccgacaccgaggaagaagagatcaatggcgtccgagcagggagtcgtgatcgcgtgccacagcaaggctgagtttgacgcccacatgaccaaggcccaggaagccggcaagctggtggtcattgacttcactgccgcctggtgcggtccatgccgcgccatcgccccactgttcgtcgaacacgccaagaagttcactcaggtcgtgttcctgaaggtggacgtggacgaagtgaaggaagtcaccgcggcctacgaggtcgaggcgatgccgaccttccacttcgtcaagaacggcaagacggtcgcgaccatcgtgggtgccaggaaggacgagctcctggcccagatcgagaagcatgccgcgcctgcgcctgcgtctgcgtctgcctaaaggagatcagatcagtcgtcgccgtcaataagggccagcacgtatggctgtaaatgttgtcgttatcagttctggctttgtcgtttgtgggcgattgtgaactagtagtatgtttgtttctatccgagccggaggcgatacttaaccac

SEQ ID NO: 27304 - DNA, 883 bp, Zea mays
  Clone ID: LIB4729-060-A3_FLI
ccggggagaaagtgcacggggactctagagtaaatcccggtgctaccggcggcggcggcgacgaatcgagcaggcgcggcggccatggcggcggcggttgagagcgtggtggtggtccataacgtggcgaagcggcacaacgtggggacgctggcgcggagcgcgacggcgttcggcgtcgcggaggtggtcgtcgtcggccgccgcgatgtcagcgcctttggcagccatggcgccacctcgcaccttcgcttccgtcacttcgtctctctcgcgctcgcccgcgcctacctcaaggatgagagaggatgtgacatttgcggcgtggaaatcaccgacgacgcgcagccggtgaccgcccacccgttccgtcggagcactgcgttcctcttcggcaatgagggtactggactttcacaaaaagagtgcgagatctgtgacttctttgtctacatccctcagtatggtggtggaactgcatctctcaacgttactgttgcagcttcaattgttctccaccactttggggtctgggctggctttactgaacgaggccgagagggcaacaaattcgtggtggctgaaagaccacaggggcactcgaggggactttactgtacagactcggttgaagcagtggttgaagagcggaaaatgcgaaaagaaaatgcctgcgatgtactcgaggaaaatgggagcagccatcctcaggaatcaaacggtctagacttgatgtttgcagactagagtatgacaacatgttatcccatctctgatgttaaatctactccctgcatccgcattgatggcacgaagttgcaatacagaacatgacagggcttatgagagagaaatttatcctgacacacatgtatggttcacg

SEQ ID NO: 27305 - DNA, 1922 bp, Zea mays
  Clone ID: LIB4729-061-C10_FLI
ccgttagccgcggccgacacagctcctcctcctcctcgcagctcttctccagctctcggaggcccgaggtttcatcgacccgggctccttcatcctcgacacctcactcacagccgcacttgttgtccttcgtgcgtggggtgcggttcgacgcgggcggcgggatggcggcgagcgcgcgggacagcaccgatgcagcggagcgagttgtggatgaccacgacggctgggcgtcggacgccgagatggacgtggagatggatgtggtggaaggcgatgccgaccggagggacggcggcgcggatggtgatgatgagtacttgctgctcactaggataagggacacatcagcagctgaagcaagggcaggaaaggatatacaaggtataccatgggagaggatacacatagccaggcaagattaccgaaaagctaggttggaacagtataagaactatgaaaatttccctcaatcaggagagctcatggataagctatgcaagcaagtggagaagagcagcaagtattatgaatttcagcacaacactagatcagtgaagccatcaattctccattttcagcttaggaatttgttatgggcaacatcgaagcatgatgtctattttatgtcaaattccacagtaagccactggtcatcattgtctcacaaattatcagaggttcttgacttctctgggcatgttgctccagcggagaagtatcctggcagtttactagaaggtttctctggtgttcaagttagcacacttgctgtgaatgagggtttggtggtagctggtggttttcaaggagaactaattggcaaagatgtggaaggctgtagtgtaaaattctgtatgaggacaactttgagtgacaatgccataacaaatgccatagatatgcacagatcgataagtggaagcctgcacattacagtatctaacaacgattgtggtgttcgtgaatatgatatggagagatatcagctcgtgaaccactaccgatataactggccggttaatcacacatccgtgagcccagataagaaacttttggctgtggttggagatgatcgagatgctcttcttgtggattcacgaaatggaaaggtaacctctaccctagttggccatctggactactcatttgctacggcatggcacccggacagccggacattcgcgaccgggaaccaggacaaaacctgccgcatctgggacacccgcaacttgtcgacctcacttgcagtactgcggggcaacatcggcgcgatccggtgcatccgctactcctccgatgggcggttcctggtgttctcggagcctgccgacttcgtccatgtgtacagtgtggctgcggactacaagaaacggcaggagatcgacttctttggtgaggtgtccgggatcacgctgagcccggacgacgagtccctgttcatcggagtgtgcgaccgcgtctatgccagcctgttgcagtacaggatgatccgcggattcgactatcttgactcatacgtgtgaagaactgagctttggtgaccggtgttgtgctaggtgctggctgaaggttctgatgcgcggttcagggaatatatctgcctgctcttagttcatggcgaatgatggttcggtgggactcgacgccagcgaatctgccgtgtaaatagtttagaatttgaagcgtagtgtagtgctgtggaccaatgctgtctctgaacatacatatgatcagagtaatgtgtgtttgcgctgttagtttcagactccggaatacaaatagttttggaccaaattcctaaagcctgtttgtactgtggaacacatgaaagggctagtttgtattcacttcgatatatgtgttgttattattgagttcctggacagtgtttcaaatttaaacatcgtatttttagatgc

SEQ ID NO: 27306 - DNA, 2873 bp, Zea mays
  Clone ID: LIB4729-061-F11_FLI
ccgggattccactcggtgctttgcccgaggcccggagaagccttatcgcctcctcctcgcacgccgaccgatcgccacaatcccccaccgctcgcctgcctggtgcccgccatgccggagatcaagtgcggcgcggccgagaaggtgaagccggcggcgagcccggaggcggagaagcccgcggacatcgctggcaacatctcctaccacgcgcagtacagcccccacttctcaccgttcgcgttcgggccggagcaggccttctacgccaccgccgagagcgtccgcgaccacctcatccagagatggaacgagacgtacttgcatttccacaagacggatccgaagcagacgtactacctgtccatggagtacctgcagggccgcgcgctcaccaacgccgtcggcaacctcggcatcaccggggcatatgcggaggccgtgaagaagttcggctacgagctcgaggccctcgcggggcaggaaaaagatgcagctctagggaatggcggcttgggtaggcttgcatcttgctttttggattcaatggcaacattgaatttgcctgcttggggctatggcctgcgttaccgatatggactgttcaaacaacacattgccaaggagggccaggaagaagttgcagaagattggcttgataaattcagcccttgggagattcccaggcatgatgtggtgttccctgtcagattttttggccatgttgagattttgcctgatggctctcggaaattggtcggaggagaagtcctgaaggctttagcatatgatgtgccaatccctggatacaagacaaaaaatgcaatcagtcttcgtctttgggaagcaaaagctactgctgaagatttcaacttatttcaattcaatgatggtcaatatgagtcagctgcccaacttcatgctagggctcaacagatatgtgccgttctttatcccggtgatgctacagaagaaggaaagcttctaaggctgaagcagcagtttttcctttgcagcgcatcacttcaggatatgattgccagatttaaagaaaggaaatctgatagagtttcagggaagtggagtgagttccctactaaagttgctgttcaactgaatgacactcaccctactcttgccatccctgagctaatgaggttacttatggatgaggagggacttggttgggatgaagcttgggacattacatataggacaatttcctacaccaatcatacagttctccccgaagctcttgaaaaatggtcacaaatcgtgatgaggaaattacttccccggcacatggaaattattgaggaaattgacaagcggttcaaagaattggtaatctccaaacataaggaaatggagggaaaaatcgattcaatgaaagttttagataattcgaatccccagaagccggtagtgcgcatggcaaatttgtgtgtggtgtcttctcatacggtgaatggagtggctgagttgcatagcaacattttgaagcaagaactatttgcagattatgtctctatatggcctaccaaattccaaaataaaactaatggaatcacgcctcgaagatggctccggttttgtaaccctgagttgagtgaaatagtcacaaaatggctaaagtcagatcagtggacaagtaatcttgatctgctcactggacttcgcaaatttgcagatgatgaaaagcttcatgctgagtgggcagcagccaagttatcttgcaagaagcgcctggccaaacatgtgttggatgtgacaggtgttacgattgatccaactagccttttcgatatacagattaagcgcatacatgagtacaagagacagctcctaaacatattgggagctgtttacagatacaaaaaattaaagggaatgagtgcagaagagaagcagaaggtcacaccgcgcactgtcatgataggagggaaagcgtttgcaacatacactaatgccaaaagaatagtgaaattggcgaatgatgttggtgctgttgtgaacaatgatcccgaagttaacaaatatctgaaggttgtctttatcccaaattacaatgtatcagtggctgaagtgcttattcctggtagcgaattgtcacagcatattagtactgctggtatggaagcaagtggaacaagcaacatgaaattctctctgaatggttgtgttatcattggcacccttgatggagctaatgttgaaataagagaggaggttggagaagataatttcttccttttcggtgccaaagccgatgaagttgctgggctgaggaaggacagagaaaatggcctgttcaaaccagacccacgttttgaagaagccaagcagtttataaggagtggcgcttttggcatctatgactatgaacctctcttggattcccttgaagggaattctggatttgggcgtggtgattatttccttgttggctatgacttcccaagctacatcgatgcacaggaccgggtggatgcagcctacaaggataagaagaagtggaccaagatgtccatcttgaacacagctgggagtggcaaattcagtagcgatcggaccatcgcccagtatgccaaggagatatgggacatcaaggctagccctgtcgtgtgaacgagggggttgcgattcagcaccaaacgtagtttcttggggtgctataatagtaaggaagaataatgacccacggtgcttgacgcccacttgcgttgtaggcatggaacgggggcacctagcttgttctacagcgctgtctattttgaattggtgcgactttgttgctcttttttcctcccccttatatcttatgaaacaagatccttttgatctgtgctctgaaataaaataattcagttatg

SEQ ID NO: 27307 - DNA, 1095 bp, Zea mays
  Clone ID: LIB4729-063-F12_FLI
ccgggctagcccgctacccctgccccttctctcttcgtcgcgcctccgcctccgccgtcgtagcatcctcctccgccacctcggccatggcgacatccccagcgctcctcttcccttctccctcctcggcatcctctgcgccttcgtcggcgcgggtggaggcagtggtgcttttcaacgtctgcgacagctacgtgcggcgcccggaccaggcggaccgcgtcatcggcaccctcctcggttccctcctctccgacggcaccgtccacgtccgcaactcctatgtcgtcccccatccatcttacagtcgacactggcttcactaggggggaggcttccatcaaagcctacatctcatccaatctgtcctcagagatagtcaactcgctgcacaatttcaggaaatccctctggatctgaagatgattgaggcggaaaaggctggatttgagatcctgaaatctactatggtagagaagctccccaatgatctggaaggaatggagtcatcgatggggaagctttacattcttatcgatgagatctacaaatacgtcgatgatgttgtggaaggacgcgtggcacccgacaacagaattggaaggttcatctctgattcttttgcttcggtgccgaaattgtccccggctgctttcgataagcttttcaatgacaagattcaggataaccttgcgctggtatacctgtcaagcatcacaaggacacaaatcagcatcgccgagaagttgaacactgctgctcaagtgctgtaggtttggcggtgtggcatctggtttggacgtggatggcttgatgctatctgtgatgcttggcgtaagtgtgattggtgacagaaatgcatttttgtactcattattattattgctaaatgagagacctgatggaaagggttagccaacgatgagatcccataatgttgccagaatgccagtagagtggtggatggcgagatgtttctgtttggatagtattctgtgctccaggttgaatatttgtaatgctcgttggttttgtgtagcgacacatcggcaatgtggagcaatgaagagatttgctccacattttacgtcgttg

SEQ ID NO: 27308 - DNA, 1518 bp, Zea mays
  Clone ID: LIB4729-063-F8_FLI
ccgggactatcactttcctcttgtttttcttgcctgtctccatactcatcgatcgattgctttttggcgtcagttgcttttgaggagctgagctacaatcaggcaagggatatttccgagatcatagctaggttttacgaggaatgcatcccggaggtggacctctgtcagtgccaccaggcttccgcttccatccgactgatgaggagctcctctactactacctgaggaagaaggttgcttatgagcccatagatcttgatgtcataagggagattgatctcaataaacttgagccctgggatctcaaagaaagatgcaaaataggcactgggcctcagaacgactggtacttcttcagccacaaggacaagaagtacccaacgggaacgagaacgaaccgtgccacgacggcgggattctggaaggcgactggccgagacaaggccatcttccttggcagcgccaggaggatcggcttgagaaagaccctggtgttctacatcggcagggcgccacacgggaagaagactgactggatcatgcacgagtaccgccttgatgaagagaacgttgaaattcaggaagatggatgggtggtatgtagggttttcaagaagaagaactatgagcagagaggccatgacgtggctgagatggtggcactggacgacgaagagctccagcctttcacggttcctgtcgtccctgctggcactagctccctgccaacaacagaccacaagaacaaccctcacctcatgcaatatgacttcccttctttcgacccttccatgcagctcccacagctgatgagcgccgaccagcccgtgccaaccctattccccagccatcctggcgtcgccacggccatgagctcatcaatcgacgttgagtgctcgcagaacctgctgacgatgctgacatccaacggcagcgacgggatgctccacgtccgcgctggtggtgctggagctggtgtcgaccgcttcgctggcacgacagattggtcgatcctagacaagctcctcgcctcgcaccagaacctcgaccagctcttccacggcaaggtcaccgcagcatctgcctccccaatggctccataccatcaacagctcatggaactcggtggctcgtcgtcgtcgtcgtccttgcagaggcttccactgcagtacctcagcggcgagacgaccgatctcctcaggttccccaagtaattattggatcgacctcaagtttagctaccttgttgagcagtgaccatatcaggattttggttgactactgggctgcttaattcggcctacttcgtatggagtttagtgcttttaaatgtatatatggtgcaactgtttggggcatgcaggcatggaatgccatcgatctaccatggttgcttgcttggccaagaggatgtttttgatgtttccattttggcttagggttgctcgttaggttcttttggagaaaaaatgtgaagagatggcccggtcaattaagaacttctatttgtttccc

SEQ ID NO: 27309 - DNA, 1681 bp, Zea mays
  Clone ID: LIB4729-065-F9_FLI
ccgggaaccccgcgctgccgacgccgcactcgcccccggcctcctccgcccgcatccccgatcccgctcgctcgctcgccgccagttgtccagcagctcggatcgtctcatacctcggcgaagatgagagagatcttgcacatccagggagggcaatgtggcaaccagatcggtgccaagttctgggaggtcgtgtgtgacgaacacggcattgacactacaggtcggtacactggcacttctgaccttcagttggagcgcgtcaatgtctactacaatgaggcctcctgtggccgctttgtgccccgtgctgttctcatggacctagagcctgggacaatggacagtgtccgcactggaccctatgggcagatcttccgccctgacaactttgtgtttgggcaatctggtgctggtaacaactgggcgaaggggcattatactgagggcgctgagctcattgactctgttctcgatgttgtgaggaaggaagctgagaactgtgactgcttgcaaggattccaagtatgccactcccttggtggcggtactggatctggtatgggtacgctgttgatctcaaagatcagggaggagtaccctgaccgcatgatgctgacattctcagttttcccctcaccgaaagtatctgatactgtggttgagccatacaacgccactctttctgtccaccagttggttgaaaacgctgatgagtgtatggttcttgacaacgaggccctctacgacatttgcttcaggactcttaagctgaccacccctagctttggtgatttgaaccatttgatctctgcaaccatgagtggagtcacctgctgcctaaggttccctggtcagctgaactccgacctcaggaagctggcagtgaacctaatccccttcccccgcctccacttcttcatggttggcttcgcgccgctgacgtcccgtggctcccagcagtaccgagcactcaccgtccccgagctcacgcagcagatgtgggacgccaagaacatgatgtgcgccgctgaccctcgccacgggcgttacctcaccgcctcggccatgttccgcgggaagatgagcaccaaggaggtcgacgagcagatgatcaacgtgcagaacaagaactcgtcctacttcgtggagtggatccccaacaacgtgaagtccagcgtgtgtgacatcccgccgaggggcctgtccatggcgtccaccttcgtgggcaactcaacttccatccaggagatgttccggagggtgagcgagcagttcactgccatgttcaggaggaaggctttcttgcactggtacacgggcgagggcatggacgagatggagttcaccgaggccgagagcaatatgaatgacctcgtgtcggagtaccagcagtaccaggatgcgactgctgatgacgatgaggaggccgagtatgaggacgaggaggagccagctgatggcatgtgagggaaggctgttaaatgtgaagcctggtggttgcagggaccccgatgagttttgatgtcccctttcgtgttgtcgccatgttatactattacactagcataccaccctcgtggcccattccgtcgatcgttgctgttgatgcttgtgttttccttgttctatagaaccttgcttttggtacggagctgcaatgtggattcgatccttccgg

SEQ ID NO: 27310 - DNA, 1678 bp, Zea mays
  Clone ID: LIB4729-065-H9_FLI
ccggagtgccacacatccatccccgttcgcctcttctcctccctcctgccgggtccttaataaagagcagcagcgcaagaggttggtagagcgagcgagaagaaggcaattgcggcggagagcttcctgttcacctcggagtccgtgaacgaggggcacccagacaagctgtgcgaccaggtgtcggccgcggtgctggacgcctgcctggcgcaggaccccgacagcaaggtggcctgcgagacctgcaccaagacgaacatggtgatggtgttcggcgagatcaccaccgaggcgagcgtggactacgagaagatcgtgcgcgacacctgccgcgagatcgggttcacctccgacgacgtggggctcgacgccgaccgctgcaaggtgctggtgaacatcgagcagcagtcccccgacatcgcgcagggcgtgcacgggcacttcacgaagcggcccgaggagatcggcgccggcgaccagggccacatgttcgggtacgccaccgacgagacccccgagctgatgccgctgagccacgtgctggccaccaagctcggcgcgcgcctgacggaggtccgcaaggacggcacctgcgcctggctcaggcccgacggcaagacccaggtgacggtggagtacgtggacgagggcggcgccatggtgcccgtccgcgtgcacaccgtgctcatctccacccagcacgacgagaccgtcaccaacgacgagatcgccgccgacctcaaggagcacgtcatcaagcccgtcatcccggagaggtacctggacgagaagaccatcttccacctcaacccgtcggggcgcttcgtcatcggcgggccccacggggacgccggcctcaccggccgcaagatcatcatcgacacctacggcggctggggagcccacggcgggggcgccttctccggcaaggaccccaccaaggtggaccgcagcggggcctacgtcgccaggcaggccgccaagagcatcgtggccagcggcctcgcccgccgctgcctcgtgcaggtgtcctacgccatcggcgtgccggagcccctgtcagtgttcgtcgactcctacggcaccgggaccatccccgacaaggagatcctcaagatcgtcaaggagaacttcgacttcaggcccgggatgatcaccatcaacctcgacctcaagaagggcggcaacaggttcatcaagaccgccgcatacggccactttggccgtgacgacgccgacttcacctgggaggtggtcaagcccctaaagaaggcatccgcttaagaatgtattgggaagttcactggacatgaggttcatcttcgtctggctctgctgatacctgcaaggattgctgctgctgctgcccctggatgtgtgtttgatcagtgactgtctgctctgctccatagaagacgaatgaagagagacagatggtgaagaaggctgcggcaattggcaattgccgcagcaagccatgtcggcgccaccgaccgccttagtgattggtataatttggtgtggcagcagccaggattaatgcgctggtcttttatctttactactagtttggtctcgtccggtatcttatttttccttccccttttcgagtctgtactgaaactgctgagagatttgcagttttgatctatcataccctttggtaatactgtac

SEQ ID NO: 27311 - DNA, 747 bp, Zea mays
  Clone ID: LIB4729-067-D10_FLI
ctcgaggccggccgggcttcgctgcgccgccgcctccgacatcgtctcttcgtccccacgagcaaccgataatccgccggcgctgagatgttggtttatcaagacctcctatctggcgacgagctcctgtcggattcattcacctacaaggagctcgagaacggcgtcctgtgggaggtcgagggaaagtgggtcacccaaggtcctgttgatgtagacattggtgccaatccatccgccgagggtggtgaggatgaaagcgttgatgacacagccgtgaaggtggttgatattgttgacacattccgtctacaggagcaacctccttttgacaagaaatcatttgtctcttacataaaaaaatacatcaagaatctcactgctgtgttggagccagagaaagcggatgagttcaaaaagggtgtcgagggtgcaaccaagtttctccttagcaagctgaaggaccttcaattttttgttggtgagagcatgaaggacgaagcgtccgtggtattcgcctattacaaggatggtgccactaatccgacattcctctatttctctcatggtcttaaggagatcaagtgctagattagttacccatgttgggtactatatatgttctattgttatagccacaactatagctgccctgcctgaactgaactcaggttttttttaagaaaaaactgtccaagattggattgcttgttaaagctaaatattgttattgacgtgttattgccg

SEQ ID NO: 27312 - DNA, 1023 bp, Zea mays
  Clone ID: LIB4729-068-C10_FLI
ccgggaggtgtcccagccgcgcgccgcgcgccctgttgccttctctcgacttcgagagcaccgccgcacggcatagcgcggctcgcacggccgcgccccgacattctaccgcactccctccgctgcacccctttccattctaccgccggcgacgccaaagttcttgggcctcctcatcggcgacttttccgccggcgacaggaaacaacgaaccaaaccacttctctgtcgagaggcgtcgcgctcctctcttcgccctctgctgttatttttcttaacccggctttccctcgattgctgcgtaaaattgaagatgaggaagctcaagttccatgagcagaagctcctcaagaggcacaatttcttggagtacaagagggagggcggccaccgcgaggcgctcgtcacacagcgctaccgcctcgtggagagggacgattacaagaagtacaatgggatatgcttaatggtgcaaaagctcgttaacatcataaagcagatggacccaagagaccctttcagaatccagatgacagacttgattctcgataagctgcggagacttgcaacagttatggtgaagctcaagtttgcagagcaccttaaggaggctgtgacgtacatcgaacaggggcatgtgcgtgtcggtccagatgcagtcacggacccagcctttcttgtgaccagaaacatggaggacttcatcacctgggtggattcctcaaagatcaagaggaaggtcatggagtacaatgatgcattagatgattatgatgccatgttctgagaaaatcattctgcagaaatttatgtgcccgtcagtagtgtaatcttaagcctgccacatatgggtcttttctgaacaaatctgtcggagttgtcttctgcagggctacttgcatttgtatcgcacctgcagatgtgatgcaattttgtggttggttgaaggcacattataaattcatatctgatgtagttgtgcaattgtctttgttaaagagcgggtttacccggatttcccct

SEQ ID NO: 27313 - DNA, 1520 bp, Zea mays
  Clone ID: LIB4729-070-A2_FLI
ccgggtcacctcgacgcgcctccaaaagttcggagccgccggcccgtccgcctccctctccgcctcccgtccccaaggccaatagttttcaagtggcaatggcggaccaggctaaccaacccactgtccttcataagctcggtggccagttccacctgcgctcgatcatctctgaaggtgtacgggcccgtaacatatgcccatctgtctcatcttatgaaaggagatttgccacaaggaactacatgacccagagccttttgggcccttcgatgtctgttagcggtggcatcaatgtcccagtgatgcggaccccgctctgtgctaatgctcctgctgagaaaggaggcaagaacttcatgatcgatttcatgatgggcggtgtttcagctgctgtttcgaagactgctgctgctcccatcgagcgtgtgaagctgcttattcagaaccaagatgagatgattaagtctggtaggctatcagagccgtacaagggtattgttgactgcttcaaacgtaccattaaggatgagggtttctcttctttgtggaggggtaacactgctaatgttattcgttacttccctactcaggctttgaactttgcatttaaggactacttcaagaggttgtttaacttcaagaaggatagggatggttattggaagtggtttgctggcaacctggcctctggtggtgctgctggtgcttcctctttgttttttgtgtactccttggactacgcgagaacaaggttggccaatgatgcgaaggctgccaagggaggaggtgaaaggcagttcaatgggcttgtggatgtctaccgcaagacactcaagtctgatggtattgctgggctttaccgtggatttaacatctcctgtgttggaatcattgtttatcgtggtctgtactttgggctctatgattccatcaagccagttgtccttactggcaacctccaggacaatttctttgccagtttcgctctgggttggctgatcactaatggtgctggtcttgcatcttaccccattgataccgtccgcagaaggatgatgatgacatctggtgaggctgtcaagtacaagagctccttggatgcgttccagcagattcttaagaaggaagggcccaagtccctgttcaagggtgctggtgctaacattcttcgtgccattgctggtgctggtgtgctttctggctatgaccagctccagatcctcttcttcggaaagaagtacggttccggcggtgcttaaatggagaaatatgatgacgaacaagagcagtgtgtgttcccggtcctttccaatcaggatctggtgaagtttttgcctttcatatcgaagaaattaataattcatgtagagggaggattcttccaacaatttgttttggatggagacttagatctccaaacactcgtaactatcctactaggtggtgacatcagtccccaaaaacatttatggtcatagagtctgcccttcgtttgtcagtcgggcaatttttcttac

SEQ ID NO: 27314 - DNA, 1573 bp, Zea mays
  Clone ID: LIB4729-070-A4_FLI
ccgggccgaagcatatcccgtcgcatcccatcccactaccacccatctcgtcgtccgccgattcgatccggttcttccaacccaggggcagtgatggcgacgaagaggagcgtgggcaccctcggcgaggcggatctgaaggggaagaaggtgttcgtgcgcgccgacctcaacgtcccgctcgacgatgcccagaagatcaccgacgacacccgcatccgcgcctccgtccccaccatcaagttcctcctcgagaagggcgccaaggtcatcctcgccagccacctgggtcgtccaaaaggtgtcaccccaaagtacagcttgaagcctcttgttccacgcttgtctgagctccttggagttgaagtcgtgatggccaatgattgcattggtgaagaagttgagaagttggctgccgctttgccagaaggtggagttctgctcctagagaatgttagattctacaaggaggaagagaagaacgaacctgagtttgctaagaagctagcatctgttgctgacctttatgtcaatgatgcttttggcacggcacacagagctcatgcttcaaccgaaggagttaccaagtatttgaagcctgctgttgccggcttcctcatgcagaaggaacttgactaccttgttggagctgttgccaacccaaagaagccatttgccgctattgttggtggatccaaggtctcaagtaagattggtgtcattgagtccttgctggcgaaggtcgatatcctcatccttggtggtggtatgatctacacattttacaaggcacaaggatattctgttggaaaatctctcgtggaagaggataaacttgagctcgcaacttctcttattgagaaggcgaaggcaaagggggtttctcttttgcttcccactgatattgtagtagcggacaagtttgcagctgatgctgagagcaagattgtccctgccactgctatccctgatgacatgggtcttgatgttggccctgatgccaccaaaacattcaacgaagcattggacaccaccaagactgttatttggaacggccccatgggagtgtttgagttcgagaagtttgcagctggcactgaggcgattgccaagaagctagctgagcttacaaccacgaagggtgtcactaccatcatcggcggcggcgactctgttgctgctgtcgagaaggctgggctggccgacaagatgagccacatttcgaccggcggcggtgcgagcttggaactcttggaaggcaagactctacctggtgtccttgccctcgatgacgcctagatccgctgctgctgctgctactcaggttctgccagctttgcgtgtcatcttgtttcggaccttggtgtagcactgcaaggctaaggtttactcctccgcacatggacttttggggataggcttgccaccgtgttttgctagatgagtcgtggaataagcttttacttcctcgctgctgtgggtgaagtgactggaattcggaaatttggaactaacaaaaccccccgtggatttgtatgatatgttttgttcgacagtttgcgtcccatcttcc

SEQ ID NO: 27315 - DNA, 962 bp, Zea mays
  Clone ID: LIB4729-070-B2_FLI
ccgggtctgtctctctagggtttgtgattttaaccgccgccgctgctcatctcacatccctcgagaagacgcctgctcctcgccgatcgatacgatggccgtcttctccgacctccacaccgccgacggcctcaagtccctcgaggctcacctcgccggcaaaacctatgtgtctggtgactccattactaaggatgacattaaggtcttcgccgcggtgccgtcgaagcctggcgctgagtttcctaatgccgcccgctggtacgagaccgtctctgcggctgtagcctcaagattccctggtaagtctgttggtgtaaatctgcctgcgggatcagctcctgcggcagctgctcctgcggatgaggctgaggacgatgatgaccttgatctttttggtgatgaaactgaggaggacaataaggcagctgatgagcgtgccgccgctgccaaggcctcttctaaaaagaaagaaagtggtaaatcctccgtccttatggatgtcaaaccatgggacgatgagactgatatgaagaagctggaggaggctgtccgcagtgtccagatggagggtctgacttggggagcatcaaagcttgtgcctgttggatacggcatcaagaagatgactatcatgttgacaattgtcgacgatcttgtgtccatcgacactctaattgaggaccaccttacgcaagagcccatcaatgagtacgtccagagttgcgacattgtggctttcaacaagatctagagttcagtttctgagtttgggcaacggcagcggctcagctcgtcaagtttgtgctgggatgccagtttatcccttctagtctattacagaaatgttgttcggagctgagtctattataaacatcttggtctgagtttattgttgagtggtgccagtttttttcaatatacatttatcttaaaaacagcggtactgatgtttttttgtc

SEQ ID NO: 27316 - DNA, 1505 bp, Zea mays
  Clone ID: LIB4729-070-C4_FLI
ccgggacccacattcgtacgcgtgcttgttgtctctgtcagccatcaactctccagtgagctgcgagcctacaaggctgtgggcagtgccagcctcaacctcgacctcccccagtcccccaccgaccaccggcctccttttccgcaggcacgggtgcacggcacgcggtttccactcgcttcgtccgcgttcggatcgccctcagagtaacagtctagcagagcaagcatgtcgtcgtcggcggagaacgaccccacggtgtcggtgaccgagcgcggaggcaaggacaagcacgaggacggcggcgacaaggagcagggcggcggcggcttcatcgacaaggtgaaggacttcatccacgacatcggcgagaagatcgaggaggccgtcgggttcggcaagcccacggccgacgtgtgcggcatccacatcccgcacatcagcctccaccgcgccgacctcgtcgtggacgtgctcatcaagaacccgaacccggtcccgatcccgctcgtggacatcgactacctcatcgacagcgacggccgcaagctggtgtcaggcctcatcccggacgccggcaccatccacgcgcacggccaggagaccgtcaagatcccggtgtctctcgtcttcgacgacatcaagagcacctacaaggacatccagccgggcagcatcatcccttacctcgtccgcgtcgtgctcctcgttgacatccccatcatcggccgcgtcaagatcccgatccagaaggacggcgagatccccatcccttacaagcccgacgtcgacgtggagaagatcaagttccaccacttctccttcgaggagaccaccgccacgctccacctcaagctcgagaacaagaacgacttcgacctcggcctcaacctgctcgagtacgagatgtggctcggcgacgacagcatcgcctccgccgagctcacgcagaccgccaagatcgagaagcaggggatcaccaggatgcaggtgccctttagcttcaggcccaaggacttcggatccgctgtctgggacatgatcagggggaggggcacgggatacaccatcaagggaaagatcgatgtcgacactcccttcggcaacatgaagctgcccataagcaaagagggtggaaccacccgcctcaagaaggaggacgacgatgatgacgatgatgacaactgaaatgaggactgctggggggcgctgctgttacctttcacgaaacacagcgaagcagaggatgcggggatcgtcgtcgacctgatacccatacccttagcgctggttaagctcttgcctttagcttatggtgctctgttgttttgcattgtctgaacatcctctcacatcctgagtgtacgttcagtttgaggtttcctgtgttgtccgtctgaattccttcaaactttgcggttggaactggatgaagaataaaattccaacccgtcctggttcttttgtgggtctgtttggaatagatgctgcctgccaatgatcct

SEQ ID NO: 27317 - DNA, 670 bp, Zea mays
  Clone ID: LIB4729-071-G11_FLI
cctcgaggccggccgggctccgccggctcccccactcagaaaacccagccgccgccgcatcggcctcccaggtaagcagtagcgtcctccgtccgccgcgtgctcatgtccgcggcgctatcgacggagctccgccacaagtacaatgtgcgttccatcccgatccgcaaggacgacgaggtgcaggtcgtgcgcggcacctacaagggccgtgagggcaaagtggtgcaggtgtaccgccgtcgctgggtcatccacgttgagcggatcacccgcgagaaggtgaacggctccaccgtgaacgtgggcatccacccttccaaggtcatggttacaaagctgaagcttgacaaggaccgcaaggcgctcctcgaccgcaaggcccggggccgcgccgccgacaaggctaagggcaagtttactgccgacgacgtcgccgccgctgctggtggcgccgccgccactggcgcgtctctccaggagatcgactaggcgcttcgcggggatctgatggtggtcctaccgcctattactccttatcgctctagtttttgctatcaatgattatgtgctaggagttttatgttacttataaactgctttgagcctcgatgggagttgaacttaatgtggagtgtatctgagatatgaagaactcattatatggctg

SEQ ID NO: 27318 - DNA, 633 bp, Zea mays
  Clone ID: LIB4729-071-H3_FLI
ccgggacaccgcaatcttcaatctccccagcaatccctagcagaagccttccatcctcactcgctcgatggcccgcacgaagcagacggcgaggaagtccaccggcggcaaggcgccgaggaagcagctggcgactaaggcggcccgcaagtctgcccctgcgaccggcggagttaagaagccccaccgcttccgccccggcaccgtcgcgctccgggagatccgcaagtaccagaagagcacggagctgctgatccgcaagctgccgttccagcgcctggtgcgggagatcgcgcaggacttcaagaccgacctacgcttccagagctccgctgtctccgcgctgcaggaggcggctgaggcctaccttgtcgggctcttcgaggacaccaacctctgcgccatccacgccaagcgcgtcaccatcatgcccaaggacatccagcttgcccgccgcatccgcggggagagggcctaagcgtcatattctctgtcatcagtgcccgatcagaagatgtagagatgtgctgggttctgtagtttgtgttactgtcgaatcatcgagtagttggttgttcactgctgtaacttaattatcatgatgcatatgaaatggcaatgagctctgttatc

SEQ ID NO: 27319 - DNA, 703 bp, Zea mays
  Clone ID: LIB4729-073-B2_FLI
ccgggccattcattaccggaagagaaaaaaaataactcggaaaaggagacgccgaaaattcgaaaggggaggggaaagcaaagctgatggcggaggaccaggggaacgcaaagcaaatggcggaggccccgagcaagatcgaatccatgaggaagtgggtcgtcgagcacaagctccgagccgtaggttgcctctggctaggtgggatcagcagttcgatcgcctacaactggtcgcggcccaatatgaagcctagcgtcaagttcatccacgcaaggttgcatgctcaagctctaaccctggctgcattagttggttctgcatgcgtggagtactatgaccagaagtatggttcttctgggccaaaggtggacaaatacacaagccaatacctggcccattcgcataaagattaaaggtcgccatgttggttcctgcatgccggattaattttgggctcatctcgggttgctcatgacccgcccatggatgctggatgtttattctttttttgtcttcataattacaaaatggtggtgtacttgccaggcaaatgttaatgagggtataatgcagatattgtcgtcataatttggcctcatgttgcattatctaacctcactttgttgactgtcagcgactcagcgtctctgattttttttatattttttgagagaaggaaaagaaatcccggtttgtgcct

SEQ ID NO: 27320 - DNA, 1253 bp, Zea mays
  Clone ID: LIB4729-073-B5_FLI
ccgggattccccgtttgccttgtttaccattcctccccaaaacacatcctgcgatcctcgaagcctccgccgagcatcgatcatgtcggcctactgcggcaagtacgcggatgagctcatcaagaatgctgcctacatcggcacccctggcaagggtatccttgctgctgatgagtcaactggcaccattggcaagcgcctttccagcatcaatgtcgagaacgtggaggagaaccggcgggctctccgtgagctcctgttctgctgccctggtgccctccagtacatcagcggtgtgatcctcttcgaggagaccctctaccagaagaccaaggatggcaagccttttgtcgatgtcctcaaggagggaggcgtcctccctggcatcaaggtcgacaagggcaccattgaggttgttggcaccgacaaggagaccaccacccagggccacgatgacctcggcaagcgctgcgctaaatactacgaggccggtgcccgctttgccaagtggcgtgctgttctcaagattggccccaacgagccgtcacagcttgccaattgttgagcctgagatccttgttgatggccctcatgacattgatcgctgcgcttacgtcactgagacagtccttgctgcctgctacaaggctctcaacgagcaccatgtcctcctggagggtaccctcctgaagcccaacatggtgactcctggctccgactctaagaaggtgacacctgaggtgatcgcccagtacaccgtccgtaccctccagaggaccgtccctgctgctgtgcctgctgttgtcttcctctccggtggacagagcgaggaggaggccaccctgaatctcaatgccatgaacaagctcagcaccaagaagccatgggccctgtccttctccttcggccgtgccctccaggcgagcaccctcaaggcctgggctggcaaggtggagaacgtggagaaggctagagcggccttcctcgccaggtgcaaggccaactccgaggctaccctcggcacctacaagggtgatgctgccgccgacaccgagagccttcacgtcaaggactacaagtactgagttgcttctctttgcgatcccgttgttttggaactcctgcctgcgagtaggttgctgagtgttgtttgcttgttagagcttttatattcggacatgaaaaaaacatgcttcctatgtggatgatggttatctttatattcgtatattaactactagtctctgttgtcg

SEQ ID NO: 27321 - DNA, 1403 bp, Zea mays
  Clone ID: LIB4729-073-B8_FLI
ccgggattccccgtcttccttgtttaccattcctccccaaaacacatcctgcgatcctcgaagcctccgccgagcatcgatcatgtcggcctactgcggcaagtacgcggatgagctcatcaagaatgctgcctacatcggcacccctggcaagggtatccttgctgctgatgagtcaactggcaccattggcaagcgcctttccagcatcaatgtcgagaacgtggaggagaaccggcgggctctccgtgagctcctgttctgctgccctggtgccctccagtacatcagcggtgtgatcctcttcgaggagaccctctaccagaagaccaaggatggcaagccttttgtcgatgtcctcaaggagggaggcgtcctccctggcatcaaggtcgacaagggcaccattgaggttgttggcaccgacaaggagaccaccacccagggccacgatgacctcggcaagcgctgcgctaagtactacgaggccggtgcccgctttgccaagtggcgtgctgttctcaagattggccccaacgagccgtcacagcttgccattgacctgaatgctcagggtctggctcgctacgccatcatctgccaggagaacggtctggtgccaattgttgagcctgagatccttgttgatggccctcatgacattgatcgctgcgcttacgtcactgagacagtccttgctgcctgctacaaggctctcaatgagcaccatgtcctcctggagggtaccctcctgaagcccaacatggtgactcctggctccgactctaagaaggtgacacctgaggtgatcgcccagtacaccgtccgtaccctccagaggaccgtccctgctgctgtgcctgctgttgtcttcctctctggtggacagagcgaggaggaggccaccctgaatctcaatgccatgaacaagctcagcaccaagaagccatgggccctgtccttctccttcggccgtgccctccaggcgagtaccctcaaagcctgggctggcaaggtggagaacgtggagaaggctagagcggccttcctcgccaggtgcaaggccaactccgaggctaccctcggcacctacaagggtgatgctgccgccgacaccgagagccttcacgtcaaggactacaagtattgagttgcttctctttgcgatcccgttgttttgaaactcctgcctgcgagtaggttgctgagtgttgtttgcttgttagagcttttatattcgaacataaaaaaaacatgcttcctatgtggatgatggttatctttatattcgtatattaactactagtctctgttgttagtttccgtgtaatttgctcctcccagatgggagaatcgaacaccgcttttttgttctatctgatatgctgtaatactggcctttg

SEQ ID NO: 27322 - DNA, 884 bp, Zea mays
  Clone ID: LIB4729-074-C1_FLI
ccgggagaaaaaattagttcattttaatctcaattctctccgatcctgaagggattcgagtttccctaaccctcgtttccggtgtacgactccaacgacgacgagatggcctccccgctccgtcggagtttcccctctctcggccgcgcgcttctcacgccggcgccggcgcggatgctctccgcggaggcctccgatgccctcgttgagatcaagcccggggagattgggatggtctccggcatccccgaggagcacctccgccgtaaggttgtaatttattcaccagctaggactgcatatcagcaaggttcaggcaaagttgggaggtggaaaattaactttttgtcaacccaaaagtgggagaacccgttgatgggatggacatctactggggatccatatgctaatgttggtgaagcaggacttacattcaacagtgcggagtcagcaaaagcatttgctgaaaaacatggatggaattatgtggtacggaaacggcatacacctcttctgaagcctaaggcctacgctgagaacttcaagtggaaaggccccccgaaggcggagcaagcataagacctccagcagcatgtgaccctgacactggaatgatgttattttcctcctgagctctagagtctagacctcttgtccgtgagcctggcattgggacggtgttgttttcttcctggacagccttttctttcaacagtgtccgtggtgaaagtacgagctagaatatgcatctatcaaacttgtaataagcatggtctgcaatcaaacaaaattagtgtccttcgaaaacgtttgttccttgatgacattgtatctcaatactgtatgcttccttggccggtatctgaaaagtggcatttgagttg

SEQ ID NO: 27323 - DNA, 1708 bp, Zea mays
  Clone ID: LIB4729-074-D4_FLI
ccggggccgccggtacaatcagatgcagatgctaatgatacagtccgtccagaccccacccgccgccgcccacctccgcgctgctgcgcccgccagcacgccaccgctcctcgcgcgtaggctggccggttctcgtccagctcccgcctccgccggaacaatcagatgcagccgatgctaacgctacagtccgtccagcccccacccgccgctgcccacctccgcgccgctgcgtccgccaagacgccactgctcctcccgcgcagagcggccggtcctcccccagcttccgcctccgcctccgcctcggctgagttcccaggatccgttccagacagcgctcagatggcgccccgacggcggcggcgccggagcgtggccggcatcgaccaggacgaactcctcgatcccgaggccctcgcggaccccgacagcggcttctacgagatcaacagcgtgaggctgcaccacaaggtctgcagccacgaggatgaggactcgtccagcgaccagtccaccggtagtaccattgcctcagactcagacgctgtcctgaaaagccagattggcctgcccatactgctgctgcacggcttcggcgcgtcagtcttctcctggagcagtgtgatgcggcctctcgcccgcattgtccgtgccaaggttcttgcgttcgaccggccggcgtttgggctgacatcccgggccagtcgctctgccgatgacgccaagcctctcaatccttactccatggcgttctcggtcttggccacgttggcgttcatcgactaccttggcgctgagaaggccatacttgttgggcactcagctggttgccttgtagcagtggatgcatactttgaggcaccggaacgggtggctgctctcgtgctagttgcgccggctatatttgcaccaaggaaggcggtgaaagagggccagtcaggggaagaagaaggagggcagcaagcacagagggttcccaacgatgaaaattcgcctccaaatttgttcgctaggatttcgggaggatttcttgagctatggaagcacgttgcggggcttgttctcaagatgatcacagcgatacgagatgtggtccgatctttgtgtcttaaagctgtcgttgcttttcttcggtcatcgttgggtgtggtgctggtaagatgggtgatggataaatttggtatactgggcgtccggaatgcatggtatgacccgagcaaagtaactgatcatgtcatacaaggctacacaaagcctctaaaatccaagggttgggagacagctctgctggaacacaccgtatccatgatcatagattctgtgtctgcatcaagagtaccagtttcaaagaggctttctgagatctcatgcccagtgctagtggtgacaggtgacaccgatcgcattgttcctgcttggaatgccgagcgtgtggcacgcgctatacctggagcaacttttgaggcgatcaagagttgtggtcacttgccccacgaagaaaggcctgaggaattcctgtccgtcgttgaaaattttctacggacaacgtttgcaaatccaaatgaacaagtatttcaagcagctgtatcatgaattatgtgttgagtacgatctatttgctttataataaatcttaaagacccactcgtgtacaatgagagtggaatttggagtttaagcacatgagaagtaaaagaagttgaag

SEQ ID NO: 27324 - DNA, 1716 bp, Zea mays
  Clone ID: LIB4729-075-F10_FLI
ccgggcacacaccaggaccaggaccaggtccagcggcagccccagcgcagccatcggccccccgcttccttactggggcggcgccgctgttggcgcagaggagcagaggtggcgcatcggcatggactccgccgccgctgccctcctcgactccgcctccgcgtccgcctcttccgccaacgccgcaggcaaggagatgcccaccgcccgccacatcgcccaccgcaccgcccacaacatgtcctcctcctcgctccgcaagaagtccgacctcgcgctcctccgcaaggtcccctgcgccccgctccgacgcctcctcgacaacctccaggaggttttgctcgccaccaagctcgccctcctcctccccgccgttctactcgcgatcgccgcgcgaatcttccacttcggccaggaatgggtctttgtgcttagcttgatcggtctcgttcctcttgctgagcgacttagctttctgactgagcaggttgcgttttacatagggcctactgtgggtggactgttgaatgcaacatttggaaacgtaacagaggtcatcattgcgatctttgcactctatcaaggcaaggtagtggtggtgaaatgctccctgctaggctcagtcttgtccaacctgttgcttgtccttggaacctcccttttctttggtggcctggctaaccttggaactgagcagctatacgacaaaatgcaagtagatgtcagcacaggacttctgattcttggtgtgctatgccactctctgccactgatgctgagatatgctgtgagctccggggagcacgcagaatcctcttgggattcaggactggagctgtcccgagcatgcagcattgtcatgctccttgcctatgtagcctaccttttcttccaactgaaaacccaccgccaactatttgaaccccaaccccaagaggttgaagatggtgatgattcggtctctcaagacgaggcagtactgggattttccagtgcaatgatttggctgggagtcatgaccctgatgacagcactcctatcagagtttgttgtgagcacaattgaggcagcatcggaatcttgggagctatctgtcagtttcattagcgtcatcttgattccaatagttggtaatgcagcagagcatgctggtgcagtgatatttgcgtttaaaaacaatctggacatcaccctcggagtatctttggggtccgctacgcagatttccatgtttgtggtgccattgagtgtccttgtagcatggatcatgggagtcccgatggatcttgattattagtaacggccttcacgctccaggatggatcatcacattatctgaagggactgctgcttgtgttttgctacattgtcatctccttatgctttttcgttttgagacagcatggaaatggaagcaacgatgatcagctgggtgtagcaagcaagccatggaggatttagggcgcctgagctggcagtagtttctcaacaagtagcgtggactttggtttgcacgattttgcatggaacactggaggggagacccgtgaagtttgactaaagtatgtagactgcgggaagatgctgttcagctgatgtgtgaatgtaagtacatacaaagactatagatgaaaactgatgttgcgtgagagactatttgtgtgtgtttttcttgttctttccaccaagcaatggctagaattcggttgagctgcc

SEQ ID NO: 27325 - DNA, 1819 bp, Zea mays
  Clone ID: LIB4729-077-C6_FLI
ccgggaccgcgccgtcatcaccatcacccaccatcagccgccaaagatcacgaaagcgacgcgcacaccccaagaaagggcggctccccactccgcctcgccgcacccctttcggcctttcttcctcccccacctcttgctcgcgtcccagctcccaacaccagtacaccacgcgccggctgcgagcgatgcccgcgatcccaacggcccccgccccctgccccgtgcgcttcctcctcgcccgccgccacagcctccacatctcctacccgtcgccttgctctaaccaccagcggctcccgccccgcctcctgcgcctgcccgctcgcccccgggccgctcccatgtcggccgaggcgcgggcacccgcgtctccggtggcgccgccggcgcaccccacttacgacctcagggccgtcatcgcgctcgccctcgcagaggacgccggcgaccgaggggatgtatcctgtttagccaccataccttctgatgtcgaagccgaagccacatttattgctaaagcagatggtgtattgctggaataagcctagcagatatgatatttaaccaggttgatccatctttgaaggtcgaatggtttgaaagtgatggcaattttgtccacaaaggactgcagtttggaagagtatatgggtgtgcccgcagcatcatcgttgctgaaagggttgtgctaaatttcatgcagcggatgagtggcattgcgaccctaacaaaggctatgtctgatgctgcccgtccagcatgcatattggaaacaaggaaaactgctccaggtttacgtctgattgacaagtgggcagtactgattggtggcggaaagaaccacaggcttggtttatttgatatggttatgataaaagataatcatatttctgttgccggtgggattgcaaatgcaatgagatctgttgatcaattcctgcagaaggaaaaactcacaattcctgtcgaggtcgagacaaggacaatcgaagaggtgaaagatttgttgaagtacgctgctgagaacaaaacttcattgacccgtataatgttggacaatatggttgttcctcttgggaatggggattttgacgtttcaatgcttaaagatgcagttcggttgataaacggtagatttgagactgaggcgtctggaaatgtgacagttgatacagtgaagaaaatcggagaaacgggggtcacctatatttcaagtggagcattaacgcactctgtgacggcgcttgacatctctctcaagatagacaccgagctggctcttcaggttggaagacgcacaaatcgtgcttgactcccacagcattacgttgtggacgcacgcaagtaaggcaggatgacagagggaccagcgtggcaaaccagcttaaatagcttaataataacttggcgctgaggcctctgactgcaactacgtgggattcattcttcagtttcatgcacaaacgaccgcaatattgatcggatcagaataattggcaggacatacaggttttgttctagcaccaagtttgggagcttgcgttctgcggcagataggcaggccaggcaggtgtacctcctcctgggcccagccacagctcgacagcaggtaccaggtaggtctactgtaaacgggggatgtcgcactgaactcgcaataccaaagacaaaataacaaaaggtggagataagatgcttatcttactgccattggtgataaaagcaacgtcaactcacatctattatttattgtatcgttccatcatcacttccagaatccatttgtatacagtgtatacgaccggtttgctcgccg

SEQ ID NO: 27326 - DNA, 901 bp, Zea mays
  Clone ID: LIB4729-077-D12_FLI
cctgacctcactcgtagtcgtagctcaagcatcagcggcagcggcagcggcaggagctctgggcagcgtgcgcacgtggggtacctagctcgctctgctagcctaccatggctgatcaccaccggggcgcgacgggaggtggcgggggctacggcgacctccagcgcgggggcggcatgcacggcgaggcgcagcagcagcagaagcagggcgccatgatgacggcgctcaaggccgcgacggccgcgaccttcggcgggtcgatgctggtgctgtccgggctgatcctggccggcaccgtgatcgcgctcacggtggccacccccgtgctggtgatcttcagcccggtgctggtgccggccgccatcgcgctggcgctcatggcggccgggttcgtcacctccggcggcctcggcgtcgctgcgctgtccgtgttctcctggatgtacaagtacctgacgggcaagcacccgccgggcgccgaccagctggaccacgccaaggcgaggctggcgtccaaggcccgcgacatcaaggatgcagcacagcaccgcatcgaccaggcgcaggggtcttgagagaagaaccacactcgagcggaccgcgcgcgcgtcctccttgaaccactgccggcgcggcggcatatggcccttaaaggcggtggctgctgctacgtacgctgccgtagagtctcggtcgccgcgatagctctagctagtcgtttatgtgttgtgctttgtgtgtgcatgcatgtgtctgggggcatgcagtgcagtgcagtactatatgctgtatgcgtctctctttgatcggagaggcggatgtacagcatgctcgatatgtctagtttggatgtcatgtttatgatgaggaataaaatgcagtgttcaggtgagatgcc

SEQ ID NO: 27327 - DNA, 1587 bp, Zea mays
  Clone ID: LIB4729-077-G6_FLI
ccgggacctcgacgcgcctccaaaagttcggagccgccggcccgtccgcctccctctccgcctcccgtccccaaggccaatagttttcaagtggcaatggcggaccaggctaaccaacccactgtccttcataagctcggtgcccagttccacctgcgctcgatcatctctgaaggtgtacgggcccgtaacatatgcccatctgtctcatcttatgaaaggagatttgccacaaggaactacatgacccagagccttttgggcccttcgatgtctgttagcggtggcatcaatgtcccagtgatgcggaccccgctctgtgctaatgctcctgctgagaaaggaggcaagaacttcatgatcgatttcatgatgggcggtgtttcagctgctgtttcgaagactgctgctgctcccatcgagcgtgtgaagctgcttattcagaaccaagatgagatgattaagtctggtaggctatcagagccgtacaagggtattgttgactgcttcaaacgtaccattaaggatgagggtttctcttccttgtggaggggtaacactgctaatgttattcgttacttccctactcaggctttgaactttgcatttaaggactacttcaagaggttgtttaacttcaagaaggatagggatggttattggaagtggtttgctggcaacctggcctctggtggtgctgctggtgcttcctctttgttttttgtgtactccttggactacgcgagaacaaggttggccaatgatgcgaaggctgccaagggaggaggtgaaaggcagttcaatgggcttgtggatgtctaccgcaagacactcaagtctgatggtattgctgggctttaccgtggatttaacatctcctgtgttggaatcattgtttatcgtggtctgtactttgggctctatgattccatcaagccagttgtccttactggcaacctccaggacaatttctttgccagtttcgctctgggttggctgatcactaatggtgctggtcttgcatcttaccccattgataccgtccgcagaaggatgatgatgacatctggtgaggctgtcaagtacaagagctccttggatgcgttccagcagattcttaagaaggaagggcccaagtccctgttcaagggtgctggtgctaacattcttcgtgccattgctggtgctggtgtgctttctggctatgaccagctccagatcctcttcttcggaaagaagtacggttccggcggtgcttaaatggagaaatatgatgacgaacaagagcagtgtgtgttcccggtcctttccaatcaggatctggtgaagtttttgcctttcatatcgaagaaattaataattcatgtagagggaggattcttccaacaatttgttttggatggagacttagatctccaaacactcgtaactatcctactaggtggtgacatcagtccccaaaaacatttatggtcatagagtctgcccttcgtttgtcagtcgggcaatttttcttgcatccaatgccttcgtttaagtatcggatgagttgctgcgactaattatttgtttgtctttaccttttac

SEQ ID NO: 27328 - DNA, 1701 bp, Zea mays
  Clone ID: LIB4729-078-E9_FLI
ccgggatcgcttcagctcggcgtcttcacaaacgccggcgcaaactctcgcccgagcccgacagatcttcaattccccattccgcccaccgatcgaccttcacgccagtctcggtctcttccgaaggcgtcgcgcgcggttgtttgagaggggaggaggaagatgagggagtgcatctccgtccacatcgggcaggccggcatccaagtcggcaacgcgtgctgggaactttactgcctcgagcacggcatccagcctgatggccaagtgcctggagataagaccgcgggacatcacgatgatgccttcagcaccttcttcagccagactggtgctgggaagcacgttccccgtgcaatcttcgttgatctagaacccactgtgatcgatgaggtgcgcactggcacgtaccgccagctcttccaccctgagcagctcatcagtggcaaggaggatgcagctaacaatttcgcccgtggccattacacaattggcaaggagattgttgatctgtgccttgaccgtatccgcaagcttgctgacaactgcaccggcctccagggcttcctggtcttcaatgccgttggtggtggcaccggctctggccttggttctctcctccttgagcgcctgtctgtggagtacggcaagaaatccaagctgggcttctctgtgtacccatctccccaggtgtcaacctctgttgtggagccttacaacagcgtgctctccactcactcactgctggagcacactgatgtctccatcctgctcgacaacgaggccatctatgacatctgcaggcgctccctcgacattgagaggcccaactactccaacttgaatcgccttgtgtctcaggtgatctcatcgctgactgcttctctgaggttcgatggtgccctcaatgtggatgtgaacgagttccagaccaacctggttccttacccgaggatccacttcatgctctcctcctacgcaccggtgatctcttctgcgaaggccttccacgagcagctgtctgtggcggagatcaccagcagcgcgttcgagccggcttccatgatggtcaagtgcgacccacggcacggcaagtacatggcttgctgcctgatgtaccgcggcgacgtggtgcccaaggacgtgaacgccgcggtggccaccaccaagacgaagcgcaccatccagttcgtggactggtgcccgacggggttcaagtgcggcatcaactaccaggcgccaacagtggtgccgggtgccgacctcgccaaggtgcagcgtgccgtgtgcatgatctccaactccaccagcgtcgtcgaggtgttctcccgcatcaacagcaagttcgacctcatgtacgccaagcgcgcgttcgtgcactggtacgtcggcgagggcatggaggagggggagttctccgaggcacgcgaggacctggccgccctggagaaggactacgaggaggtcgccgcagagggcggcagcgatgacggcgacgaggaggaggaatactgatctgcttgcatgaatctgtttggctgtcgagccaggttgtggtgttgaaaaacctttgtttcctgggtaatgtttgggtgtttccttccatcatcacttgctgaactgctctagtatttgcatttgtaattgaagtctgtcgctttaagcactcttggttctaaagatctctgtgcttttgggggc

SEQ ID NO: 27329 - DNA, 963 bp, Zea mays
  Clone ID: LIB4729-078-H8_FLI
ccgggatgccgcctaaatccgatagcgttgaaggaatcgtcctgggtttcgtcaatgagcaaaacaggccattgaattcacagaatgcagctgatgcactacagaagtttaatcttaaaaagactgcggtacaaaaggcactggatgcattggctgacagtggacagatttccttcaaggagtatggcaagcagaaaatttacattgctcggcaagatcaatttgacattccaaatggtgaagaactcgaggagatgaagaaaacaaatgccaagttacaggaagaacttgtggatcaaaggaaagcaattagtgaggttgaatctgaggtacgaggtctgcagtcaaacttgacactcacagagatcacgtcaaagaagagtgaattgcaaagcgaagtccaagaaatggaagagaaactaaataagttgcggagtggtgttaccttggtgaaacctgaggacaagaagatcattgagaattcctttgctgaaaaagtgaaccaatggaaaaggcggaagaggatgttcaaggagctctgggataatattactgagcacagcccaaaagatcagaaggaatttaaggaagaacttggtatcgagtacgacgaagatgttgatgtgaacgtgcagtcttactctgacatgctagcaagtctcaacaaaaggcgaaaattttcccgctgatgatgtagcatgagagcgtctttaagttgaaaataggctataaccgttacatactttcaccagctatgtattcgtggttctaccggttctgtagcgattagtttaccctggcagcattgaggccccgtttgtttcaacttttttcagcttctgaccacccagcagactaccaaacgctcacggctcatctcttcagcttgcttttgttataatctctttagtgaaaaccgttaaaaagtcaacatgaacatataatcggtcgagttgttgtggt

SEQ ID NO: 27330 - DNA, 1625 bp, Zea mays
  Clone ID: LIB4729-079-A9_FLI
ccgggaaaaccgtccttgtctcaccaacgtcgcagcgccgtggccctctgagccctctctcgtcttcttcccaaccccaccaggtacccagatcggcaaggccaatccgaaatctcgagcgctcgcgccggcgaccacagcaaagaggaggccgcagcacgacagcgccccagggttcctactctcgtcgcagcggcagcactggtagcggcagcagtgaggggaagatgtcgtcggtgttcagcggcgatgagaccgcccccttcttcggcttccttggcgccgccgccgcgctcgtcttctcatgcatgggggcggcgtacgggacggccaagagtggcgtcggcgtggcgtccatgggtgtcatgcgcccagagctcgtcatgaagtccatcgtgcccgtggtcatggctggtgtgctcggtatctacggcctcatcatcgccgtcatcatcagcactgggatcaaccccaaggccaagccatactacctctttgacggctatgcccacctgtcgtccggccttgcctgtggtcttgctgggcttgctgcaggcatggccattggcatcgttggtgatgctggtgtcaggtaaagacgcttcctcttatcatattctgctatatgctttggtttggctgataatatgctggtcaatgcagcagcagtaatggcaggcacttctaaaactccatcttgtcaatacctgtttgtagactagtttttatactattgaaatacttaacttaaagctaaagtgaatactacagttatatctgatatgttgtctggactaaataggaatcttttaatatgcctcagatctcaattgacctttgcattgcatatttgtaccttatgactttctagttaataattttgataatattaaaattgcacttttctctttttaaggcaaacagccaaacaccatatttcaagtagtaaatgactgtcacaccattgacataaaccaagcttatttgaggtgttactagctagttcattgataagctgaagttgaacctttgtcagcttgtctctgctattcataatggtccttggttcactactattgtcgtgactattatagctcccgaatcaggaagctatccagttcttcttgataatcattattttctcttacaaatgcagtttatagtcaagtatgattatatatggctttatgttgatatcttgtttaacttataaaacttgtcttaatggataaaaagataaagggatgcatttgttgatgtatgctgtgctttcaactttgtttgtcttgtacctcatgttccatatttggtaatatttcctatcagcacattcattcagatctgagaccagaccacttgtgttacctctatgctattttcctgtatagcatgtttgcgcccaagagaagactggtactttgtaccttgttgctttagatgcttatagttgatgacataaataacttaattgatgtggtggtgtctgaaaggagtttggaactaagtttagacctgcatgcagtagattgtttccaaggattgtaatttgtattggaataggctgtttgtgggatcgagtgctggtaatgtttctaaaggacagaatatatcgagcacatcaacag

SEQ ID NO: 27331 - DNA, 1155 bp, Zea mays
  Clone ID: LIB4729-081-B1_FLI
ccgggatccctgcggccctccctgcccatctcccgatttccccgcgtgcgctctctctctctctctctctctctctctccgtcggcgacgagcctgggcgacctgcgccgccgcccctagcccaggtctccatcggacgcttcgccaggtcttgtttagacccatcgccggcaccgagcaacttttgcactcttttgatttcagttatcggatcccgcatcgtggaatgcttgccaaagggaggaaggtagctggaaggcgtgaagaaatgtctgcaaattatgcgtttggaccacaggatgatgatgcgattattaaacacaggcttctgactaggacaacgaccaccaggggtgaaccgccactaaagaagcttcagaagaagttcatgtcctttgcaactgagatcgagaaggatgcagataacataagtgactgtgaaagactgtacaaggcctttctacatgaaattaacacctttgagctacctcttctgaaaagcaaggctgtggttgatgcaaacattagggagaaagaaagctttaatgagctgcaggttgagattgagcgacagatcttgcatgctaagactgatattgaggaccttaagaagcaacttgagcagagcaagattgagaggcagcacaaagaagagtgtgaagccatccggaagctgatttgtttgcagcctccacggtcagaaactgaaaaactcattgcagaccttgagaaggagataactgatttgaaggctgagaatgtagcatgcataaggactttggaactgaggaagaagcagtttgcccttcttctacatgtggttgaggaattgcagatctcgattgaagatgagcagaagagtatagcagatgagctgagagctattgctggagagcagaagatgagcatggaagaagggagcgtcggtgcttcagattccatggttgttgactgatcgagatacattcacatatgttgcagacctgcttgccaaaatccatcacatggtttttggacaatatggcgatttggtagatcatctaccgtagatgtcttttgcggtgtctttgtacctcatgtaaattgaactgtatgctagtatgaagtgaaattgaagtacacgttgttgtgtaacaaagtcagttcttattgatg

SEQ ID NO: 27332 - DNA, 807 bp, Zea mays
  Clone ID: LIB4729-081-D7_FLI
ccgggacacaacaccagaatccgcgaatcacagacgcgtctatctcagcttgctgcactgcactaccctgccctgccatcatatcgtacgtgagcccggccgagcgagagcgagggagaggcatggctgctccgaagctcgcgacgctggcgctggccgtgctcctggcggcgaccgtggtggctcccccggccgcggtgcgcgcggcgatgtcgtgttccaccgtgtacagcacgctgatgccgtgcctgccgttcgtccagatgggcggggccatgccgccccagccgtgctgcggcggcatccgcagcctgctgcagcaggccaacaacacccccgaccgccgcaccatctgcggctgcctcaagaacgtcgccaacggcgccaacgggagcggcacctacatcagccgcgccgccgcgctgcccagcaagtgcggcgtcgccctgccgtacaagatcagcaccaacgttaactgcaacacgattaattaagtgatgaggcgtcctgtgcgcgtcccgggcgaggaatgcatgcatggcgctggcggagagtaataaaataatgctactggtattttaagctatatcgaggtgtgcctgtctctagtcatttattatggtgtttaggaatggtctacacagttcgtaacggtgtatcgtggatgcatgttgccgcgagcagagtacgtaggcatgaaccgatgtgtgcgcttctgtctgtttactctctctatgtagtaatgtgtgggtgctttgatccagatgtattcgctcgtgagtcgtggaagtagatcgtttcagtagc

SEQ ID NO: 27333 - DNA, 575 bp, Zea mays
  Clone ID: LIB4729-081-H10_FLI
ccgggatcgagccgccgccgccgccgccgcagttgtcttcggtcttccgtgctcaccttcgagagatcaagttgctgctgcggtagtccccaaccatcatcgtgcagaacgaggagggtaagacggtggacctctacgtccccaggaagtgctcggccacgaataggatcatcactgccaaggatcatgcctctgtccagatcaacattggccacttggatgcgaatggcctgtacgatggtcacttcaccacgtttgctctctctgggtttgtccgtgctcagggtgatgctgacagttcgttggacaggctgtggcagaagaagaaggctgagatcaagcagtaggtctttgcacgtagttccaccggtaatggactcttgagggatactgctctagctaatgctttagctgggggggggggagtgattctgatgtttggctgttcgtttgttggatgaccaggttttagtttgtctggccatgcttgggtcgcagcaatctgtggcacgatgaatatcattttgtcaacctattcttctcacatatttggtcgcttagtatttactatttac

SEQ ID NO: 27334 - DNA, 1315 bp, Zea mays
  Clone ID: LIB4729-082-A4_FLI
ccgggacttgttcttggcttcggtcttacagacgacggtcaccggcaggcggcagccttggcgggttggtcttgtgacattgtttccttgttgttgctgctgccatcaatggaggtggtgaacaggtacgtcgccacccggcaccacatcgagggcgccccgacggaggccgattttgaggtgaaggaggagacggcgaggtgggcgccggactccggcgaggtgctcgtcaggaacctgtacctgtccatcgacccgtaccagctcaaccgcatgaagcggagcagcgcgtcgcacctcgccgtcgacggcaccctgcccggccagaggatcgcggcgtacgcggccggcgaggtggtggcgtcggcgtgcgaggagtacaaggtgggcgacgtggtggccggcgtgctcgggtgggaggactacacgctgttcaagccgtccccggccgtgctcatgtccaaggtcgccgacgccgacgccgcgggcttccccctgtcccaccacatcagcgtgctgggcaccagcggcatgaccgcttacggtggcctcttcgaggtgggcaagccggtgaagggggagaaggtgttcgtgtcggcggcgtcgggctccgtcggcagtctcgtcggccagttcgccaagctcgccggctgctacgtcgtcgggtgcgccgggactacagccaaggttgatctgctcaaagacaagctgggattcgacgatgctttcaactacaaagaggaacctgacctgaaatcggcgctgaagaggtacttccccgatggcatcgacatctacttcgagaacgtaggcggcgagatgctggaggcggcgctggccaacatgaatacctatggccgggtggcgctcagcggcgtcatctcggagtacacgggtggtgggcggcgcgcggtgccggacctgctggaggtgatctacaagcgcatcaccatccggggcttcttcgcctgggatttcctgcccaggttcgcggagttcaacgccgtcatcggcggctgggtccgggacggcaaggtccaggtgctcgaggacgtctccgacgggctggagagcgtcccgtcggcgttcgccgcgctgttccgcggccagaacgttggcaagaagctcgttaagctggcgtagaaagagaaccgtcgtccgtggaggtagcatccaggacccggaggccggagcatgtacgtctgtcatgcatgccggtcattcagcacccgtagaacctcattgcagaggtgcttcgaggctttattggggtagtgggggtgaaatgcagtgaacttgttaatttaaccgaaac

SEQ ID NO: 27335 - DNA, 1678 bp, Zea mays
  Clone ID: LIB4729-082-E2_FLI
ccgggacactgagaaccgcagagacaggcgtcttcgtactcgcctatctccgcgactcaaagctttccccaattcccccccttctcccatttctcaccaccgccgccgctccccccgttcaacaacaccatgagggagtgcatctcgatccacatcggccaggctgctatccaggtcggaaacgcgtgctgggagctgtactgcctcgagcatggcattcaggctgatggccagatgcccggtgacaagaccattgggggaggtgatgatgctttcaacaccttcttcagtgagactggcgctgggaagcacgtcccccgtgctgtttttgttgaccttgagcccactgtcatcgatgaggtgaggactggcacctaccgccagctcttccatcctgagcagctcatcagtggcaaggaggatgcagccaacaacttcgctcgtggtcactacaccattggcaaggagattgttgacctgtgccttgaccgcatcaggaagcttgcagataattgcactggtctccagggcttcctcgtcttcaacgctgttggtggaggaacgggctctgggcttggttctctcctcctggagcgcctgtctgttgactatggcaagaagtccaagctcggtttcaccgtgtacccatccccccaggtgtccacatccgtggttgagccatacaacagtgtcctgtccacccactctctcctcgagcacactgatgttgctgtcctgctcgacaatgaggccatctatgacatctgccgccgctcccttgacattgagcgcccaacctacaccaacctcaacaggcttgtctcccaggtcatctcatccctgacggcttccctgaggttcgatggtgctctgaacgttgatgtgaacgagttccagaccaacctggtgccctacccgaggatccacttcatgctttcgtcctacgctccagtcatttctgctgagaaggcctaccacgagcagctgtccgtggccgaaatcaccaacagcgccttcgagccatcctccatgatggccaagtgcgacccccgccatggcaagtacatggcatgctgcctcatgtaccgtggtgatgtggttcccaaggacgtgaacgctgctgtggccacaatcaagaccaagcgcaccatccagttcgtggactggtgcccgactggcttcaagtgcggaatcaactaccagcctcccagcgtcgtccccggcagtgacctggccaaggtgcagcgtgccgtgtgcatgatctccaactccaccagtgttgtggaggtcttctcccgcattgaccacaagttcgacctcatgtacgccaagcgcgccttcgtgcactggtacgtcggtgagggtatggaggagggcgagttctccgaggctcgtgaggatctggctgcgctcgagaaggactacgaggaggtcggtgctgagtttgacgagggtgaggacggcgacgagggtgacgagtactagacgctctactggcgcggcgtcgtcgggcttgtgtgccactgctatcctgtgatctgccctgagtggctcctatcgtgttatgtttctgtcggttcttatctatctgtcgttgtgtggtttacaacttacgttgtaagactttattcccccgctttgctactgggttattaagtttggcgttattgttttcttg

SEQ ID NO: 27336 - DNA, 1069 bp, Zea mays
  Clone ID: LIB4729-083-F4_FLI
ccgggggaggcgaatctctcgctaactgtcatcaatggcggccgagcccaagatcctagagctctccaacggcaagatcaccgcgaggatctccaactggggcgccaccatcacctccctcctcgtccccgacgcccaggaaaggcatgtcaccttattttggctgcatagttggccgtgtcgcgaataggatcaaggatgggaagtttacactaaacggacttgagtattcattacctgtcaacaatggacctaacagccttcatggtgggttgaagggatttgataaggtcgtgtgggatgtcgtggagcacaaagatggcgaatgcccttcaataacttttcagtatcacagcaaggacggggaagaaggctatccaggcgatgtaaccattcgagcaacatactctcttcctgaagctactactctaaggcttgacatggaagctacaccagagaacaaagcaactcctataagcctggcgcagcacacctactggaacctcgcaggtcacgcccgcggcgacatcttaaaccactcgctgcagatctggggcaagcacatcactccggtcgatgagaacacaattcccaccggcgaggtaatgcccgtcgatggcacccctttcgacttcacgacggagcgcaggattggcgagcgcatcgacggtgttcctggagggtatgatcataactacgtgctggactgtggcgacgagaaggacggcctgaagcgtgcggccaggctgaaagatccgtcaagcttgcggaccctggacctgtggactgacgcacccggcatgcagctgtacactgccaactacgtggatggcatcggtggcaaggcgggcgctgtctacgcgaagcatgctggagtgtgcttggaaacccaggggttcccgaatgccatcaaccagcctgagtttccctctgtggttgttcggcccggtgagaagtataagcatactatgctgtttgagttctcgggatgttgaatgaatagtgactggacagcataaattgatgtaaaacatgttgaatgaataaacaagcagaaggataagctgtg

SEQ ID NO: 27337 - DNA, 722 bp, Zea mays
  Clone ID: LIB4729-083-F8_FLI
ctcgaggccggccgggctgtttccccgccgccgcctccaagcgcccccgcgagccagctccggcgaagtcgacagcaccaagcatggcggacacgaaggcgtcacccgcggtgacgctccgcacgcgcaagttcatgaccaaccgcctcctctcccgcaagcagttcgtgctcgaggttctccaccccggccgcgccaacgtctctaaggcggagctcaaggagaggctggctaagatgtacgaggtgaaggatcccaactgcatcttcgtcttcaagttccgcacccacttcggaggcggcaagtctaccggattcggtctcatctacgacaacgtcgactcagccaagaagttcgagcccaagtacaggcttatcaggaacggtcttgctaccaaggtggagaagtcgcgcaagcagatgaaggagaggaagaacagggcgaagaagatccgcggtgtgaagaagccaaaggctggggacgctaagaagaaatgagcaaggtttcagtgtactttagccgtcttgagtttgagtaacacctgctcgccgtcagaaattttgtaccccatgtcgcaatgctttgatctagaaaaagagttttttttagctgtttacatcgactactggtacatttgaaaaggcatattccccatctttgtggcaatgtcgcggcgataccatgctgggccgaggattttttaacgaagttatacttttaag

SEQ ID NO: 27338 - DNA, 641 bp, Zea mays
  Clone ID: LIB4729-084-A12_FLI
ccgggattccacccatcgccgccgaaatcccgttgcgtctctcgcgcgttaccaagctctcaagttttctcgcgccgacggcaatggatgaggtcaccgaggccgtgaacaacctcaacatctcgggcgtaggggccgcgggcgttgccggggcggaagggcacaagaagaatcgcatccaggtctccaacactaagaagcccctcttcttctatgtcaacctcgccaagaggtacatgcagctgcacaacgaagtagagctgtcggccctcggcatggccattgcgacggtggtgacagtagcagaaattctgaaaaataacgggcttgctgtcgcgaagagtatcatgacatctactgttgatatcaaggacgagactaggacccggcctatccagaaggccaagattgaaatattgcttggcaagacggagaagtttgatgagctgatggcagcggctgccgaggagagggaggctaatggggccgaggaacaaagctgagtacctgcaaggaaggaccttgttgtagcttatttactgttttctgctgctagatttgtcttcttcatagtttgtcgagtgggctagagacgattacttgtataatcaattaaaggcgcggcttatttagtgtgcttt

SEQ ID NO: 27339 - DNA, 1328 bp, Zea mays
  Clone ID: LIB4729-084-D10_FLI
ccgggatcctcagcctcagctcagtctcttccactctcccttgacctatttcctctcacctgctgattgctgtgccgctccgctccgctccggtggcatctgcatctgcatctgcatctgcatctgcatctccatccctcgatctgtcttctctcagggtggaataagcgtgacaatggaggctccacccgtggcgctgttcgacaccctcaaggcagccaaaccgttcttcttgttggctggtcccaacgtgattgaatcggaggagcacgtcctgaagatggccaaacacatcaaagcaattacgaccaagcttggaattccgctcgtgttcaagtccagctttgataaagcaaaccgtacatcatcaaaatcattccgtggtcctggtcttgaagaaggtcttaagatccttcaaaaggtgaaagcaacatatgaccttccgatagtcactgatgtgcacgaaagccaccagtgtgaagctgttggaagagttgctgacatcatacagattccagccttcctctgtcgccagactgatcttctagtggctgctgctaaggctggaaaaattatcaatatcaagaaaggacaattctgtgcgccttctgttatggtgaactctacggagaaagtaaggcttgctgggaatccaaatgtgatggtctgtgagcgtggtaccatgtttggctacaatgatctatttgttgacccaaggaaccttgagtggctgagggaaagcaactgcccagttgtagctgatgtaacacatgctctacagcaaccagctggaagaaagcttgatggtggaggtgttgcaagcggtgggctacgagaactaataccgtgcattgcaaggacttctgttgctgttggtgttgatggtattttcatggaggtacatgatgaccccttgaatgcaccatgcgatggcccaactcaatggccgttgcgcaatctggaagagctgttggaggaattaattgcaattgctcgagttaccaagggaaagaagccattcaagatcgacctcactccgttccaggagtgatctgctttggttgataaaaagcacaatgccaccatccatggaattccacagggtggatttcaatatgaattgagtacttgctattgttgggagtatacctgcagtggatgacttagactatctctagcagattctttatctcattccgtattttatttcctttttcaaactccactctgcaaacagtgttaaacagtgttgtcatctacagtttcgcattccctgttttaccctatctactcgagacagtcttatcaccgaacaaactattgtgttg

SEQ ID NO: 27340 - DNA, 1011 bp, Zea mays
  Clone ID: LIB4729-084-D3_FLI
ccgggactcccgtcactccttatcccttcccatcgatcccatgccctgttgccgcgcccgcacctccttccccatccgcgcccgccgcggctcctccggcagctccgccacgcgcccaaccgcaacctgcccgcacggccaccgctgcctggtagtatctatcaaatcagccacctgtcctctttttcttcaaatcaagtccgtttccctttcctttctaccctctccctcgtctccggcgggcggtggcctcacctccctctccccgtcgccctgatggctccctccacagctctcgctccggtggccttccgctccgccttctcgacgccgctcgcgtcgaaacctacccgtaatagaatgaacatagagggcgctttctgtttgccgtgttccacaaggaagagagcaagttatagacctttccgagtgtacagtttatttggagggaagaaggataaagatgagaatggtgatgaggcgccatcgaaagcaggaatttttggaaatatgcaaaatctctatgaaactgttaagaaggcccaaatggttgtccaagttgaggctgtccgggtgcaaaaggagcttgcagcgactgagattgatggttattgtgaaggcgaactaatcaaggttacactttctggaaaccagcaacctattagagttgaaatcacagaagctgcgatggagttgggtgctgaaaaactttccgggttggtcaacgatgcttacaaggatgcacaccaacggagcgtccaggccatgaaagagaggatggctgacttggcgcagagcctgggaatgcctgcgggcctcggcgatggtctcaagtgatgccgcaattcgggaaagctttccaataatcctttttcctcaattttgtatgctagccgtgtgagtagtaagcataacccctccgcgacctctcataagaagtgtacttgtgagcacttgttttctttcagctttagctgccatttgctgttctgcgcacgcagatatttgcac

SEQ ID NO: 27341 - DNA, 904 bp, Zea mays
  Clone ID: LIB4729-084-F12_FLI
attcctgcgcagcacgcacggacgccatcgaggaaccctaaccagagcacagcacacggagcgacggcggcacgccaccggcgactggcggctggtgccccctctcggtccccactccccagcacggcgacggcctgctgcatcagatggtaaattatttctcagactcagagtgcaaagaagttggttcgtccagggaagcggaatagaggttatgcttttgtgtgagcgtgttgctcttcagcggcggcggcggtgctggcattcttgctacctcagctctgccaggaaataaatcgcagcagcgcggaatttgtgtggagattcatgtttacgaatgcgcagcgccaggtcgagcgcaccggccgttctggcactccgcgagaccagtaccttcaggatctcgtgacccagttccagaacgccacggatgaagctgaatgttctggagttattcttggactgcattacagagcctaatgaaaggcttatcgagttcggcattggtggaatatgtaactcctgtgttgatcctgcaaatgctttaatcattactcagtgtggtggaatcccattggttatacaatgcttatcgagcccagtgcggaatactgtgacttatgcgcttggggctttgtattacctttgtaacccttcgacaaagaaggagatcctgaaaccagatgtagttagtactataagagagtatgcttcagctggaactgtgaataacaactttagcaatctggctaatgctttcttggagaaacatgttgatccatgatatgacaattttacagggtagactaaagcttacacatatcgtgtacctgtggtgttttcatattctggatatgaactaaagaaactagagcttagatctcatgctttcattgttttgggc
